(19) United States
(12) Patent Application Publication
(10) Pub. No.: US 2005/0255114 A1
(43) Pub. Date: Nov. 17, 2005

(54) Methods and diagnosis for the treatment of preeclampsia

(75) Inventors: Ivan Labat, Mountain View, CA (US); Y. Tom Tang, San Jose, CA (US); Birgit Stache-Crain, Sunnyvale, CA (US); Bryan Boyle, Palo Cedro, CA (US)

Correspondence Address: NUVELO, INC, 675 ALMANOR AVE., SUNNYVALE, CA, 94085, US

(73) Assignee: NUVELO, Inc., Sunnyvale, CA (US)

(21) Appl. No.: 10/821,234

(22) Filed: Apr. 7, 2004

Related U.S. Application Data
(60) Provisional application No. 60/462,047, filed on Apr. 7, 2003.

(51) Int. Cl. C12Q 1/68; G01N 33/53; G01N 33/567; A61K 39/395

(52) U.S. Cl. 424/146.1; 435/6; 435/7.2

(57) ABSTRACT

Provided by the present invention are methods for treating and diagnosing preeclampsia, as well as kits for use in diagnosing patients with a higher risk of preeclampsia.

### 1. TECHNICAL FIELD

[0001] The present invention provides novel methods for the diagnosis of preeclampsia by determination of both lower and higher levels of proteins and/or polynucleotides or combinations thereof in patient tissue samples. Furthermore, it presents methods of treatment of preeclampsia through either inhibition of function of proteins or polynucleotides that are expressed higher in preeclampsia, or through replacement therapy of proteins or polynucleotides that are expressed lower in preeclampsia.

[0002] 1.2 Sequence Listing

[0003] The sequences of the polynucleotides and polypeptides of the invention are listed in the Sequence Listing and are submitted on a compact disc containing the file labeled “821A.txt”-4.69 MB (4,921,344 bytes) which was created on an IBM PC, Windows 2000 operating system on Thursday, Apr. 1, 2004 at 12:22:06 PM. The Sequence Listing entitled “821A.txt” is herein incorporated by reference in its entirety. A computer readable format (“CRF”) and two duplicate copies (“Copy 1” and “Copy 2”) of the Sequence Listing “821A.txt” are submitted herein. Applicants hereby state that the content of the CRF and Copies 1 and 2 of the Sequence Listing, submitted in accordance with 37 C.F.R. §1.821(c) and (e), respectively, are the same.

### 2. BACKGROUND

[0004] Preeclampsia is a disorder complicating 5% of pregnancies in U.S. Moreover, it is the second major cause of maternal death in both U.S. and Japan, and is the leading cause of neonatal morbidity and mortality. It is a maternal disease, presenting with wide spectrum of symptoms, including hypertension, edema, proteinuria, fatigue, rapid weight gain, cardiac, pulmonary and renal failure. Pregnancy can further be complicated with hemolytic and liver manifestations, i.e. disease can progress into HELLP syndrome (Hemolysis, which is the breaking down of red blood cells, Elevated Liver enzymes, and Low Platelet count), or can progress into eclampsia, manifested by seizures and eventual death.

[0005] The fact that there is no effective predelivery treatment and that ultimately, the treatment of choice is delivery of the placenta, leads to two observations: First, there is a substantial lack of understanding of both etiology and pathophysiology of the disorder. Suggested treatments are symptomatic and include seizure prophylaxis with use of magnesium sulfate, aspirin (generally unsuccessful), and prevention by increasing the dietary intake of calcium. Attempts of mapping the genes or loci involved have yielded no obvious success, leaving the root cause of the disorder unknown. Secondly, research on the subject of preeclampsia has revolved around placental growth and angiogenesis, as both are central to the etiology of the disease. Available evidence implicates the placenta in the maternal systemic effects seen in preeclampsia. Therefore, extracellular placental factor(s) secreted by the placenta are likely to be synthesized by the placenta and may be useful in the diagnosis and therapy of preeclampsia.

[0006] Several differentially-expressed genes have been previously examined for roles in both diagnosis and treatment of preeclampsia. Despite this fact, there remains no reliable diagnostic nor treatment for this disease. Thus, there exists a need in the art to identify and develop agents, such as peptides, nucleic acids, or antibodies that provide therapeutic compositions and diagnostic methods for treating and identifying preeclampsia.

### 3. SUMMARY OF THE INVENTION

[0007] This invention is based on the discovery that SEQ ID NO: 1-852 encode nucleotides that are either up-regulated or down-regulated in preeclamptic placenta as compared to control placenta. SEQ ID NO: 853-1704 comprise the protein or protein fragments encoded by the nucleotide sequences of SEQ ID NO: 1-852.

[0008] The invention provides therapeutic and diagnostic methods for targeting tissue or tissue samples expressing SEQ ID NO: 853-1704 by using diagnostic, therapeutic, or targeting elements such as SEQ ID NO: 853-1704 polypeptides, and nucleic acids encoding said SEQ ID NO: 853-1704 polypeptides. SEQ ID NO: 1-852 exhibit differential expression profiles in preeclampic placental tissue samples as compared to healthy placental tissues (see Examples, specifically 3 and 11). Thus, detection of expression levels of these genes individually or in combination will provide a means through which to detect preeclampsia during pregnancy. Additionally, genes that exhibit lower expression in preeclamptic tissues as compared to healthy tissues provide a means through which a patient experiencing preeclampsia may be treated therapeutically, as replacement therapy with these gene products individually or in combination may ameliorate signs or symptoms of the disease. Furthermore, genes that exhibit higher expression in preeclamptic tissues as compared to healthy tissues provide a means through which a patient experiencing preeclampsia may be treated therapeutically, as targeting of these genes in order to decrease the effect of their overexpression may ameliorate signs or symptoms of the disease.

[0009] The present invention provides a variety of diagnostic elements and compositions. One such embodiment is a diagnostic kit comprising antibody preparation that is specific for SEQ ID NO: 853-1704. The kit would be utilized to detect levels of any of the polypeptides of SEQ ID NO: 853 through 1704 that are differentially expressed in tissues derived from preeclampic patients as compared to a normal range of expression derived from healthy patients. Exemplary diagnostic antibodies include a single antibody selective for a polypeptide of the invention, a combination of 2 or more such antibodies of the invention, and a combination of at least one such antibody of the invention with an antibody that does not recognize a polypeptide of the invention. Such a kit includes a standard for any of SEQ ID NO: 853-1704 indicative of a higher risk of diagnosis of preeclampsia. Exemplary tissues subject to this diagnostic kit include serum, plasma, urine, vaginal mucous, amniotic fluid, and fetal and/or maternal cells.

[0010] Another diagnostic embodiment of the invention is a kit comprising a protein chip for quantification of levels of SEQ ID NO: 853-1704 in biological samples. Such a chip is a solid surface array with specific chemical (e.g. anion, cation, hydrophobic, hydrophilic, metal) or biochemical (e.g. antibody, receptor, DNA, enzyme) moiety precoated on the surface. The chemical moieties are designed to capture and recognize whole classes of polypeptides from a tissue sample, while the biochemical moieties are designed to capture and recognize specific polypeptide sequences.

[0011] Another diagnostic embodiment of the invention is a kit comprising one or more polynucleotide sequences of SEQ ID NO: 1-852 coupled to a surface. Polynucleotides derived from the messenger RNA (mRNA) from fetal cells or maternal tissues will be hybridized to the surface-coupled polynucleotides of any of SEQ ID NO: 1-852. The kit will be utilized to detect differentially-expressed levels of one or more of the polynucleotides of SEQ ID NO: 1-852 in fetal cells or placental tissues derived from preeclamptic patients, as compared to a normal range of expression derived from healthy patients. Such a kit includes a standard for any of SEQ ID NO: 1-852 indicative of a higher risk of diagnosis of preeclampsia. An exemplary source of fetal cells or placental tissues is from cells or tissues shed into the maternal blood, and maternal cells as well.

[0012] The present invention provides for compositions that can be utilized for replacement therapeutics in order to ameliorate the signs and symptoms of preeclampsia wherein one or more of the genes set forth in SEQ ID NO: 1-852 are down-regulated in preeclampsia. One such embodiment is a composition comprising one or more isolated polypeptides that include, but are not limited to, a polypeptide comprising the polypeptide sequence set forth in SEQ ID NO: 853-1704; or a fragment of SEQ ID NO: 853-1704. This embodiment further includes amelioration of the signs or symptoms of preeclampsia via administration of one or more of the polypeptides of SEQ ID NO: 853-1704 and a pharmaceutically acceptable carrier.

[0013] Another embodiment of the invention is a composition comprising one or more isolated polynucleotides that include, but are not limited to, a polynucleotide comprising the polynucleotide sequence set forth in SEQ ID NO: 1-852; or a fragment of SEQ ID NO: 1-852; or a full length coding sequence SEQ ID NO: 1-852. This embodiment further includes amelioration of the signs or symptoms of preeclampsia via administration of one or more of the polynucleotides of SEQ ID NO: 1-852 and a pharmaceutically acceptable vector for delivery of a functional gene corresponding to polynucleotides of SEQ ID NO: 1-852, wherein the loss of normal function of the corresponding gene has been observed through diagnostics.

[0014] The present invention provides for targeting elements and compositions for genes expressed at higher levels in preeclamptic tissues than healthy. One such embodiment is a composition comprising an antibody preparation selective for a polypeptide of SEQ ID NO: 853-1704. Exemplary therapeutic antibodies include a single such antibody of the invention, a combination of two or more such antibodies of the invention, a combination of at least one antibody of the invention with an antibody that does not recognize a polypeptide of the invention, humanized antibodies that retain all or a portion of antigen-binding sites of said antibody or complementarity-determining regions (CDR) that recognize SEQ ID NO: 853-1704, Fab antibodies or fragments thereof, including a fragment of an antibody that retains one or more CDRs that recognize SEQ ID NO: 853-1704, and antibody fusion proteins that recognize a polypeptide of the invention.

[0015] Another targeting embodiment of the invention is a vaccine comprising a polypeptide of the invention, or a fragment or variant thereof and optionally comprising a suitable adjuvant.

### 4. BRIEF DESCRIPTION OF THE DRAWINGS

[0016] FIG. 1 shows the expression ratios of SEQ ID NO: 357 to SEQ ID NO: 551 relative to each other, using a real-time PCR protocol (TaqMan assay). The raw cycle count scores for each gene in the measured tissues were selected, with each score representing the number of doublings required to detect the message. The inverse expression ratios were computed for each gene in each measured tissue using the following formula:
[0017] (2 raised to the power of the SEQ ID NO: 347 raw cycle count score) divided by (2 raised to the power of the SEQ ID NO: 551 raw cycle count score).

### 5. DETAILED DESCRIPTION OF THE INVENTION

[0018] The development of the human fetus depends on the ability of trophoblast cells to invade the maternal tissues in order to anchor the placenta and fetus to the maternal endometrium and to gain access to, and control of, the maternal circulation. Human haemochorial placentation involves proliferation, migration and invasion of the endometrium and its vasculature by trophoblast cells (extravillous trophoblast, EVT). A completion of remodeling of uteroplacental arteries, which is dependent on trophoblast invasion, appears to provide a means of unhindered placental perfusion with maternal blood. Poor placental perfusion in a hypoinvasive placenta of preeclampsia is believed to impede fetal growth and thus affect fetal well being in some cases.

[0019] The pathophysiology of preeclampsia is poorly understood. Two stages of vascular dysfunction seem to be involved. In the early stage suboptimal development of the placenta and a hemodynamic maladaptation to pregnancy exist. At this stage maternal constitutional factors such as genetic and immunological factors and preexisting vascular diseases could play a role. However, no causal relationship has yet been proven. Extracellular placental factor(s), supposedly under the influence of ischemia due to defective placentation, may be responsible for the development of the preeclampsia condition rather than preeclampsia being a simple consequence of improper placentation. Thus, these factors may cause late vascular dysfunction characterized mainly by a generalized endothelial dysfunction, thus leading to the clinical presentation of preeclampsia.

[0020] There are three distinct regions of the maternal-fetal interface, any or all of which may be involved in the clinical manifestation of preeclampsia pregnancy disorder. It has been demonstrated that there is differential gene expression of some growth factors and their receptors between these regions in normal and preeclamptic pregnancy, and thus their spatial and temporal regulation is suggested in pregnancy disorders. The compositions of the present invention are based on an anlysis of tissues from the maternal-fetal interface including 2 different areas of the placental bed: the basal plate (deciduas basalis) and marginal zone (deciduas marginalis) as well as trophoblastic villi (see Examples 1-2).

[0021] The deciduas basalis is the portion of the maternal endometrium that participates with the chorion in the formation of the placenta at the site of implantation. The invasive function of the trophoblast cells is achieved by two distinctive pathways: 1) the villous pathway, in which cytotrophoblast cells proliferate and fuse, giving rise to the syncytiotrophoblast layer of the floating villi, which is engaged primarily in exchange and endocrine functions; and 2) the extravillous pathway, in which certain cytotrophoblast cells break out of the villi as discrete cell columns, migrate and invade the decidua and its vasculature. These “extravillous trophoblast cells” (EVT) are highly proliferative and invasive. In the placental bed, these cells segregate into several subsets. Of high importance are endovascular EVTs, which replace the endothelium (maternal blood vessel lining) of the uteroplacental arteries during the process of remodeling (endovascular invasion). Poor EVT cell invasion and remodeling of uteroplacental arteries are key features of preeclampsia, whereas uncontrolled invasion is a feature of trophoblastic neoplasias including choriocarcinomas.

[0022] The decidua marginalis represents the lateral part of the placenta, responsible for the lateral placental growth.

[0023] The trophoblast villi is from the middle area of placental body represent fetal placental pathology and could provide valuable information about placental development. Moreover, the analysis of molecular pathophysiology of this region could indicate abrogated functions in pregnancy disorders.

[0024] This invention is based on the discovery that SEQ ID NO: 1-852 encode nucleotides that are either up-regulated or down-regulated in preeclamptic placenta as compared to control placenta. SEQ ID NO: 853-1704 comprise the protein or protein fragments encoded by the nucleotide sequences of SEQ ID NO: 1-852.

5.1 Definitions

[0025] It must be noted that as used herein and in the appended claims, the singular forms “a”, “an” and “the” include plural references unless the context clearly dictates otherwise.

[0026] The term “active” refers to those forms of the polypeptide that retain the biologic and/or immunologic activities of any naturally occurring polypeptide. According to the invention, the terms “biologically active” or “biological activity” refer to a protein or peptide having structural, regulatory or biochemical functions of a naturally occurring molecule. Likewise “biologically active” or “biological activity” refers to the capability of the natural, recombinant or synthetic polypeptide of the invention, or any peptide thereof, to induce a specific biological response in appropriate animals or cells and to bind with specific antibodies.

[0027] The term “activated cells” as used in this application are those cells which are engaged in extracellular or intracellular membrane trafficking, including the export of secretory or enzymatic molecules as part of a normal or disease process.

[0028] The terms “complementary” or “complementarity” refer to the natural binding of polynucleotides by base pairing. For example, the sequence 5′-AGT-3′ binds to the complementary sequence 3′-TCA-5′. Complementarity between two single-stranded molecules may be “partial” such that only some of the nucleic acids bind or it may be “complete” such that total complementarity exists between the single stranded molecules. The degree of complementarity between the nucleic acid strands has significant effects on the efficiency and strength of the hybridization between the nucleic acid strands.

[0029] The term “embryonic stem cells (ES)” refers to a cell that can give rise to many differentiated cell types in an embryo or an adult, including the germ cells. The term “germ line stem cells (GSCs)” refers to stem cells derived from primordial stem cells that provide a steady and continuous source of germ cells for the production of gametes. The term “primordial germ cells (PGCs)” refers to a small population of cells set aside from other cell lineages particularly from the yolk sac, mesenteries, or gonadal ridges during embryogenesis that have the potential to differentiate into germ cells and other cells. PGCs are the source from which GSCs and ES cells are derived The PGCs, the GSCs and the ES cells are capable of self-renewal. Thus these cells not only populate the germ line and give rise to a plurality of terminally differentiated cells that comprise the adult specialized organs, but are able to regenerate themselves. The term “totipotent” refers to the capability of a cell to differentiate into all of the cell types of an adult organism. The term “pluripotent” refers to the capability of a cell to differentiate into a number of differentiated cell types that are present in an adult organism. A pluripotent cell is restricted in its differentiation capability in comparison to a totipotent cell.

[0030] The term “expression modulating fragment,” EMF, means a series of nucleotides that modulates the expression of an operably linked ORF or another EMF. As used herein, a sequence is said to “modulate the expression of an operably linked sequence” when the expression of the sequence is altered by the presence of the EMF. EMFs include, but are not limited to, promoters, and promoter modulating sequences (inducible elements). One class of EMFs is nucleic acid fragments which induce the expression of an operably linked ORF in response to a specific regulatory factor or physiological event.

[0031] The terms “nucleotide sequence” or “nucleic acid” or “polynucleotide” or “oligonucleotide” are used interchangeably and refer to a heteropolymer of nucleotides or the sequence of these nucleotides. These phrases also refer to DNA or RNA of genomic or synthetic origin which may be single-stranded or double-stranded and may represent the sense or the antisense strand, to peptide nucleic acid (PNA) or to any DNA-like or RNA-like material. In the sequences, A is adenine, C is cytosine, G is guanine, and T is thymine, while N is A, T, G, or C. It is contemplated that where the polynucleotide is RNA, the T (thymine) in the sequence herein may be replaced with U (uracil). Generally, nucleic acid segments provided by this invention may be assembled from fragments of the genome and short oligonucleotide linkers, or from a series of oligonucleotides, or from individual nucleotides, to provide a synthetic nucleic acid which is capable of being expressed in a recombinant transcriptional unit comprising regulatory elements derived from a microbial or viral operon, or a eukaryotic gene.

[0032] The terms “oligonucleotide fragment” or a “polynucleotide fragment”, “portion,” or “segment” or “probe” or “primer” are used interchangeably and refer to a sequence of nucleotide residues which are at least about 5 nucleotides, more preferably at least about 7 nucleotides, more preferably at least about 9 nucleotides, more preferably at least about 11 nucleotides and most preferably at least about 17 nucleotides. The fragment is preferably less than about 500 nucleotides, preferably less than about 200 nucleotides, more preferably less than about 100 nucleotides, more preferably less than about 50 nucleotides and most preferably less than 30 nucleotides. Preferably the probe is from about 6 nucleotides to about 200 nucleotides, preferably from about 15 to about 50 nucleotides, more preferably from about 17 to 30 nucleotides and most preferably from about 20 to 25 nucleotides. Preferably the fragments can be used in polymerase chain reaction (PCR), various hybridization procedures or microarray procedures to identify or amplify identical or related parts of mRNA or DNA molecules. A fragment or segment may uniquely identify each polynucleotide sequence of the present invention. Preferably the fragment comprises a sequence substantially similar to a portion of SEQ ID NO: 1-852.

[0033] Probes may, for example, be used to determine whether specific mRNA molecules are present in a cell or tissue or to isolate similar nucleic acid sequences from chromosomal DNA as described by Walsh et al. (Walsh, P. S. et al., PCR Methods Appl. 1:241-250 (1992)). They may be labeled by nick translation, Klenow fill-in reaction, PCR, or other methods well known in the art. Probes of the present invention, their preparation and/or labeling are elaborated in Sambrook, J. et al., 1989, Molecular Cloning: A Laboratory Manual, Cold Spring Harbor Laboratory, NY; or Ausubel, F. M. et al., 1989, Current Protocols in Molecular Biology, John Wiley & Sons, New York N.Y., both of which are incorporated herein by reference in their entirety.

[0034] The nucleic acid sequences of the present invention also include the sequence information from any of the nucleic acid sequences of SEQ ID NO: 1-852. The sequence information can be a segment of SEQ ID NO: 1-852 that uniquely identifies or represents the sequence information of SEQ ID NO: 1-852. One such segment can be a twenty-mer nucleic acid sequence because the probability that a twenty-mer is fully matched in the human genome is 1 in 300. In the human genome, there are three billion base pairs in one set of chromosomes. Because 4²⁰ possible twenty-mers exist, there are 300 times more twenty-mers than there are base pairs in a set of human chromosomes. Using the same analysis, the probability for a seventeen-mer to be fully matched in the human genome is approximately 1 in 5. When these segments are used in arrays for expression studies, fifteen-mer segments can be used. The probability that the fifteen-mer is fully matched in the expressed sequences is also approximately one in five because expressed sequences comprise less than approximately 5% of the entire genome sequence.

[0035] Similarly, when using sequence information for detecting a single mismatch, a segment can be a twenty-five mer. The probability that the twenty-five mer would appear in a human genome with a single mismatch is calculated by multiplying the probability for a full match (1÷4²⁵) times the increased probability for mismatch at each nucleotide position (3×25). The probability that an eighteen mer with a single mismatch can be detected in an array for expression studies is approximately one in five. The probability that a twenty-mer with a single mismatch can be detected in a human genome is approximately one in five.

[0036] The term “open reading frame,” ORF, means a series of nucleotide triplets coding for amino acids without any termination codons and is a sequence translatable into protein.

[0037] The terms “operably linked” or “operably associated” refer to functionally related nucleic acid sequences. For example, a promoter is operably associated or operably linked with a coding sequence if the promoter controls the transcription of the coding sequence. While operably linked nucleic acid sequences can be contiguous and in the same reading frame, certain genetic elements e.g. repressor genes are not contiguously linked to the coding sequence but still control transcription/translation of the coding sequence.

[0038] The term “pluripotent” refers to the capability of a cell to differentiate into a number of differentiated cell types that are present in an adult organism. A pluripotent cell is restricted in its differentiation capability in comparison to a totipotent cell.

[0039] The terms “polypeptide” or “peptide” or “amino acid sequence” refer to an oligopeptide, peptide, polypeptide, or protein sequence or fragment thereof and to naturally occurring or synthetic molecules. A polypeptide “fragment,” “portion,” or “segment” is a stretch of amino acid residues of at least about 5 amino acids, preferably at least about 7 amino acids, more preferably at least about 9 amino acids and most preferably at least about 17 or more amino acids. The peptide preferably is not greater than about 200 amino acids, more preferably less than 150 amino acids and most preferably less than 100 amino acids. Preferably the peptide is from about 5 to about 200 amino acids. To be active, any polypeptide must have sufficient length to display biological and/or immunological activity.

[0040] The term “naturally occurring polypeptide” refers to polypeptides produced by cells that have not been genetically engineered and specifically contemplates various polypeptides arising from post-translational modifications of the polypeptide including, but not limited to, acetylation, carboxylation, glycosylation, phosphorylation, lipidation and acylation.

[0041] The term “translated protein coding portion” means a sequence which encodes for the full length protein which may include any leader sequence or a processing sequence.

[0042] The term “mature protein coding sequence” refers to a sequence which encodes a peptide or protein without any leader/signal sequence. The “mature protein portion” refers to that portion of the protein without the leader/signal sequence. The peptide may have the leader sequences removed during processing in the cell or the protein may have been produced synthetically or using a polynucleotide only encoding for the mature protein coding sequence. It is contemplated that the mature protein portion may or may not include an initial methionine residue. The initial methionine is often removed during processing of the peptide.

[0043] The term “derivative” refers to polypeptides chemically modified by such techniques as ubiquitination, labeling (e.g., with radionuclides or various enzymes), covalent polymer attachment such as pegylation (derivatization with polyethylene glycol) and insertion or substitution by chemical synthesis of amino acids such as omithine, which do not normally occur in human proteins.

[0044] The term “variant” (or “analog”) refers to any polypeptide differing from naturally occurring polypeptides by amino acid insertions, deletions, and substitutions, created using, e.g., recombinant DNA techniques. Guidance in determining which amino acid residues may be replaced, added or deleted without abolishing activities of interest, may be found by comparing the sequence of the particular polypeptide with that of homologous peptides and minimizing the number of amino acid sequence changes made in regions of high homology (conserved regions) or by replacing amino acids with consensus sequence.

[0045] Alternatively, recombinant variants encoding these same or similar polypeptides may be synthesized or selected by making use of the “redundancy” in the genetic code. Various codon substitutions, such as the silent changes which produce various restriction sites, may be introduced to optimize cloning into a plasmid or viral vector or expression in a particular prokaryotic or eukaryotic system. Mutations in the polynucleotide sequence may be reflected in the polypeptide or domains of other peptides added to the polypeptide to modify the properties of any part of the polypeptide, to change characteristics such as ligand-binding affinities, interchain affinities, or degradation/turnover rate.

[0046] Preferably, amino acid “substitutions” are the result of replacing one amino acid with another amino acid having similar structural and/or chemical properties, i.e., conservative amino acid replacements. “Conservative” amino acid substitutions may be made on the basis of similarity in polarity, charge, solubility, hydrophobicity, hydrophilicity, and/or the amphipathic nature of the residues involved. For example, nonpolar (hydrophobic) amino acids include alanine, leucine, isoleucine, valine, proline, phenylalanine, tryptophan, and methionine; polar neutral amino acids include glycine, serine, threonine, cysteine, tyrosine, asparagine, and glutamine; positively charged (basic) amino acids include arginine, lysine, and histidine; and negatively charged (acidic) amino acids include aspartic acid and glutamic acid. “Insertions” or “deletions” are preferably in the range of about 1 to 20 amino acids, more preferably 1 to 10 amino acids. The variation allowed may be experimentally determined by systematically making insertions, deletions, or substitutions of amino acids in a polypeptide molecule using recombinant DNA techniques and assaying the resulting recombinant variants for activity.

[0047] Alternatively, where alteration of function is desired, insertions, deletions or non-conservative alterations can be engineered to produce altered polypeptides. Such alterations can, for example, alter one or more of the biological functions or biochemical characteristics of the polypeptides of the invention. For example, such alterations may change polypeptide characteristics such as ligand-binding affinities, interchain affinities, or degradation/turnover rate. Further, such alterations can be selected so as to generate polypeptides that are better suited for expression, scale up and the like in the host cells chosen for expression. For example, cysteine residues can be deleted or substituted with another amino acid residue in order to eliminate disulfide bridges.

[0048] The terms “purified” or “substantially purified” as used herein denotes that the indicated nucleic acid or polypeptide is present in the substantial absence of other biological macromolecules, e.g., polynucleotides, proteins, and the like. In one embodiment, the polynucleotide or polypeptide is purified such that it constitutes at least 95% by weight, more preferably at least 99% by weight, of the indicated biological macromolecules present (but water, buffers, and other small molecules, especially molecules having a molecular weight of less than 1000 daltons, can be present).

[0049] The term “isolated” as used herein refers to a nucleic acid or polypeptide separated from at least one other component (e.g., nucleic acid or polypeptide) present with the nucleic acid or polypeptide in its natural source. In one embodiment, the nucleic acid or polypeptide is found in the presence of (if anything) only a solvent, buffer, ion, or other components normally present in a solution of the same. The terms “isolated” and “purified” do not encompass nucleic acids or polypeptides present in their natural source.

[0050] The term “recombinant,” when used herein to refer to a polypeptide or protein, means that a polypeptide or protein is derived from recombinant (e.g., microbial, insect, or mammalian) expression systems. “Microbial” refers to recombinant polypeptides or proteins made in bacterial or fungal (e.g., yeast) expression systems. As a product, “recombinant microbial” defines a polypeptide or protein essentially free of native endogenous substances and unaccompanied by associated native glycosylation. Polypeptides or proteins expressed in most bacterial cultures, e.g., E. coli, will be free of glycosylation modifications; polypeptides or proteins expressed in yeast will have a glycosylation pattern in general different from those expressed in mammalian cells.

[0051] The term “recombinant expression vehicle or vector” refers to a plasmid or phage or virus or vector, for expressing a polypeptide from a DNA (RNA) sequence. An expression vehicle can comprise a transcriptional unit comprising an assembly of (1) a genetic element or elements having a regulatory role in gene expression, for example, promoters or enhancers, (2) a structural or coding sequence which is transcribed into mRNA and translated into protein, and (3) appropriate transcription initiation and termination sequences. Structural units intended for use in yeast or eukaryotic expression systems preferably include a leader sequence enabling extracellular secretion of translated protein by a host cell. Alternatively, where recombinant protein is expressed without a leader or transport sequence, it may include an amino terminal methionine residue. This residue may or may not be subsequently cleaved from the expressed recombinant protein to provide a final product.

[0052] The term “recombinant expression system” means host cells which have stably integrated a recombinant transcriptional unit into chromosomal DNA or carry the recombinant transcriptional unit extrachromosomally. Recombinant expression systems as defined herein will express heterologous polypeptides or proteins upon induction of the regulatory elements linked to the DNA segment or synthetic gene to be expressed. This term also means host cells which have stably integrated a recombinant genetic element or elements having a regulatory role in gene expression, for example, promoters or enhancers. Recombinant expression systems as defined herein will express polypeptides or proteins endogenous to the cell upon induction of the regulatory elements linked to the endogenous DNA segment or gene to be expressed. The cells can be prokaryotic or eukaryotic.

[0053] The term “secreted” includes a protein that is transported across or through a membrane, including transport as a result of signal sequences in its amino acid sequence when it is expressed in a suitable host cell. “Secreted” proteins include without limitation proteins secreted wholly (e.g., soluble proteins) or partially (e.g., receptors) from the cell in which they are expressed. “Secreted” proteins also include without limitation proteins that are transported across the membrane of the endoplasmic reticulum. “Secreted” proteins are also intended to include proteins containing non-typical signal sequences (e.g. Interleukin-1 Beta, see Krasney, P. A. and Young, P. R. Cytokine 4:134-143 (1992)) and factors released from damaged cells (e.g. Interleukin-1 Receptor Antagonist, see Arend, W. P. et. al. Annu. Rev. Immunol. 16:27-55 (1998)).

[0054] Where desired, an expression vector may be designed to contain a “signal or leader sequence” which will direct the polypeptide through the membrane of a cell. Such a sequence may be naturally present on the polypeptides of the present invention or provided from heterologous protein sources by recombinant DNA techniques.

[0055] The term “stringent” is used to refer to conditions that are commonly understood in the art as stringent. Stringent conditions can include highly stringent conditions (i.e., hybridization to filter-bound DNA in 0.5 M NaHPO₄, 7% sodium dodecyl sulfate (SDS), 1 mM EDTA at 65° C., and washing in 0.1×SSC/0.1% SDS at 68° C.), and moderately stringent conditions (i.e., washing in 0.2×SSC/0.1% SDS at 42° C.). Other exemplary hybridization conditions are described herein in the examples.

[0056] In instances of hybridization of deoxyoligonucleotides, additional exemplary stringent hybridization conditions include washing in 6×SSC/0.05% sodium pyrophosphate at 37° C. (for 14-base oligonucleotides), 48° C. (for 17-base oligonucleotides), 55° C. (for 20-base oligonucleotides), and 60° C. (for 23-base oligonucleotides).

[0057] As used herein, “substantially equivalent” can refer both to nucleotide and amino acid sequences, for example a mutant sequence, that varies from a reference sequence by one or more substitutions, deletions, or additions, the net effect of which does not result in an adverse functional dissimilarity between the reference and subject sequences. Typically, such a substantially equivalent sequence varies from one of those listed herein by no more than about 35% (i.e., the number of individual residue substitutions, additions, and/or deletions in a substantially equivalent sequence, as compared to the corresponding reference sequence, divided by the total number of residues in the substantially equivalent sequence is about 0.35 or less). Such a sequence is said to have 65% sequence identity to the listed sequence. In one embodiment, a substantially equivalent, e.g., mutant, sequence of the invention varies from a listed sequence by no more than 30% (70% sequence identity); in a variation of this embodiment, by no more than 25% (75% sequence identity); and in a further variation of this embodiment, by no more than 20% (80% sequence identity) and in a further variation of this embodiment, by no more than 10% (90% sequence identity) and in a further variation of this embodiment, by no more that 5% (95% sequence identity). Substantially equivalent, e.g., mutant, amino acid sequences according to the invention preferably have at least 80% sequence identity with a listed amino acid sequence, more preferably at least 90% sequence identity. Substantially equivalent nucleotide sequence of the invention can have lower percent sequence identities, taking into account, for example, the redundancy or degeneracy of the genetic code. Preferably, nucleotide sequence has at least about 65% identity, more preferably at least about 75% identity, and most preferably at least about 95% identity. For the purposes of the present invention, sequences having substantially equivalent biological activity and substantially equivalent expression characteristics are considered substantially equivalent. For the purposes of determining equivalence, truncation of the mature sequence (e.g., via a mutation which creates a spurious stop codon) should be disregarded. Sequence identity may be determined, e.g., using the Jotun Hein method (Hein, J. Methods Enzymol. 183:626-645 (1990)). Identity between sequences can also be determined by other methods known in the art, e.g. by varying hybridization conditions.

[0058] The term “totipotent” refers to the capability of a cell to differentiate into all of the cell types of an adult organism.

[0059] The term “transformation” means introducing DNA into a suitable host cell so that the DNA is replicable, either as an extrachromosomal element, or by chromosomal integration. The term “transfection” refers to the taking up of an expression vector by a suitable host cell, whether or not any coding sequences are in fact expressed. The term “infection” refers to the introduction of nucleic acids into a suitable host cell by use of a virus or viral vector.

[0060] As used herein, an “uptake modulating fragment,” UMF, means a series of nucleotides which mediate the uptake of a linked DNA fragment into a cell. UMFs can be readily identified using known UMFs as a target sequence or target motif with the computer-based systems described below. The presence and activity of a UMF can be confirmed by attaching the suspected UMF to a marker sequence. The resulting nucleic acid molecule is then incubated with an appropriate host under appropriate conditions and the uptake of the marker sequence is determined. As described above, a UMF will increase the frequency of uptake of a linked marker sequence.

[0061] Each of the above terms is meant to encompass all that is described for each, unless the context dictates otherwise.

5.2 Nucleic Acids of the Invention

[0062] The invention is based on the discovery of differentially-expressed polynucleotides in preeclamptic versus normal placental tissues, the polynucleotides encoding corresponding polypeptides and the use of these compositions for the diagnosis, treatment or prevention of preeclampsia.

[0063] The isolated polynucleotides of the invention include, but are not limited to a polynucleotide comprising any of the nucleotide sequences of SEQ ID NO: 1-852; a fragment of SEQ ID NO: 1-852; a polynucleotide comprising the full length protein coding sequence of SEQ ID NO: 1-852 (for example coding for SEQ ID NO: 853 through 1704); and a polynucleotide comprising the nucleotide sequence encoding the mature protein coding sequence of the polypeptides of any one of SEQ ID NO: 853-1704. The polynucleotides of the present invention also include, but are not limited to, a polynucleotide that hybridizes under stringent conditions to (a) the complement of any of the nucleotides sequences of SEQ ID NO: 1-852; (b) a polynucleotide encoding any one of the polypeptides of SEQ ID NO: 853-1704; (c) a polynucleotide which is an allelic variant of any polynucleotides recited above; (d) a polynucleotide which encodes a species homolog of any of the proteins recited above; or (e) a polynucleotide that encodes a polypeptide comprising a specific domain or truncation of the polypeptides of SEQ ID NO: 853-1704. Domains of interest may depend on the nature of the encoded polypeptide; e.g., domains in receptor-like polypeptides include ligand-binding, extracellular, transmembrane, or cytoplasmic domains, or combinations thereof; domains in immunoglobulin-like proteins include the variable immunoglobulin-like domains; domains in enzyme-like polypeptides include catalytic and substrate binding domains; and domains in ligand polypeptides include receptor-binding domains.

[0064] The polynucleotides of the invention include naturally occurring or wholly or partially synthetic DNA, e.g., cDNA and genomic DNA, and RNA, e.g., mRNA. The polynucleotides may include all of the coding region of the cDNA or may represent a portion of the coding region of the cDNA.

[0065] The present invention also provides genes corresponding to the cDNA sequences disclosed herein. The corresponding genes can be isolated in accordance with known methods using the sequence information disclosed herein. Such methods include the preparation of probes or primers from the disclosed sequence information for identification and/or amplification of genes in appropriate genomic libraries or other sources of genomic materials. Further 5′ and 3′ sequence can be obtained using methods known in the art. For example, full length cDNA or genomic DNA that corresponds to any of the polynucleotides of SEQ ID NO: 1-852 can be obtained by screening appropriate cDNA or genomic DNA libraries under suitable hybridization conditions using any of the polynucleotides of SEQ ID NO: 1-852 or a portion thereof as a probe. Alternatively, the polynucleotides of SEQ ID NO: 1-852 may be used as the basis for suitable primer(s) that allow identification and/or amplification of genes in appropriate genomic DNA or cDNA libraries.

[0066] The nucleic acid sequences of the invention can be assembled from ESTs and sequences (including cDNA and genomic sequences) obtained from one or more public databases, such as dbEST, gbpri, and UniGene. The EST sequences can provide identifying sequence information, representative fragment or segment information, or novel segment information for the full-length gene.

[0067] The polynucleotides of the invention also provide polynucleotides including nucleotide sequences that are substantially equivalent to the polynucleotides recited above. Polynucleotides according to the invention can have, e.g., at least about 65%, at least about 70%, at least about 75%, at least about 80%, 81%, 82%, 83%, 84%, 85%, 86%, 87%, 88%, or 89%, more typically at least about 90%, 91%, 92%, 93%, or 94% and even more typically at least about 95%, 96%, 97%, 98% or 99% sequence identity to a polynucleotide recited above.

[0068] Included within the scope of the nucleic acid sequences of the invention are nucleic acid sequence fragments that hybridize under stringent conditions to any of the nucleotide sequences of SEQ ID NO: 1-852, or complements thereof, which fragment is greater than about 5 nucleotides, preferably 7 nucleotides, more preferably greater than 9 nucleotides and most preferably greater than 17 nucleotides. Fragments of, e.g. 15, 17, or 20 nucleotides or more that are selective for (i.e. specifically hybridize to any one of the polynucleotides of the invention) are contemplated. Probes capable of specifically hybridizing to a polynucleotide can differentiate polynucleotide sequences of the invention from other polynucleotide sequences in the same family of genes or can differentiate human genes from genes of other species, and are preferably based on unique nucleotide sequences.

[0069] The sequences falling within the scope of the present invention are not limited to these specific sequences, but also include allelic and species variations thereof. Allelic and species variations can be routinely determined by comparing the sequence provided in SEQ ID NO: 1-852, a representative fragment thereof, or a nucleotide sequence at least 90% identical, preferably 95% identical, to SEQ ID NO: 1-852 with a sequence from another isolate of the same species. Furthermore, to accommodate codon variability, the invention includes nucleic acid molecules coding for the same amino acid sequences as do the specific ORFs disclosed herein. In other words, in the coding region of an ORF, substitution of one codon for another codon that encodes the same amino acid is expressly contemplated.

[0070] The nearest neighbor result for the nucleic acids or polypeptides of the present invention, including SEQ ID NO: 1-852, and SEQ ID NO: 853-1704 can be obtained by searching a database using an algorithm or a program. Preferably, a BLAST which stands for Basic Local Alignment Search Tool is used to search for local sequence alignments (Altshul, S. F. J. Mol. Evol. 36 290-300 (1993) and Altschul S. F. et al. J. Mol. Biol. 21:403-410 (1990)).

[0071] Species homologs (or orthologs) of the disclosed polynucleotides and proteins are also provided by the present invention. Species homologs may be isolated and identified by making suitable probes or primers from the sequences provided herein and screening a suitable nucleic acid source from the desired species.

[0072] The invention also encompasses allelic variants of the disclosed polynucleotides or proteins; that is, naturally occurring alternative forms of the isolated polynucleotide that also encode proteins which are identical, homologous or related to that encoded by the polynucleotides.

[0073] The nucleic acid sequences of the invention are further directed to sequences which encode variants of the described nucleic acids. These amino acid sequence variants may be prepared by methods known in the art by introducing appropriate nucleotide changes into a native or variant polynucleotide. There are two variables in the construction of amino acid sequence variants: the location of the mutation and the nature of the mutation. Nucleic acids encoding the amino acid sequence variants are preferably constructed by mutating the polynucleotide to encode an amino acid sequence that does not occur in nature. These nucleic acid alterations can be made at sites that differ in the nucleic acids from different species (variable positions) or in highly conserved regions (constant regions). Sites at such locations will typically be modified in series, e.g., by substituting first with conservative choices (e.g., hydrophobic amino acid to a different hydrophobic amino acid) and then with more distant choices (e.g., hydrophobic amino acid to a charged amino acid), and then deletions or insertions may be made at the target site. Amino acid sequence deletions generally range from about 1 to 30 residues, preferably about 1 to 10 residues, and are typically contiguous. Amino acid insertions include amino- and/or carboxyl-terminal fusions ranging in length from one to one hundred or more residues, as well as intrasequence insertions of single or multiple amino acid residues. Intrasequence insertions may range generally from about 1 to 10 amino residues, preferably from 1 to 5 residues. Examples of terminal insertions include the heterologous signal sequences necessary for secretion or for intracellular targeting in different host cells and sequences such as FLAG or poly-histidine sequences useful for purifying the expressed protein.

[0074] In a preferred method, polynucleotides encoding the novel amino acid sequences are changed via site-directed mutagenesis. This method uses oligonucleotide sequences to alter a polynucleotide to encode the desired amino acid variant, as well as sufficient adjacent nucleotides on both sides of the changed amino acid to form a stable duplex on either side of the site being changed. In general, the techniques of site-directed mutagenesis are well known to those of skill in the art and this technique is exemplified by publications such as, Edelman et al., DNA 2:183 (1983). A versatile and efficient method for producing site-specific changes in a polynucleotide sequence was published by Zoller and Smith, Nucleic Acids Res. 10:6487-6500 (1982). PCR may also be used to create amino acid sequence variants of the novel nucleic acids. When small amounts of template DNA are used as starting material, primer(s) that differs slightly in sequence from the corresponding region in the template DNA can generate the desired amino acid variant. PCR amplification results in a population of product DNA fragments that differ from the polynucleotide template encoding the polypeptide at the position specified by the primer. The product DNA fragments replace the corresponding region in the plasmid and this gives a polynucleotide encoding the desired amino acid variant.

[0075] A further technique for generating amino acid variants is the cassette mutagenesis technique described in Wells et al., Gene 34:315 (1985); and other mutagenesis techniques well known in the art, such as, for example, the techniques in Sambrook, et al., Molecular Cloning: A Laboratory Manual, Cold Spring Harbor Laboratory, NY (1989), and Current Protocols in Molecular Biology, Ausubel et al. Due to the inherent degeneracy of the genetic code, other DNA sequences which encode substantially the same or a functionally equivalent amino acid sequence may be used in the practice of the invention for the cloning and expression of these novel nucleic acids. Such DNA sequences include those that are capable of hybridizing to the appropriate novel nucleic acid sequence under stringent conditions.

[0076] Polynucleotides encoding preferred polypeptide truncations of the invention can be used to generate polynucleotides encoding chimeric or fusion proteins comprising one or more domains of the invention and heterologous protein sequences.

[0077] The polynucleotides of the invention additionally include the complement of any of the polynucleotides recited above. The polynucleotide can be DNA (genomic, cDNA, amplified, or synthetic) or RNA. Methods and algorithms for obtaining such polynucleotides are well known to those of skill in the art and can include, for example, methods for determining hybridization conditions that can routinely isolate polynucleotides of the desired sequence identities.

[0078] In accordance with the invention, polynucleotide sequences comprising the mature protein coding sequences, coding for any one of SEQ ID NO: 853-1704, or functional equivalents thereof, may be used to generate recombinant DNA molecules that direct the expression of that nucleic acid, or a functional equivalent thereof, in appropriate host cells. Also included are the cDNA inserts of any of the clones identified herein.

[0079] A polynucleotide according to the invention can be joined to any of a variety of other nucleotide sequences by well-established recombinant DNA techniques (see Sambrook J et al. (1989) Molecular Cloning: A Laboratory Manual, Cold Spring Harbor Laboratory, NY). Useful nucleotide sequences for joining to polynucleotides include an assortment of vectors, e.g., plasmids, cosmids, lambda phage derivatives, phagemids, and the like, that are well known in the art. Accordingly, the invention also provides a vector including a polynucleotide of the invention and a host cell containing the polynucleotide. In general, the vector contains an origin of replication functional in at least one organism, convenient restriction endonuclease sites, and a selectable marker for the host cell. Vectors according to the invention include expression vectors, replication vectors, probe generation vectors, and sequencing vectors. A host cell according to the invention can be a prokaryotic or eukaryotic cell and can be a unicellular organism or part of a multicellular organism.

[0080] The present invention further provides recombinant constructs comprising a nucleic acid having any of the nucleotide sequences of SEQ ID NO: 1-852 or a fragment thereof or any other polynucleotides of the invention. In one embodiment, the recombinant constructs of the present invention comprise a vector, such as a plasmid or viral vector, into which a nucleic acid having any of the nucleotide sequences of SEQ ID NO: 1-852 or a fragment thereof is inserted, in a forward or reverse orientation. In the case of a vector comprising one of the ORFs of the present invention, the vector may further comprise regulatory sequences, including for example, a promoter, operably linked to the ORF. Large numbers of suitable vectors and promoters are known to those of skill in the art and are commercially available for generating the recombinant constructs of the present invention. The following vectors are provided by way of example. Bacterial: pBs, phagescript, PsiX174, pBluescript SK, pBs KS, pNH8a, pNH16a, pNH18a, pNH46a (Stratagene); pTrc99A, pKK223-3, pKK233-3, pDR540, pRIT5 (Pharmacia). Eukaryotic: pWLneo, pSV2cat, pOG44, PXTI, pSG (Stratagene) pSVK3, pBPV, pMSG, and pSVL (Pharmacia/Pfizer).

[0081] The isolated polynucleotide of the invention may be operably linked to an expression control sequence such as the pMT2 or pED expression vectors disclosed in Kaufinan et al., Nucleic Acids Res. 19, 4485-4490 (1991), in order to produce the protein recombinantly. Many suitable expression control sequences are known in the art. General methods of expressing recombinant proteins are also known and are exemplified in R. Kaufman, Methods in Enzymology 185, 537-566 (1990). As defined herein “operably linked” means that the isolated polynucleotide of the invention and an expression control sequence are situated within a vector or cell in such a way that the protein is expressed by a host cell which has been transformed (transfected) with the ligated polynucleotide/expression control sequence.

[0082] Promoter regions can be selected from any desired gene using CAT (chloramphenicol transferase) vectors or other vectors with selectable markers. Two appropriate vectors are pKK232-8 and pCM7. Particular named bacterial promoters include lacd, lacZ, T3, T7, gpt, lambda PR, and trc. Eukaryotic promoters include CMV immediate early, HSV thymidine kinase, early and late SV40, LTRs from retrovirus, and mouse metallothionein-I. Selection of the appropriate vector and promoter is well within the level of ordinary skill in the art. Generally, recombinant expression vectors will include origins of replication and selectable markers permitting transformation of the host cell, e.g., the ampicillin resistance gene of E. coli and S. cerevisiae TRP1 gene, and a promoter derived from a highly expressed gene to direct transcription of a downstream structural sequence. Such promoters can be derived from operons encoding glycolytic enzymes such as 3-phosphoglycerate kinase (PGK), a-factor, acid phosphatase, or heat shock proteins, among others. The heterologous structural sequence is assembled in appropriate phase with translation initiation and termination sequences, and preferably, a leader sequence capable of directing secretion of translated protein into the periplasmic space or extracellular medium. Optionally, the heterologous sequence can encode a fusion protein including an amino terminal identification peptide imparting desired characteristics, e.g., stabilization or simplified purification of expressed recombinant product. Useful expression vectors for bacterial use are constructed by inserting a structural DNA sequence encoding a desired protein together with suitable translation initiation and termination signals in operable reading phase with a functional promoter. The vector will comprise one or more phenotypic selectable markers and an origin of replication to ensure maintenance of the vector and to, if desirable, provide amplification within the host. Suitable prokaryotic hosts for transformation include E. coli, Bacillus subtilis, Salmonella typhimurium and various species within the genera Pseudomonas, Streptomyces, and Staphylococcus, although others may also be employed as a matter of choice.

[0083] As a representative but non-limiting example, useful expression vectors for bacterial use can comprise a selectable marker and bacterial origin of replication derived from commercially available plasmids comprising genetic elements of the well known cloning vector pBR322 (ATCC 37017). Such commercial vectors include, for example, pKK223-3 (Pharmacia Fine Chemicals, Uppsala, Sweden) and GEM 1 (Promega Biotech, Madison, Wis., USA). These pBR322 “backbone” sections are combined with an appropriate promoter and the structural sequence to be expressed. Following transformation of a suitable host strain and growth of the host strain to an appropriate cell density, the selected promoter is induced or derepressed by appropriate means (e.g., temperature shift or chemical induction) and cells are cultured for an additional period. Cells are typically harvested by centrifugation, disrupted by physical or chemical means, and the resulting crude extract retained for further purification.

[0084] Polynucleotides of the invention can also be used to induce immune responses. For example, as described in Fan et al., Nat. Biotech. 17:870-872 (1999), hereby incorporated herein by reference, nucleic acid sequences encoding a polypeptide may be used to generate antibodies against the encoded polypeptide following topical administration of naked plasmid DNA or following injection, and preferably intramuscular injection of the DNA. The nucleic acid sequences are preferably inserted in a recombinant expression vector and may be in the form of naked DNA.

[0085] Another aspect of the invention pertains to isolated antisense nucleic acid molecules that can hybridize to, or are complementary to, the nucleic acid molecules comprising SEQ ID NO: 1-852, or fragments, analogs or derivatives thereof. An “antisense” nucleic acid comprises a nucleotide sequence that is complementary to a “sense” nucleic acid encoding a protein (e.g., complementary to the coding strand of a double-stranded cDNA molecule or complementary to an mRNA sequence). In specific aspects, antisense nucleic acid molecules are provided that comprise a sequence complementary to at least about 10, 25, 50, 100, 250 or 500 nucleotides or an entire coding strand of SEQ ID NO: 1-852, or to only a portion thereof. Nucleic acid molecules encoding fragments, homologs, derivatives and analogs of SEQ ID NO: 1-852 or antisense nucleic acids complementary to SEQ ID NO: 1-852 nucleic acid sequences of are additionally provided.

[0086] In one embodiment, an antisense nucleic acid molecule is antisense to a “coding region” of the coding strand of a nucleotide sequence encoding like protein of any of SEQ ID NO: 1-852. The term “coding region” refers to the region of the nucleotide sequence comprising codons that are translated into amino acid residues. In another embodiment, the antisense nucleic acid molecule is antisense to a “conceding region” of the coding strand of a nucleotide sequence encoding the proteins of SEQ ID NO: 853-1704. The term “conceding region” refers to 5′ and 3′ sequences which flank the coding region that are not translated into amino acids (i.e., also referred to as 5′ and 3′ untranslated regions).

[0087] Given the coding strand sequences encoding the polypeptides of SEQ ID NO: 853-1704 disclosed herein, antisense nucleic acids of the invention can be designed according to the rules of Watson and Crick or Hoogsteen base pairing. The antisense nucleic acid molecule can be complementary to the entire coding region of SEQ ID NO: 1-852-like mRNA, but more preferably is an oligonucleotide that is antisense to only a portion of the coding or noncoding region of said mRNA. For example, the antisense oligonucleotide can be complementary to the region surrounding the translation start site of SEQ ID NO: 1-852-like mRNA. An antisense oligonucleotide can be, for example, about 5, 10, 15, 20, 25, 30, 35, 40, 45, or 50 nucleotides in length. An antisense nucleic acid of the invention can be constructed using chemical synthesis or enzymatic ligation reactions using procedures known in the art. For example, an antisense nucleic acid (e.g., an antisense oligonucleotide) can be chemically synthesized using naturally occurring nucleotides or variously modified nucleotides designed to increase the biological stability of the molecules or to increase the physical stability of the duplex formed between the antisense and sense nucleic acids (e.g., phosphorothioate derivatives and acridine substituted nucleotides can be used).

[0088] Examples of modified nucleotides that can be used to generate the antisense nucleic acid include: 5-fluorouracil, 5-bromouracil, 5-chlorouracil, 5-iodouracil, hypoxanthine, xanthine, 4-acetylcytosine, 5-(carboxyhydroxylmethyl) uracil, 5-carboxymethylaminomethyl-2-thiouridine, 5-carboxymethylaminomethyluracil, dihydrouracil, beta-D-galactosylqueosine, inosine, N6-isopentenyladenine, 1-methylguanine, 1-methylinosine, 2,2-dimethylguanine, 2-methyladenine, 2-methylguanine, 3-methylcytosine, 5-methylcytosine, N6-adenine, 7-methylguanine, 5-methylaminomethyluracil, 5-methoxyaminomethyl-2-thiouracil, beta-D-mannosylqueosine, 5′-methoxycarboxymethyluracil, 5-methoxyuracil, 2-methylthio-N-6-isopentenyladenine, uracil-5-oxyacetic acid (v), wybutoxosine, pseudouracil, queosine, 2-thiocytosine, 5-methyl-2-thiouracil, 2-thiouracil, 4-thiouracil, 5-methyluracil, uracil-5-oxyacetic acid methylester, uracil-5-oxyacetic acid (v), 5-methyl-2-thiouracil, 3-(3-amino-3-N-2-carboxypropyl) uracil, (acp3)w, and 2,6-diaminopurine. Alternatively, the antisense nucleic acid can be produced biologically using an expression vector into which a nucleic acid has been subcloned in an antisense orientation (i.e., RNA transcribed from the inserted nucleic acid will be of an antisense orientation to a target nucleic acid of interest, described further in the following section).

[0089] The antisense nucleic acid molecules of the invention are typically administered to a subject or generated in situ such that they hybridize with or bind to cellular mRNA and/or genomic DNA encoding a polynucleotide or polypeptide of the invention to thereby inhibit expression of the protein (e.g., by inhibiting transcription and/or translation). The hybridization can be by conventional nucleotide complementarity to form a stable duplex, or, for example, in the case of an antisense nucleic acid molecule that binds to DNA duplexes, through specific interactions in the major groove of the double helix. An example of a route of administration of antisense nucleic acid molecules of the invention includes direct injection at a tissue site. Alternatively, antisense nucleic acid molecules can be modified to target selected cells and then administered systemically. For example, for systemic administration, antisense molecules can be modified such that they specifically bind to receptors or antigens expressed on a selected cell surface (e.g., by linking the antisense nucleic acid molecules to peptides or antibodies that bind to cell surface receptors or antigens). The antisense nucleic acid molecules can also be delivered to cells using the vectors described herein. To achieve sufficient nucleic acid molecules, vector constructs in which the antisense nucleic acid molecule is placed under the control of a strong pol II or pol III promoter are preferred.

[0090] In yet another embodiment, the antisense nucleic acid molecule of the invention is an alpha-anomeric nucleic acid molecule. An alpha-anomeric nucleic acid molecule forms specific double-stranded hybrids with complementary RNA in which, contrary to the usual alpha-units, the strands run parallel to each other. See, e.g., Gaultier, et al., 1987. Nucl. Acids Res. 15: 6625-6641. The antisense nucleic acid molecule can also comprise a 2′-o-methylribonucleotide (see, e.g., Inoue, et al. 1987. Nucl. Acids Res. 15: 6131-6148) or a chimeric RNA-DNA analogue (see, e.g., Inoue, et al., 1987. FEBS Lett. 215: 327-330.

[0091] Nucleic acid modifications include, by way of non-limiting example, modified bases, and nucleic acids whose sugar phosphate backbones are modified or derivatized. These modifications are carried out at least in part to enhance the chemical stability of the modified nucleic acid, such that they can be used, for example, as antisense binding nucleic acids in therapeutic applications in a subject.

[0092] In one embodiment, an antisense nucleic acid of the invention is a ribozyme. Ribozymes are catalytic RNA molecules with ribonuclease activity that are capable of cleaving a single-stranded nucleic acid, such as an mRNA, to which they have a complementary region. Thus, ribozymes (e.g., hammerhead ribozymes as described in Haselhoff and Gerlach 1988. Nature 334: 585-591) can be used to catalytically cleave mRNA transcripts corresponding to SEQ ID NO: 1-852 to thereby inhibit translation of said mRNA. A ribozyme having specificity for SEQ ID NO: 1-852-like-encoding nucleic acid can be designed based upon the nucleotide sequence of a corresponding cDNA disclosed herein. For example, a derivative of a Tetrahymena L-19 IVS RNA can be constructed in which the nucleotide sequence of the active site is complementary to the nucleotide sequence to be cleaved in SEQ ID NO: 1-852-like encoding mRNA. See, e.g., U.S. Pat. No. 4,987,071 to Cech, et al. and U.S. Pat. No. 5,116,742 to Cech, et al. mRNA corresponding to SEQ ID NO: 1-852 can also be used to select a catalytic RNA having a specific ribonuclease activity from a pool of RNA molecules. See, e.g., Bartel et al., (1993) Science 261:1411-1418.

[0093] Alternatively, SEQ ID NO: 1-852 gene expression can be inhibited by targeting nucleotide sequences complementary to the regulatory region of the said nucleic acids (e.g., the promoter and/or enhancers of each gene corresponding to the polynucleotide of the invention) to form triple helical structures that prevent transcription of the genes in target cells. See, e.g., Helene, 1991. Anticancer Drug Des. 6: 569-84; Helene, et al. 1992. Ann. N.Y. Acad. Sci. 660: 27-36; Maher, 1992. Bioassays 14: 807-15.

[0094] In various embodiments, the nucleic acids of the invention can be modified at the base moiety, sugar moiety or phosphate backbone to improve, e.g., the stability, hybridization, or solubility of the molecule. For example, the deoxyribose phosphate backbone of the nucleic acids can be modified to generate peptide nucleic acids. See, e.g., Hyrup, et al., 1996. Bioorg Med Chem 4: 5-23. As used herein, the terms “peptide nucleic acids” or “PNAs” refer to nucleic acid mimics (e.g., DNA mimics) in which the deoxyribose phosphate backbone is replaced by a pseudopeptide backbone and only the four natural nucleobases are retained. The neutral backbone of PNAs has been shown to allow for specific hybridization to DNA and RNA under conditions of low ionic strength. The synthesis of PNA oligomers can be performed using standard solid phase peptide synthesis protocols as described in Hyrup, et al., 1996. supra; Perry-O'Keefe, et al., 1996. Proc. Natl. Acad. Sci. USA 93: 14670-14675.

[0095] PNAs of the nucleic acids of the invention can be used in therapeutic and diagnostic applications. For example, PNAs can be used as antisense or antigene agents for sequence-specific modulation of gene expression by, e.g., inducing transcription or translation arrest or inhibiting replication. PNAs of the nucleic acids of the invention can also be used, for example, in the analysis of single base pair mutations in a gene (e.g., PNA directed PCR clamping; as artificial restriction enzymes when used in combination with other enzymes, e.g., S1 nucleases (see, Hyrup, et al., 1996.supra); or as probes or primers for DNA sequence and hybridization (see, Hyrup, et al., 1996, supra; Perry-O'Keefe, et al., 1996. supra).

[0096] In another embodiment, PNAs of nucleic acids of the invention can be modified, e.g., to enhance their stability or cellular uptake, by attaching lipophilic or other helper groups to PNA, by the formation of PNA-DNA chimeras, or by the use of liposomes or other techniques of drug delivery known in the art. For example, PNA-DNA chimeras of the nucleic acids of the invention can be generated that may combine the advantageous properties of PNA and DNA. Such chimeras allow DNA recognition enzymes (e.g., RNase H and DNA polymerases) to interact with the DNA portion while the PNA portion would provide high binding affinity and specificity. PNA-DNA chimeras can be linked using linkers of appropriate lengths selected in terms of base stacking, number of bonds between the nucleobases, and orientation (see, Hyrup, et al., 1996. supra). The synthesis of PNA-DNA chimeras can be performed as described in Hyrup, et al., 1996. Supra, et al., 1996. Nucl Acids Res 24: 3357-3363. For example, a DNA chain can be synthesized on a solid support using standard phosphoramidite coupling chemistry, and modified nucleoside analogs, e.g., 5′-(4-methoxytrityl)amino-5′-deoxy-thymidine phosphoramidite, can be used between the PNA and the 5′ end of DNA. See, e.g., Mag, et al., 1989. Nucl Acid Res 17: 5973-5988. PNA monomers are then coupled in a stepwise manner to produce a chimeric molecule with a 5′ PNA segment and a 3′ DNA segment. See, e.g., Finn, et al., 1996. supra. Alternatively, chimeric molecules can be synthesized with a 5′ DNA segment and a 3′ PNA segment. See, e.g., Petersen, et al., 1975. Bioorg. Med. Chem. Lett. 5: 1119-11124.

[0097] In other embodiments, the oligonucleotide may include other appended groups such as peptides (e.g., for targeting host cell receptors in vivo), or agents facilitating transport across the cell membrane (see, e.g., Letsinger, et al., 1989. Proc. Natl. Acad. Sci. U.S.A. 86: 6553-6556; Lemaitre, et al., 1987. Proc. Natl. Acad. Sci. 84: 648-652; PCT Publication No. WO88/09810) or the blood-brain barrier (see, e.g., PCT Publication No. WO 89/10134). In addition, oligonucleotides can be modified with hybridization-triggered cleavage agents (see, e.g., Krol, et al., 1988. BioTechniques 6:958-976) or intercalating agents (see, e.g., Zon, 1988. Pharm. Res. 5: 539-549). To this end, the oligonucleotide can be conjugated to another molecule, e.g., a peptide, a hybridization triggered cross-linking agent, a transport agent, a hybridization-triggered cleavage agent, and the like.

5.3 Use of Nucleic Acids as Probes

[0098] Another aspect of the subject invention is to provide for polypeptide-specific nucleic acid hybridization probes capable of hybridizing with naturally occurring nucleotide sequences. The hybridization probes of the subject invention may be derived from any of the nucleotide sequences SEQ ID NO: 1-852. Because the corresponding gene is only expressed in a limited number of tissues, a hybridization probe derived from of any of the nucleotide sequences SEQ ID NO: 1-852 can be used as an indicator of the presence of RNA of cell type of such a tissue in a sample.

[0099] Any suitable hybridization technique can be employed, such as, for example, in situ hybridization. PCR as described in U.S. Pat. Nos. 4,683,195 and 4,965,188 provides additional uses for oligonucleotides based upon the nucleotide sequences. Such probes used in PCR may be of recombinant origin, may be chemically synthesized, or a mixture of both. The probe will comprise a discrete nucleotide sequence for the detection of identical sequences or a degenerate pool of possible sequences for identification of closely related genomic sequences.

[0100] Other means for producing specific hybridization probes for nucleic acids include the cloning of nucleic acid sequences into vectors for the production of mRNA probes. Such vectors are known in the art and are commercially available and may be used to synthesize RNA probes in vitro by means of the addition of the appropriate RNA polymerase as T7 or SP6 RNA polymerase and the appropriate radioactively labeled nucleotides. The nucleotide sequences may be used to construct hybridization probes for mapping their respective genomic sequences. The nucleotide sequence provided herein may be mapped to a chromosome or specific regions of a chromosome using well known genetic and/or chromosomal mapping techniques. These techniques include in situ hybridization, linkage analysis against known chromosomal markers, hybridization screening with libraries or flow-sorted chromosomal preparations specific to known chromosomes, and the like. The technique of fluorescent in situ hybridization of chromosome spreads has been described, among other places, in Verma et al (1988) Human Chromosomes: A Manual of Basic Techniques, Pergamon Press, New York N.Y.

[0101] Fluorescent in situ hybridization of chromosomal preparations and other physical chromosome mapping techniques may be correlated with additional genetic map data. Examples of genetic map data can be found in the 1994 Genome Issue of Science (265:1981f). Correlation between the location of a nucleic acid on a physical chromosomal map and a specific disease (or predisposition to a specific disease) may help delimit the region of DNA associated with that genetic disease. The nucleotide sequences of the subject invention may be used to detect differences in gene sequences between normal, carrier or affected individuals.

5.4 Preparation of Support Bound Oligonucleotides

[0102] Oligonucleotides, i.e., small nucleic acid segments, may be readily prepared by, for example, directly synthesizing the oligonucleotide by chemical means, as is commonly practiced using an automated oligonucleotide synthesizer.

[0103] Support bound oligonucleotides may be prepared by any of the methods known to those of skill in the art using any suitable support such as glass, polystyrene or Teflon. One strategy is to precisely spot oligonucleotides synthesized by standard synthesizers. Immobilization can be achieved using passive adsorption (Inouye & Hondo, 1990 J. Clin Microbiol 28(6) 1462-72); using UV light (Nagata et al., 1985; Dahlen et al., 1987; Morrissey & Collins, Mol. Cell Probes 1989 3(2) 189-207) or by covalent binding of base modified DNA (Keller et al., 1988; 1989); all references being specifically incorporated herein.

[0104] Another strategy that may be employed is the use of the strong biotin-streptavidin interaction as a linker. For example, Broude et al. (1994) Proc. Natl. Acad. Sci USA 91(8) 3072-6 describe the use of biotinylated probes, although these are duplex probes, that are immobilized on streptavidin-coated magnetic beads. Streptavidin-coated beads may be purchased from Dynal, Oslo. Of course, this same linking chemistry is applicable to coating any surface with streptavidin. Biotinylated probes may be purchased from various sources, such as, e.g., Operon Technologies (Alameda, Calif.).

[0105] Alternatively, DNA may be covalently bound to the microwell surface using Covalink NH technology (Nunc Laboratories, Naperville, Ill.). CovaLink NH is a polystyrene surface grafted with secondary amino groups (>NH) that serve as bridge-heads for further covalent coupling. CovaLink Modules may be purchased from Nunc Laboratories. DNA molecules may be bound to CovaLink exclusively at the 5′-end by a phosphoramidate bond, allowing immobilization of more than 1 pmol of DNA (Rasmussen et al., (1991) Anal Biochem 198(1) 138-42.

[0106] The use of CovaLink NH strips for covalent binding of DNA molecules at the 5′-end has been described (Rasmussen et al., 1991, Ann Biol Clin (Paris). 1990;48(9):647-50). In this technology, a phosphoramidate bond is employed (Chu et al., 1983 Nucleic Acids 11(18) 6513-29). This is beneficial as immobilization using only a single covalent bond is preferred. The phosphoramidate bond joins the DNA to the CovaLink NH secondary amino groups that are positioned at the end of spacer arms covalently grafted onto the polystyrene surface through a 2 nm long spacer arm. To link an oligonucleotide to Covaink NH via an phosphoramidate bond, the oligonucleotide terminus must have a 5′-end phosphate group. It is, perhaps, even possible for biotin to be covalently bound to CovaLink and then streptavidin used to bind the probes.

[0107] More specifically, the linkage method includes dissolving DNA in water (7.5 ng/ul) and denaturing for 10 min. at 95° C. and cooling on ice for 10 min. Ice-cold 0.1 M 1-methylimidazole, pH 7.0 (1-MeIm₇), is then added to a final concentration of 10 mM 1-MeIm₇. A single stranded DNA solution is then dispensed into CovaLink NH strips (75 ul/well) standing on ice.

[0108] Carbodiimide 0.2 M 1-ethyl-3-(3-dimethylaminopropyl)-carbodiimide (EDC), dissolved in 10 mM 1-MeIm₇, is made fresh and 25 ul added per well. The strips are incubated for 5 hours at 50° C. After incubation the strips are washed using, e.g., Nunc-Immuno Wash; first the wells are washed 3 times, then they are soaked with washing solution for 5 min., and finally they are washed 3 times (where in the washing solution is 0.4 N NaOH, 0.25% SDS heated to 50° C.).

[0109] It is contemplated that a further suitable method for use with the present invention is that described in PCT Patent Application WO 90/03382 (Southern & Maskos), hereby incorporated herein by reference. This method of preparing an oligonucleotide bound to a support involves attaching a nucleoside 3′-reagent through the phosphate group by a covalent phosphodiester link to aliphatic hydroxyl groups carried by the support. The oligonucleotide is then synthesized on the supported nucleoside and protecting groups removed from the synthetic oligonucleotide chain under standard conditions that do not cleave the oligonucleotide from the support. Suitable reagents include nucleoside phosphoramidite and nucleoside hydrogen phosphorate.

[0110] An on-chip strategy for the preparation of DNA probe for the preparation of DNA probe arrays may be employed. For example, addressable laser-activated photodeprotection may be employed in the chemical synthesis of oligonucleotides directly on a glass surface, as described by Fodor et al. (1991) Science 251(4995) 767-73, hereby incorporated herein by reference. Probes may also be immobilized on nylon supports as described by Van Ness et al. (1991) Nucleic Acids Res. 19(12) 3345-50; or linked to Teflon using the method of Duncan & Cavalier (1988) Anal Biochem 169(1) 104-8; all references being specifically incorporated herein.

[0111] To link an oligonucleotide to a nylon support, as described by Van Ness et al. (1991), requires activation of the nylon surface via alkylation and selective activation of the 5′-amine of oligonucleotides with cyanuric chloride.

[0112] One particular way to prepare support bound oligonucleotides is to utilize the light-generated synthesis described by Pease et al., (1994) Proc. Natl. Acad. Sci USA 91(11) 5022-6. These authors used current photolithographic techniques to generate arrays of immobilized oligonucleotide probes (DNA chips). These methods, in which light is used to direct the synthesis of oligonucleotide probes in high-density, miniaturized arrays, utilize photolabile 5′-protected N-acyl-deoxynucleoside phosphoramidites, surface linker chemistry and versatile combinatorial synthesis strategies. A matrix of 256 spatially defined oligonucleotide probes may be generated in this manner.

5.5 Preparation of Nucleic Acid Fragments

[0113] The nucleic acids may be obtained from any appropriate source, such as cDNAs, genomic DNA, chromosomal DNA, microdissected chromosome bands, cosmid or YAC inserts, and RNA, including mRNA without any amplification steps. For example, Sambrook et al. (1989) describes three protocols for the isolation of high molecular weight DNA from mammalian cells (p. 9.14-9.23).

[0114] DNA fragments may be prepared as clones in M13, plasmid or lambda vectors and/or prepared directly from genomic DNA or cDNA by PCR or other amplification methods. Samples may be prepared or dispensed in multiwell plates. About 100-1000 ng of DNA samples may be prepared in 2-500 ml of final volume.

[0115] The nucleic acids are then be fragmented by any of the methods known to those of skill in the art including, for example, using restriction enzymes as described at 9.24-9.28 of Sambrook et al. (1989), shearing by ultrasound and NaOH treatment.

[0116] Low pressure shearing is also appropriate, as described by Schriefer et al. (1990) Nucleic Acids Res. 18(24) 7455-6. In this method, DNA samples are passed through a small French pressure cell at a variety of low to intermediate pressures. A lever device allows controlled application of low to intermediate pressures to the cell. The results of these studies indicate that low-pressure shearing is a useful alternative to sonic and enzymatic DNA fragmentation methods.

[0117] One particularly suitable way for fragmenting DNA is contemplated to be that using the two base recognition endonuclease, CviJI, described by Fitzgerald et al. (1992) Nucleic Acids Res. 20(14) 3753-62. These authors described an approach for the rapid fragmentation and fractionation of DNA into particular sizes that they contemplated to be suitable for shotgun cloning and sequencing.

[0118] The restriction endonuclease CviJI normally cleaves the recognition sequence PuGCPy between the G and C to leave blunt ends. Atypical reaction conditions, which alter the specificity of this enzyme (CviJI**), yield a quasi-random distribution of DNA fragments form the small molecule pUC19 (2688 base pairs). Fitzgerald et al. (1992) quantitatively evaluated the randomness of this fragmentation strategy, using a CviJI** digest of pUC19 that was size fractionated by a rapid gel filtration method and directly ligated, without end repair, to a lac Z minus M13 cloning vector. Sequence analysis of 76 clones showed that CviJI** restricts pyGCPy and PuGCPu, in addition to PuGCPy sites, and that new sequence data is accumulated at a rate consistent with random fragmentation.

[0119] As reported in the literature, advantages of this approach compared to sonication and agarose gel fractionation include: smaller amounts of DNA are required (0.2-0.5 ug instead of 2-5 ug); and fewer steps are involved (no preligation, end repair, chemical extraction, or agarose gel electrophoresis and elution are needed).

[0120] Irrespective of the manner in which the nucleic acid fragments are obtained or prepared, it is important to denature the DNA to give single stranded pieces available for hybridization. This is achieved by incubating the DNA solution for 2-5 minutes at 80-90° C. The solution is then cooled quickly to 2° C. to prevent renaturation of the DNA fragments before they are contacted with the chip. Phosphate groups must also be removed from genomic DNA by methods known in the art.

5.6 Preparation of DNA Arrays

[0121] Arrays may be prepared by spotting DNA samples on a support such as a nylon membrane. Spotting may be performed by using arrays of metal pins (the positions of which correspond to an array of wells in a microtiter plate) to repeated by transfer of about 20 nl of a DNA solution to a nylon membrane. By offset printing, a density of dots higher than the density of the wells is achieved. One to 25 dots may be accommodated in 1 mm², depending on the type of label used. By avoiding spotting in some preselected number of rows and columns, separate subsets (subarrays) may be formed. Samples in one subarray may be the same genomic segment of DNA (or the same gene) from different individuals, or may be different, overlapped genomic clones. Each of the subarrays may represent replica spotting of the same samples. In one example, a selected gene segment may be amplified from 64 patients. For each patient, the amplified gene segment may be in one 96-well plate (all 96 wells containing the same sample). A plate for each of the 64 patients is prepared. By using a 96-pin device, all samples may be spotted on one 8×12 cm membrane. Subarrays may contain 64 samples, one from each patient. Where the 96 subarrays are identical, the dot span may be 1 mm² and there may be a 1 mm space between subarrays.

[0122] Another approach is to use membranes or plates (available from NUNC, Naperville, Ill.) which may be partitioned by physical spacers e.g. a plastic grid molded over the membrane, the grid being similar to the sort of membrane applied to the bottom of multiwell plates, or hydrophobic strips. A fixed physical spacer is not preferred for imaging by exposure to flat phosphor-storage screens or x-ray films.

5.7 Polypeptides of the Invention

[0123] The isolated polypeptides of the invention include, but are not limited to, a polypeptide comprising: the amino acid sequence set forth as any one of SEQ ID NO: 853-1704 or an amino acid sequence encoded by any one of the nucleotide sequences SEQ ID NO: 1-852 or the corresponding full length or mature protein. Polypeptides of the invention also include polypeptides preferably with biological or immunological activity that are encoded by: (a) a polynucleotide having any one of the nucleotide sequences set forth in SEQ ID NO: 1-852 or (b) polynucleotides encoding any one of the amino acid sequences set forth as SEQ ID NO: 853-1704 or (c) polynucleotides that hybridize to the complement of the polynucleotides of either (a) or (b) under stringent hybridization conditions. The invention also provides biologically active or immunologically active variants of any of the amino acid sequences set forth as SEQ ID NO: 853-1704 or the corresponding full length or mature protein; and “substantial equivalents” thereof (e.g., with at least about 65%, at least about 70%, at least about 75%, at least about 80%, 81%, 82%, 83%, 84%, 85%, 86%, 87%, 88%, or 89%, more typically at least about 90%, 91%, 92%, 93%, or 94% and even more typically at least about 95%, 96%, 97%, 98% or 99%, most typically at least about 99% amino acid identity) that retain biological activity. Polypeptides encoded by allelic variants may have a similar, increased, or decreased activity compared to polypeptides comprising SEQ ID NO: 853-1704.

[0124] Fragments of the proteins of the present invention which are capable of exhibiting biological activity are also encompassed by the present invention. Fragments of the protein may be in linear form or they may be cyclized using known methods, for example, as described in H. U. Saragovi, et al., Bio/Technology 10, 773-778 (1992) and in R. S. McDowell, et al., J. Amer. Chem. Soc. 114, 9245-9253 (1992), both of which are hereby incorporated herein by reference. Such fragments may be fused to carrier molecules such as immunoglobulins for many purposes, including increasing the valency of protein binding sites.

[0125] The present invention also provides both full-length and mature forms (for example, without a signal sequence or precursor sequence) of the disclosed proteins. The protein coding sequence is identified in the sequence listing by translation of the disclosed nucleotide sequences. The mature form of such protein may be obtained by expression of a full-length polynucleotide in a suitable mammalian cell or other host cell. The sequence of the mature form of the protein is also determinable from the amino acid sequence of the full-length form. Where proteins of the present invention are membrane bound, soluble forms of the proteins are also provided. In such forms, part or all of the regions causing the proteins to be membrane bound are deleted so that the proteins are fully secreted from the cell in which it is expressed.

[0126] Protein compositions of the present invention may further comprise an acceptable carrier, such as a hydrophilic, e.g., pharmaceutically acceptable, carrier.

[0127] The present invention further provides isolated polypeptides encoded by the nucleic acid fragments of the present invention or by degenerate variants of the nucleic acid fragments of the present invention. By “degenerate variant” is intended nucleotide fragments which differ from a nucleic acid fragment of the present invention (e.g., an ORF) by nucleotide sequence but, due to the degeneracy of the genetic code, encode an identical polypeptide sequence. Preferred nucleic acid fragments of the present invention are the ORFs that encode proteins.

[0128] A variety of methodologies known in the art can be utilized to obtain any one of the isolated polypeptides or proteins of the present invention. At the simplest level, the amino acid sequence can be synthesized using commercially available peptide synthesizers. The synthetically-constructed protein sequences, by virtue of sharing primary, secondary or tertiary structural and/or conformational characteristics with proteins may possess biological properties in common therewith, including protein activity. This technique is particularly useful in producing small peptides and fragments of larger polypeptides. Fragments are useful, for example, in generating antibodies against the native polypeptide. Thus, they may be employed as biologically active or immunological substitutes for natural, purified proteins in screening of therapeutic compounds and in immunological processes for the development of antibodies.

[0129] The polypeptides and proteins of the present invention can alternatively be purified from cells that have been altered to express the desired polypeptide or protein. As used herein, a cell is said to be altered to express a desired polypeptide or protein when the cell, through genetic manipulation, is made to produce a polypeptide or protein which it normally does not produce or which the cell normally produces at a lower level. One skilled in the art can readily adapt procedures for introducing and expressing either recombinant or synthetic sequences into eukaryotic or prokaryotic cells in order to generate a cell that produces one of the polypeptides or proteins of the present invention.

[0130] The invention also relates to methods for producing a polypeptide comprising growing a culture of host cells of the invention in a suitable culture medium, and purifying the protein from the cells or the culture in which the cells are grown. For example, the methods of the invention include a process for producing a polypeptide in which a host cell containing a suitable expression vector that includes a polynucleotide of the invention is cultured under conditions that allow expression of the encoded polypeptide. The polypeptide can be recovered from the culture, conveniently from the culture medium, or from a lysate prepared from the host cells and further purified. Preferred embodiments include those in which the protein produced by such process is a full length or mature form of the protein.

[0131] In an alternative method, the polypeptide or protein is purified from bacterial cells that naturally produce the polypeptide or protein. One skilled in the art can readily follow known methods for isolating polypeptides and proteins in order to obtain one of the isolated polypeptides or proteins of the present invention. These include, but are not limited to, immunochromatography, High Performance Liquid Chromatography (HPLC), size-exclusion chromatography, ion-exchange chromatography, and immuno-affinity chromatography. See, e.g., Scopes, Protein Purification: Principles and Practice, Springer-Verlag (1994); Sambrook, et al., in Molecular Cloning: A Laboratory Manual; Ausubel et al., Current Protocols in Molecular Biology. Polypeptide fragments that retain biological/immunological activity include fragments comprising greater than about 100 amino acids, or greater than about 200 amino acids, and fragments that encode specific protein domains.

[0132] The purified polypeptides can be used in in vitro binding assays that are well known in the art to identify molecules that bind to the polypeptides. These molecules include but are not limited to, for e.g., small molecules, molecules from combinatorial libraries, antibodies or other proteins. The molecules identified in the binding assay are then tested for antagonist or agonist activity in in vivo tissue culture or animal models that are well known in the art. In brief, the molecules are titrated into a plurality of cell cultures or animals and then tested for either cell/animal death or prolonged survival of the animal/cells.

[0133] In addition, the peptides of the invention or molecules capable of binding to the peptides may be complexed with toxins, e.g., ricin or cholera, or with other compounds that are toxic to cells. The toxin-binding molecule complex is then targeted to a tumor or other cell by the specificity of the binding molecule for SEQ ID NO: 853-1704.

[0134] The protein of the invention may also be expressed as a product of transgenic animals, e.g., as a component of the milk of transgenic cows, goats, pigs, or sheep which are characterized by somatic or germ cells containing a nucleotide sequence encoding the protein.

[0135] The proteins provided herein also include proteins characterized by amino acid sequences similar to those of purified proteins but into which modification are naturally provided or deliberately engineered. For example, modifications, in the peptide or DNA sequence, can be made by those skilled in the art using known techniques. Modifications of interest in the protein sequences may include the alteration, substitution, replacement, insertion or deletion of a selected amino acid residue in the coding sequence. For example, one or more of the cysteine residues may be deleted or replaced with another amino acid to alter the conformation of the molecule. Techniques for such alteration, substitution, replacement, insertion or deletion are well known to those skilled in the art (see, e.g., U.S. Pat. No. 4,518,584). Preferably, such alteration, substitution, replacement, insertion or deletion retains the desired activity of the protein. Regions of the protein that are important for the protein function can be determined by various methods known in the art including the alanine-scanning method which involved systematic substitution of single or strings of amino acids with alanine, followed by testing the resulting alanine-containing variant for biological activity. This type of analysis determines the importance of the substituted amino acid(s) in biological activity. Regions of the protein that are important for protein function may be determined by the eMATRIX program or the Pfam program.

[0136] Other fragments and derivatives of the sequences of proteins which would be expected to retain protein activity in whole or in part and are useful for screening or other immunological methodologies may also be easily made by those skilled in the art given the disclosures herein. Such modifications are encompassed by the present invention.

[0137] The protein may also be produced by operably linking the isolated polynucleotide of the invention to suitable control sequences in one or more insect expression vectors, and employing an insect expression system. Materials and methods for baculovirus/insect cell expression systems are commercially available in kit form from, e.g., Invitrogen, San Diego, Calif., U.S.A. (the MaxBat™ kit), and such methods are well known in the art, as described in Summers and Smith, Texas Agricultural Experiment Station Bulletin No. 1555 (1987), hereby incorporated herein by reference. As used herein, an insect cell capable of expressing a polynucleotide of the present invention is “transformed.”

[0138] The protein of the invention may be prepared by culturing transformed host cells under culture conditions suitable to express the recombinant protein. The resulting expressed protein may then be purified from such culture (i.e., from culture medium or cell extracts) using known purification processes, such as gel filtration and ion exchange chromatography. The purification of the protein may also include an affinity column containing agents which will bind to the protein; one or more column steps over such affinity resins as concanavalin A-agarose, heparin-toyopearl™ or Cibacrom blue 3GA Sepharose™; one or more steps involving hydrophobic interaction chromatography using such resins as phenyl ether, butyl ether, or propyl ether; or immunoaffinity chromatography.

[0139] Alternatively, the protein of the invention may also be expressed in a form which will facilitate purification. For example, it may be expressed as a fusion protein, such as those of maltose binding protein (MBP), glutathione-S-transferase (GST) or thioredoxin (TRX), or as a His tag. Kits for expression and purification of such fusion proteins are commercially available from New England BioLab (Beverly, Mass.), Pharmacia (Piscataway, N.J.) and Invitrogen, respectively. The protein can also be tagged with an epitope and subsequently purified by using a specific antibody directed to such epitope. One such epitope (“FLAG®”) is commercially available from Kodak (New Haven, Conn.).

[0140] Finally, one or more reverse-phase high performance liquid chromatography (RP-HPLC) steps employing hydrophobic RP-HPLC media, e.g., silica gel having pendant methyl or other aliphatic groups, can be employed to further purify the protein. Some or all of the foregoing purification steps, in various combinations, can also be employed to provide a substantially homogeneous isolated recombinant protein. The protein thus purified is substantially free of other mammalian proteins and is defined in accordance with the present invention as an “isolated protein.”

5.8 Determining Polypeptide and Polynucleotide Identity and Similarity

[0141] Preferred identity and/or similarity are designed to give the largest match between the sequences tested. Methods to determine identity and similarity are codified in computer programs including, but are not limited to, the GCG program package, including GAP (Devereux, J., et al., Nucleic Acids Research 12(1):387 (1984); Genetics Computer Group, University of Wisconsin, Madison, Wis.), BLASTP, BLASTN, BLASTX, FASTA (Altschul, S. F. et al., J. Molec. Biol. 215:403-410 (1990), PSI-BLAST (Altschul S. F. et al., Nucleic Acids Res. vol. 25, pp. 3389-3402, hereby incorporated herein by reference), the eMatrix software (Wu et al., J. Comp. Biol., vol. 6, pp. 219-235 (1999), hereby incorporated herein by reference), eMotif software (Nevill-Manning et al, ISMB-97, vol 4, pp. 202-209, hereby incorporated herein by reference), the GeneAtlas software Accelrys, Inc. San Diego, Calif.) (Sanchez and Sali (1998) Proc. Natl. Acad. Sci., 95, 13597-13602; Kitson D H et al, (2000) “Remote homology detection using structural modeling—an evaluation” Submitted; Fischer and Eisenberg (1996) Protein Sci. 5, 947-955), and the Kyte-Doolittle hydrophobocity prediction algorithm (J. Mol Biol, 157, pp. 105-31 (1982), hereby incorporated herein by reference). The BLAST programs are publicly available from the National Center for Biotechnology Information (NCBI) and other sources (BLAST Manual, Altschul, S., et al. NCB NLM NIH Bethesda, Md. 20894; Altschul, S., et al., J. Mol. Biol. 215:403-410 (1990).

5.9 Chimeric and Fusion Proteins

[0142] The invention also provides chimeric or fusion proteins of the polypeptides of the invention. As used herein “chimeric protein” of the polypeptides of the invention or “fusion protein” of the polypeptides of the invention comprises a polypeptide of the invention operatively linked to a polypeptide not of the invention. A “polypeptide not of the invention” refers to a polypeptide having an amino acid sequence corresponding to a protein that is not substantially homologous to the polypeptides of the invention, e.g., a protein that is different from the polypeptide or polypeptides of the invention in question and that is derived from the same or a different organism. Within a fusion protein of the polypeptides of the invention the polypeptide of the invention can correspond to all or a portion of a polypeptide of the invention. In one embodiment, a fusion protein of the polypeptide of the invention comprises at least one biologically active portion of a polypeptide of the invention. In another embodiment, a fusion protein of the polypeptide of the invention comprises at least two biologically active portions of a polypeptide of the invention. In yet another embodiment, a fusion protein of the polypeptide of the invention comprises at least three biologically active portions of a polypeptide of the invention. Within the fusion protein, the term “operatively-linked” is intended to indicate that the polypeptide of the invention and the polypeptide not of the invention are fused in-frame with one another. The polypeptide not of the invention can be fused to the N-terminus or C-terminus of polypeptide of the invention.

[0143] In one embodiment, the fusion protein is a GST-fusion protein of the polypeptides of the invention in which the polypeptide of the invention sequences are fused to the C-terminus of the GST (glutathione S-transferase) sequences. Such fusion proteins can facilitate the purification of recombinant polypeptides of the invention. In another embodiment, the fusion protein is a polypeptide of the invention containing a heterologous signal sequence at its N-terminus. In certain host cells (e.g., mammalian host cells), expression and/or secretion of the polypeptides of the invention can be increased through use of a heterologous signal sequence.

[0144] In yet another embodiment, the fusion protein is an immunoglobulin fusion protein of the polypeptide of the invention in which the sequences corresponding to the polypeptides of the invention are fused to sequences derived from a member of the immunoglobulin protein family. The immunoglobulin fusion proteins of the polypeptides of the invention can be incorporated into pharmaceutical compositions and administered to a subject to inhibit an interaction between ligand that is a polypeptide of the invention and a polypeptide of the invention on the surface of a cell, to thereby suppress signal transduction in vivo mediated by polypeptides of the invention. The immunoglobulin fusion proteins of the polypeptides of the invention can be used to affect the bioavailability of a polypeptide of the invention cognate ligand. Inhibition of the polypeptide of the invention ligand/polypeptide of the invention interaction can be useful therapeutically for both the treatment of proliferative and differentiative disorders, as well as modulating (e.g. promoting or inhibiting) cell survival. Moreover, the immunoglobulin fusion proteins of the polypeptides of the invention can be used as immunogens to produce anti-polypeptides of the invention-like antibodies in a subject, to purify ligands to the polypeptides of the invention, and in screening assays to identify molecules that inhibit the interaction of polypeptides of the invention with ligands for the polypeptide of the invention.

[0145] Chimeric or fusion protein of the polypeptides of the invention can be produced by standard recombinant DNA techniques. For example, DNA fragments coding for the different polypeptide sequences are ligated together in-frame in accordance with conventional techniques, e.g., by employing blunt-ended or stagger-ended termini for ligation, restriction enzyme digestion to provide for appropriate termini, filling-in of cohesive ends as appropriate, alkaline phosphatase treatment to avoid undesirable joining, and enzymatic ligation. In another embodiment, the fusion gene can be synthesized by conventional techniques including automated DNA synthesizers. Alternatively, PCR amplification of gene fragments can be carried out using anchor primers that give rise to complementary overhangs between two consecutive gene fragments that can subsequently be annealed and reamplified to generate a chimeric gene sequence (see, e.g., Ausubel, et al. (eds.) CURRENT PROTOCOLS IN MOLECULAR BIOLOGY, John Wiley & Sons, 1992). Moreover, many expression vectors are commercially available that already encode a fusion moiety (e.g., a GST polypeptide). A nucleic acid encoding a polynucleotide or polypeptide of the invention can be cloned into such an expression vector such that the fusion moiety is linked in-frame to the polypeptide of the invention.

5.10 Hosts

[0146] The present invention further provides host cells genetically engineered to contain the polynucleotides of the invention. For example, such host cells may contain nucleic acids of the invention introduced into the host cell using known transformation, transfection or infection methods. The present invention still further provides host cells genetically engineered to express the polynucleotides of the invention, wherein such polynucleotides are in operative association with a regulatory sequence heterologous to the host cell which drives expression of the polynucleotides in the cell.

[0147] The host cell can be a higher eukaryotic host cell, such as a mammalian cell, a lower eukaryotic host cell, such as a yeast cell, or the host cell can be a prokaryotic cell, such as a bacterial cell. Introduction of the recombinant construct into the host cell can be effected by methods well-known to those of skill in the art, for example calcium phosphate transfection, DEAE, dextran mediated transfection, or electroporation (Davis, L. et al., Basic Methods in Molecular Biology (1986)). The host cells containing one of the polynucleotides of the invention, can be used in conventional manners to produce the gene product encoded by the isolated fragment (in the case of an ORF) or can be used to produce a heterologous protein under the control of the EMF.

[0148] Any host/vector system can be used to express one or more of the ORFs of the present invention. These include, but are not limited to, eukaryotic hosts such as HeLa cells, Cv-1 cell, COS cells, and Sf9 cells, as well as prokaryotic host such as E. coli and B. subtilis. The most preferred cells are those which do not normally express the particular polypeptide or protein or which expresses the polypeptide or protein at low natural level. Mature proteins can be expressed in mammalian cells, yeast, bacteria, or other cells under the control of appropriate promoters. Cell-free translation systems can also be employed to produce such proteins using RNAs derived from the DNA constructs of the present invention. Appropriate cloning and expression vectors for use with prokaryotic and eukaryotic hosts are described by Sambrook, et al., in Molecular Cloning: A Laboratory Manual, Second Edition, Cold Spring Harbor, N.Y. (1989), the disclosure of which is hereby incorporated herein by reference.

[0149] Various mammalian cell culture systems can also be employed to express recombinant protein. Examples of mammalian expression systems include the COS-7 lines of monkey kidney fibroblasts, described by Gluzman, Cell 23:175 (1981), and other cell lines capable of expressing a compatible vector, for example, the C127, 3T3, CHO, HeLa and BHK cell tines. Mammalian expression vectors will comprise an origin of replication, a suitable promoter, and also any necessary ribosome binding sites, polyadenylation site, splice donor and acceptor sites, transcriptional termination sequences, and 5′ flanking nontranscribed sequences. DNA sequences derived from the SV40 viral genome, for example, SV40 origin, early promoter, enhancer, splice, and polyadenylation sites may be used to provide the required nontranscribed genetic elements. Recombinant polypeptides and proteins produced in bacterial culture are usually isolated by initial extraction from cell pellets, followed by one or more salting-out, aqueous ion exchange or size exclusion chromatography steps. Protein refolding steps can be used, as necessary, in completing configuration of the mature protein. Finally, high performance liquid chromatography (HPLC) can be employed for final purification steps. Microbial cells employed in expression of proteins can be disrupted by any convenient method, including freeze-thaw cycling, sonication, mechanical disruption, or use of cell lysing agents.

[0150] A number of types of cells may act as suitable host cells for expression of the protein. Mammalian host cells include, for example, monkey COS cells, Chinese Hamster Ovary (CHO) cells, human kidney 293 cells, human epidermal A431 cells, human Colo205 cells, 3T3 cells, CV-1 cells, other transformed primate cell lines, normal diploid cells, cell strains derived from in vitro culture of primary tissue, primary explants, HeLa cells, mouse L cells, BHK, HL-60, U937, HaK or Jurkat cells.

[0151] Alternatively, it may be possible to produce the protein in lower eukaryotes such as yeast or in prokaryotes such as bacteria. Potentially suitable yeast strains include Saccharomyces cerevisiae, Schizosaccharomyces pombe, Kluyveromyces strains, Candida, or any yeast strain capable of expressing heterologous proteins. Potentially suitable bacterial strains include Escherichia coli, Bacillus subtilis, Salmonella typhimurium, or any bacterial strain capable of expressing heterologous proteins. If the protein is made in yeast or bacteria, it may be necessary to modify the protein produced therein, for example by phosphorylation or glycosylation of the appropriate sites, in order to obtain the functional protein. Such covalent attachments may be accomplished using known chemical or enzymatic methods.

[0152] In another embodiment of the present invention, cells and tissues may be engineered to express an endogenous gene comprising the polynucleotides of the invention under the control of inducible regulatory elements, in which case the regulatory sequences of the endogenous gene may be replaced by homologous recombination. As described herein, gene targeting can be used to replace a gene's existing regulatory region with a regulatory sequence isolated from a different gene or a novel regulatory sequence synthesized by genetic engineering methods. Such regulatory sequences may be comprised of promoters, enhancers, scaffold-attachment regions, negative regulatory elements, transcriptional initiation sites, regulatory protein binding sites or combinations of said sequences. Alternatively, sequences which affect the structure or stability of the RNA or protein produced may be replaced, removed, added, or otherwise modified by targeting, including polyadenylation signals, mRNA stability elements, splice sites, leader sequences for enhancing or modifying transport or secretion properties of the protein, or other sequences which alter or improve the function or stability of protein or RNA molecules.

[0153] The targeting event may be a simple insertion of the regulatory sequence, placing the gene under the control of the new regulatory sequence, e.g., inserting a new promoter or enhancer or both upstream of a gene. Alternatively, the targeting event may be a simple deletion of a regulatory element, such as the deletion of a tissue-specific negative regulatory element. Alternatively, the targeting event may replace an existing element; for example, a tissue-specific enhancer can be replaced by an enhancer that has broader or different cell-type specificity than the naturally occurring elements. Here, the naturally occurring sequences are deleted and new sequences are added. In all cases, the identification of the targeting event may be facilitated by the use of one or more selectable marker genes that are contiguous with the targeting DNA, allowing for the selection of cells in which the exogenous DNA has integrated into the host cell genome. The identification of the targeting event may also be facilitated by the use of one or more marker genes exhibiting the property of negative selection, such that the negatively selectable marker is linked to the exogenous DNA, but configured such that the negatively selectable marker flanks the targeting sequence, and such that a correct homologous recombination event with sequences in the host cell genome does not result in the stable integration of the negatively selectable marker. Markers useful for this purpose include the Herpes Simplex Virus thymidine kinase (TK) gene or the bacterial xanthine-guanine phosphoribosyl-transferase (gpt) gene.

[0154] The gene targeting or gene activation techniques which can be used in accordance with this aspect of the invention are more particularly described in U.S. Pat. No. 5,272,071 to Chappel; U.S. Pat. No. 5,578,461 to Sherwin et al.; International Application No. PCT/US92/09627 (WO93/09222) by Selden et al.; and International Application No. PCT/US90/06436 (WO91/06667) by Skoultchi et al., each of which is incorporated by reference herein in its entirety.

5.11 Gene Therapy

[0155] Mutations in the polynucleotides of the invention gene may result in loss of normal function of the encoded protein. The invention thus provides gene therapy to restore normal activity of the polypeptides of the invention; or to treat disease states involving polypeptides of the invention. Delivery of a functional gene encoding polypeptides of the invention to appropriate cells is effected ex vivo, in situ, or in vivo by use of vectors, and more particularly viral vectors (e.g., adenovirus, adeno-associated virus, or a retrovirus), or ex vivo by use of physical DNA transfer methods (e.g., liposomes or chemical treatments). See, for example, Anderson, Nature, supplement to vol. 392, no. 6679, pp. 25-20 (1998). For additional reviews of gene therapy technology see Friedmann, Science, 244: 1275-1281 (1989); Verma, Scientific American: 68-84 (1990); and Miller, Nature, 357: 455-460 (1992). Introduction of any one of the nucleotides of the present invention or a gene encoding the polypeptides of the present invention can also be accomplished with extrachromosomal substrates (transient expression) or artificial chromosomes (stable expression). Cells may also be cultured ex vivo in the presence of proteins of the present invention in order to proliferate or to produce a desired effect on or activity in such cells. Treated cells can then be introduced in vivo for therapeutic purposes. Alternatively, it is contemplated that in other human disease states, preventing the expression of or inhibiting the activity of polypeptides of the invention will be useful in treating the disease states. It is contemplated that antisense therapy or gene therapy could be applied to negatively regulate the expression of polypeptides of the invention.

[0156] Other methods inhibiting expression of a protein include the introduction of antisense molecules to the nucleic acids of the present invention, their complements, or their translated RNA sequences, by methods known in the art. Further, the polypeptides of the present invention can be inhibited by using targeted deletion methods, or the insertion of a negative regulatory element such as a silencer, which is tissue specific.

[0157] The present invention still further provides cells genetically engineered in vivo to express the polynucleotides of the invention, wherein such polynucleotides are in operative association with a regulatory sequence heterologous to the host cell which drives expression of the polynucleotides in the cell. These methods can be used to increase or decrease the expression of the polynucleotides of the present invention.

[0158] Knowledge of DNA sequences provided by the invention allows for modification of cells to permit, increase, or decrease, expression of endogenous polypeptide. Cells can be modified (e.g., by homologous recombination) to provide increased polypeptide expression by replacing, in whole or in part, the naturally occurring promoter with all or part of a heterologous promoter so that the cells express the protein at higher levels. The heterologous promoter is inserted in such a manner that it is operatively linked to the desired protein encoding sequences. See, for example, PCT International Publication No. WO 94/12650, PCT International Publication No. WO 92/20808, and PCT International Publication No. WO 91/09955. It is also contemplated that, in addition to heterologous promoter DNA, amplifiable marker DNA (e.g., ada, dhfr, and the multifunctional CAD gene which encodes carbamyl phosphate synthase, aspartate transcarbamylase, and dihydroorotase) and/or intron DNA may be inserted along with the heterologous promoter DNA. If linked to the desired protein coding sequence, amplification of the marker DNA by standard selection methods results in co-amplification of the desired protein coding sequences in the cells.

[0159] In another embodiment of the present invention, cells and tissues may be engineered to express an endogenous gene comprising the polynucleotides of the invention under the control of inducible regulatory elements, in which case the regulatory sequences of the endogenous gene may be replaced by homologous recombination. As described herein, gene targeting can be used to replace a gene's existing regulatory region with a regulatory sequence isolated from a different gene or a novel regulatory sequence synthesized by genetic engineering methods. Such regulatory sequences may be comprised of promoters, enhancers, scaffold-attachment regions, negative regulatory elements, transcriptional initiation sites, regulatory protein binding sites or combinations of said sequences. Alternatively, sequences which affect the structure or stability of the RNA or protein produced may be replaced, removed, added, or otherwise modified by targeting. These sequences include polyadenylation signals, mRNA stability elements, splice sites, leader sequences for enhancing or modifying transport or secretion properties of the protein, or other sequences which alter or improve the function or stability of protein or RNA molecules.

[0160] The targeting event may be a simple insertion of the regulatory sequence, placing the gene under the control of the new regulatory sequence, e.g., inserting a new promoter or enhancer or both upstream of a gene. Alternatively, the targeting event may be a simple deletion of a regulatory element, such as the deletion of a tissue-specific negative regulatory element. Alternatively, the targeting event may replace an existing element; for example, a tissue-specific enhancer can be replaced by an enhancer that has broader or different cell-type specificity than the naturally occurring elements. Here, the naturally occurring sequences are deleted and new sequences are added. In all cases, the identification of the targeting event may be facilitated by the use of one or more selectable marker genes that are contiguous with the targeting DNA, allowing for the selection of cells in which the exogenous DNA has integrated into the cell genome. The identification of the targeting event may also be facilitated by the use of one or more marker genes exhibiting the property of negative selection, such that the negatively selectable marker is linked to the exogenous DNA, but configured such that the negatively selectable marker flanks the targeting sequence, and such that a correct homologous recombination event with sequences in the host cell genome does not result in the stable integration of the negatively selectable marker. Markers useful for this purpose include the Herpes Simplex Virus thymidine kinase (TK) gene or the bacterial xanthine-guanine phosphoribosyl-transferase (gpt) gene.

[0161] The gene targeting or gene activation techniques which can be used in accordance with this aspect of the invention are more particularly described in U.S. Pat. No. 5,272,071 to Chappel; U.S. Pat. No. 5,578,461 to Sherwin et al.; International Application No. PCT/US92/09627 (WO93/09222) by Selden et al.; and International Application No. PCT/US90/06436 (WO91/06667) by Skoultchi et al., each of which is incorporated by reference herein in its entirety.

5.12 Antibodies

[0162] Also included in the invention are antibodies to proteins, or fragments of proteins of the invention. The term “antibody” as used herein refers to immunoglobulin molecules and immunologically active portions of immunoglobulin (Ig) molecules, i.e., molecules that contain an antigen-binding site that specifically binds (immunoreacts with) an antigen. Such antibodies include, but are not limited to, polyclonal, monoclonal, chimeric, single chain, F_{ab}, F_{ab′} and F_{(ab′)2} fragments, and an F_{ab} expression library. In general, an antibody molecule obtained from humans relates to any of the classes IgG, IgM, IgA, IgE and IgD, which differ from one another by the nature of the heavy chain present in the molecule. Certain classes have subclasses as well, such as IgG, IgG₂, and others. Furthermore, in humans, the light chain may be a kappa chain or a lambda chain. Reference herein to antibodies includes a reference to all such classes, subclasses and types of human antibody species.

[0163] An isolated related protein of the invention may be intended to serve as an antigen, or a portion or fragment thereof, and additionally can be used as an immunogen to generate antibodies that immunospecifically bind the antigen, using standard techniques for polyclonal and monoclonal antibody preparation. The full-length protein can be used or, alternatively, the invention provides antigenic peptide fragments of the antigen for use as immunogens. An antigenic peptide fragment comprises at least 6 amino acid residues of the amino acid sequence of the full length protein, such as an amino acid sequence shown in SEQ ID NO: 853-1704, or designated in Tables from Examples 2, 4, and 5 and encompasses an epitope thereof such that an antibody raised against the peptide forms a specific immune complex with the full length protein or with any fragment that contains the epitope. Preferably, the antigenic peptide comprises at least 10 amino acid residues, or at least 15 amino acid residues, or at least 20 amino acid residues, or at least 30 amino acid residues. Preferred epitopes encompassed by the antigenic peptide are regions of the protein that are located on its surface; commonly these are hydrophilic regions.

[0164] In certain embodiments of the invention, at least one epitope encompassed by the antigenic peptide is a surface region of the protein, e.g., a hydrophilic region. A hydrophobicity analysis of the human related protein sequence will indicate which regions of a related protein are particularly hydrophilic and, therefore, are likely to encode surface residues useful for targeting antibody production. As a means for targeting antibody production, hydropathy plots showing regions of hydrophilicity and hydrophobicity may be generated by any method well known in the art, including, for example, the Kyte Doolittle or the Hopp Woods methods, either with or without Fourier transformation. See, e.g., Hopp and Woods, Proc. Nat. Acad. Sci. USA 78: 3824-3828 (1981); Kyte and Doolittle, J. Mol. Biol. 157: 105-142 (1982), each of which is incorporated herein by reference in its entirety. Antibodies that are specific for one or more domains within an antigenic protein, or derivatives, fragments, analogs or homologs thereof, are also provided herein.

[0165] A protein of the invention, or a derivative, fragment, analog, homolog or ortholog thereof, may be utilized as an immunogen in the generation of antibodies that immunospecifically bind these protein components.

[0166] The terms “specific for” and “selective for” indicate that the variable regions of the antibodies of the invention recognize and bind polypeptides of the invention exclusively (i.e., able to distinguish the polypeptide of the invention from other similar polypeptides despite sequence identity, homology, or similarity found in the family of polypeptides), but may also interact with other proteins (for example, S. aureus protein A or other antibodies in ELISA techniques) through interactions with sequences outside the variable region of the antibodies, and in particular, in the constant region of the molecule. Screening assays to determine binding specificity of an antibody of the invention are well known and routinely practiced in the art. For a comprehensive discussion of such assays, see Harlow et al. (Eds), Antibodies A Laboratory Manual; Cold Spring Harbor Laboratory; Cold Spring Harbor, N.Y. (1988), Chapter 6. Antibodies that recognize and bind fragments of the polypeptides of the invention are also contemplated, provided that the antibodies are first and foremost specific for, as defined above, full-length polypeptides of the invention. As with antibodies that are specific for full length polypeptides of the invention, antibodies of the invention that recognize fragments are those which can distinguish polypeptides from the same family of polypeptides despite inherent sequence identity, homology, or similarity found in the family of proteins.

[0167] Antibodies of the invention are useful for, for example, therapeutic purposes (by modulating activity of a polypeptide of the invention, or immunotargeting cells expressing said polypeptide of the invention to induce cell death or targeting by the immune system), diagnostic purposes to detect or quantitate a polypeptide of the invention, as well as purification of a polypeptide of the invention. Kits comprising an antibody of the invention for any of the purposes described herein are also comprehended. In general, a kit of the invention also includes a control antigen for which the antibody is immunospecific. The invention further provides a hybridoma that produces an antibody according to the invention. Antibodies of the invention are useful for detection and/or purification of the polypeptides of the invention.

[0168] Monoclonal antibodies binding to the protein of the invention may be useful diagnostic agents for the immunodetection of the protein. Neutralizing monoclonal antibodies binding to the protein may also be useful therapeutics for both conditions associated with the protein and also in the treatment of some forms of cancer where abnormal expression of the protein is involved. In the case of cancerous cells or leukemic cells, neutralizing monoclonal antibodies against the protein may be useful in detecting and preventing the metastatic spread of the cancerous cells, which may be mediated by the protein.

[0169] The labeled antibodies of the present invention can be used for in vitro, in vivo, and in situ assays to identify cells or tissues in which a fragment of the polypeptide of interest is expressed. The antibodies may also be used directly in therapies or other diagnostics. The present invention further provides the above-described antibodies immobilized on a solid support. Examples of such solid supports include plastics such as polycarbonate, complex carbohydrates such as agarose and Sepharose®, acrylic resins and such as polyacrylamide and latex beads. Techniques for coupling antibodies to such solid supports are well known in the art (Weir, D. M. et al., “Handbook of Experimental Immunology” 4th Ed., Blackwell Scientific Publications, Oxford, England, Chapter 10 (1986); Jacoby, W. D. et al., Meth. Enzym. 34 Academic Press, N.Y. (1974)). The immobilized antibodies of the present invention can be used for in vitro, in vivo, and in situ assays as well as for immuno-affinity purification of the proteins of the present invention.

[0170] Various procedures known within the art may be used for the production of polyclonal or monoclonal antibodies directed against a protein of the invention, or against derivatives, fragments, analogs homologs or orthologs thereof (see, for example, Antibodies: A Laboratory Manual, Harlow E, and Lane D, 1988, Cold Spring Harbor Laboratory Press, Cold Spring Harbor, N.Y., incorporated herein by reference). Some of these antibodies are discussed below.

5.12.1 Polyclonal Antibodies

[0171] For the production of polyclonal antibodies, various suitable host animals (e.g., rabbit, goat, mouse or other mammal) may be immunized by one or more injections with the native protein, a synthetic variant thereof, or a derivative of the foregoing. An appropriate immunogenic preparation can contain, for example, the naturally occurring immunogenic protein, a chemically synthesized polypeptide representing the immunogenic protein, or a recombinantly expressed immunogenic protein. Furthermore, the protein may be conjugated to a second protein known to be immunogenic in the mammal being immunized. Examples of such immunogenic proteins include but are not limited to keyhole limpet hemocyanin, serum albumin, bovine thyroglobulin, and soybean trypsin inhibitor. The preparation can further include an adjuvant. Various adjuvants used to increase the immunological response include, but are not limited to, Freund's (complete and incomplete), mineral gels (e.g., aluminum hydroxide), surface-active substances (e.g., lysolecithin, pluronic polyols, polyanions, peptides, oil emulsions, dinitrophenol, etc.), adjuvants usable in humans such as Bacille Calmette-Guerin and Corynebacterium parvum, or similar immunostimulatory agents. Additional examples of adjuvants that can be employed include MPL-TDM adjuvant (monophosphoryl Lipid A, synthetic trehalose dicorynomycolate).

[0172] The polyclonal antibody molecules directed against the immunogenic protein can be isolated from the mammal (e.g., from the blood) and further purified by well known techniques, such as affinity chromatography using protein A or protein G, which provide primarily the IgG fraction of immune serum. Subsequently, or alternatively, the specific antigen which is the target of the immunoglobulin sought, or an epitope thereof, may be immobilized on a column to purify the immune specific antibody by immunoaffinity chromatography. Purification of immunoglobulins is discussed, for example, by D. Wilkinson (The Scientist, published by The Scientist, Inc., Philadelphia Pa., Vol. 14, No. 8 (Apr. 17, 2000), pp. 25-28).

5.12.2 Monoclonal Antibodies

[0173] The term “monoclonal antibody” (MAb) or “monoclonal antibody composition”, as used herein, refers to a population of antibody molecules that contain only one molecular species of antibody molecule consisting of a unique light chain gene product and a unique heavy chain gene product. In particular, the complementarity determining regions (CDRs) of the monoclonal antibody are identical in all the molecules of the population. MAbs thus contain an antigen-binding site capable of immunoreacting with a particular epitope of the antigen characterized by a unique binding affinity for it.

[0174] Monoclonal antibodies can be prepared using hybridoma methods, such as those described by Kohler and Milstein, Nature, 256:495 (1975). In a hybridoma method, a mouse, hamster, or other appropriate host animal, is typically immunized with an immunizing agent to elicit lymphocytes that produce or are capable of producing antibodies that will specifically bind to the immunizing agent. Alternatively, the lymphocytes can be immunized in vitro.

[0175] The immunizing agent will typically include the protein antigen, a fragment thereof or a fusion protein thereof. Generally, either peripheral blood lymphocytes are used if cells of human origin are desired, or spleen cells or lymph node cells are used if non-human mammalian sources are desired. The lymphocytes are then fused with an immortalized cell line using a suitable fusing agent, such as polyethylene glycol, to form a hybridoma cell (Goding, Monoclonal Antibodies: Principles and Practice, Academic Press, (1986) pp. 59-103). Immortalized cell lines are usually transformed mammalian cells, particularly myeloma cells of rodent, bovine and human origin. Usually, rat or mouse myeloma cell lines are employed. The hybridoma cells can be cultured in a suitable culture medium that preferably contains one or more substances that inhibit the growth or survival of the unfused, immortalized cells. For example, if the parental cells lack the enzyme hypoxanthine guanine phosphoribosyl transferase (HGPRT or HPRT), the culture medium for the hybridomas typically will include hypoxanthine, aminopterin, and thymidine (“HAT medium”), which substances prevent the growth of HGPRT-deficient cells.

[0176] Preferred immortalized cell lines are those that fuse efficiently, support stable high level expression of antibody by the selected antibody-producing cells, and are sensitive to a medium such as HAT medium. More preferred immortalized cell lines are murine myeloma lines, which can be obtained, for instance, from the Salk Institute Cell Distribution Center, San Diego, Calif. and the American Type Culture Collection, Manassas, Va. Human myeloma and mouse-human heteromyeloma cell lines also have been described for the production of human monoclonal antibodies (Kozbor, J. Immunol., 133:3001 (1984); Brodeur et al., Monoclonal Antibody Production Techniques and Applications, Marcel Dekker, Inc., New York, (1987) pp. 51-63).

[0177] The culture medium in which the hybridoma cells are cultured can then be assayed for the presence of monoclonal antibodies directed against the antigen. Preferably, the binding specificity of monoclonal antibodies produced by the hybridoma cells is determined by immunoprecipitation or by an in vitro binding assay, such as radioimmunoassay (RIA) or enzyme-linked immunoabsorbent assay (ELISA). Such techniques and assays are known in the art. The binding affinity of the monoclonal antibody can, for example, be determined by the Scatchard analysis of Munson and Pollard, Anal. Biochem., 107:220 (1980). Preferably, antibodies having a high degree of specificity and a high binding affinity for the target antigen are isolated.

[0178] After the desired hybridoma cells are identified, the clones can be subcloned by limiting dilution procedures and grown by standard methods. Suitable culture media for this purpose include, for example, Dulbecco's Modified Eagle's Medium and RPMI-1640 medium. Alternatively, the hybridoma cells can be grown in vivo as ascites in a mammal.

[0179] The monoclonal antibodies secreted by the subclones can be isolated or purified from the culture medium or ascites fluid by conventional immunoglobulin purification procedures such as, for example, protein A-Sepharose, hydroxylapatite chromatography, gel electrophoresis, dialysis, or affinity chromatography.

[0180] The monoclonal antibodies can also be made by recombinant DNA methods, such as those described in U.S. Pat. No. 4,816,567. DNA encoding the monoclonal antibodies of the invention can be readily isolated and sequenced using conventional procedures (e.g., by using oligonucleotide probes that are capable of binding specifically to genes encoding the heavy and light chains of murine antibodies). The hybridoma cells of the invention serve as a preferred source of such DNA. Once isolated, the DNA can be placed into expression vectors, which are then transfected into host cells such as simian COS cells, Chinese hamster ovary (CHO) cells, or myeloma cells that do not otherwise produce immunoglobulin protein, to obtain the synthesis of monoclonal antibodies in the recombinant host cells. The DNA also can be modified, for example, by substituting the coding sequence for human heavy and light chain constant domains in place of the homologous murine sequences (U.S. Pat. No. 4,816,567; Morrison, Nature 368:812-13 (1994)) or by covalently joining to the immunoglobulin coding sequence all or part of the coding sequence for a non-immunoglobulin polypeptide. Such a non-immunoglobulin polypeptide can be substituted for the constant domains of an antibody of the invention, or can be substituted for the variable domains of one antigen-combining site of an antibody of the invention to create a chimeric bivalent antibody.

5.12.3 Humanized Antibodies

[0181] The antibodies directed against the protein antigens of the invention can further comprise humanized antibodies or human antibodies. These antibodies are suitable for administration to humans without engendering an immune response by the human against the administered immunoglobulin. Humanized forms of antibodies are chimeric immunoglobulins, immunoglobulin chains or fragments thereof (such as Fv, Fab, Fab′, F(ab′)₂ or other antigen-binding subsequences of antibodies) that are principally comprised of the sequence of a human immunoglobulin, and contain minimal sequence derived from a non-human immunoglobulin. Humanization can be performed following the method of Winter and co-workers (Jones et al., Nature, 321:522-525 (1986); Riechmann, et al., Nature, 332:323-327 (1988); Verhoeyen, et al., Science, 239:1534-1536 (1988)), by substituting rodent CDRs or CDR sequences for the corresponding sequences of a human antibody. (See also U.S. Pat. No. 5,225,539). In some instances, Fv framework residues of the human immunoglobulin are replaced by corresponding non-human residues. Humanized antibodies can also comprise residues that are found neither in the recipient antibody nor in the imported CDR or framework sequences. In general, the humanized antibody will comprise substantially all of at least one, and typically two, variable domains, in which all or substantially all of the CDR regions correspond to those of a non-human immunoglobulin and all or substantially all of the framework regions are those of a human immunoglobulin consensus sequence. The humanized antibody optimally also will comprise at least a portion of an immunoglobulin constant region (Fc), typically that of a human immunoglobulin (Jones et al., 1986; Riechhmann et al., 1988; and Presta, Curr. Op. Struct. Biol., 2:593-596 (1992)).

5.12.4 Human Antibodies

[0182] Fully human antibodies relate to antibody molecules in which essentially the entire sequences of both the light chain and the heavy chain, including the CDRs, arise from human genes. Such antibodies are termed “human antibodies” or “fully human antibodies” herein. Human monoclonal antibodies can be prepared by the trioma technique; the human B-cell hybridoma technique (see Kozbor, et al., Immunol Today 4: 72 (1983)) and the EBV hybridoma technique to produce human monoclonal antibodies (see Cole, et al., 1985 In: MONOCLONAL ANTIBODIES AND CANCER THERAPY, Alan R. Liss, Inc., pp. 77-96). Human monoclonal antibodies may be utilized in the practice of the present invention and may be produced by using human hybridomas (see Cote, et al., Proc Natl Acad Sci USA 80: 2026-2030 (1983)) or by transforming human B-cells with Epstein Barr Virus in vitro (see Cole, et al., 1985 In: MONOCLONAL ANTIBODIES AND CANCER THERAPY, Alan R. Liss, Inc., pp. 77-96).

[0183] In addition, human antibodies can also be produced using additional techniques, including phage display libraries (Hoogenboom and Winter, J. Mol. Biol., 227:381 (1991); Marks et al., J. Mol. Biol., 222:581 (1991)). Similarly, human antibodies can be made by introducing human immunoglobulin loci into transgenic animals, e.g., mice in which the endogenous immunoglobulin genes have been partially or completely inactivated. Upon challenge, human antibody production is observed, which closely resembles that seen in humans in all respects, including gene rearrangement, assembly, and antibody repertoire. This approach is described, for example, in U.S. Pat. Nos. 5,545,807; 5,545,806; 5,569,825; 5,625,126; 5,633,425; 5,661,016, and in Marks et al. (Bio/Technology 10,:779-783 (1992)); Lonberg et al. (Nature 368:856-859 (1994)); Morrison (Nature 368:812-13 (1994)); Fishwild et al, (Nature Biotechnology, 14:845-51 (1996)); Neuberger (Nature Biotechnology, 14:826 (1996)); and Lonberg and Huszar (Intern. Rev. Immunol. 13:65-93 (1995)).

[0184] Human antibodies may additionally be produced using transgenic nonhuman animals which are modified so as to produce fully human antibodies rather than the animal's endogenous antibodies in response to challenge by an antigen. (See PCT publication WO94/02602). The endogenous genes encoding the heavy and light immunoglobulin chains in the nonhuman host have been incapacitated, and active loci encoding human heavy and light chain immunoglobulins are inserted into the host's genome. The human genes are incorporated, for example, using yeast artificial chromosomes containing the requisite human DNA segments. An animal which provides all the desired modifications is then obtained as progeny by crossbreeding intermediate transgenic animals containing fewer than the full complement of the modifications. The preferred embodiment of such a nonhuman animal is a mouse, and is termed the Xenomouse™ as disclosed in PCT publications WO 96/33735 and WO 96/34096. This animal produces B cells which secrete fully human immunoglobulins. The antibodies can be obtained directly from the animal after immunization with an immunogen of interest, as, for example, a preparation of a polyclonal antibody, or alternatively from immortalized B cells derived from the animal, such as hybridomas producing monoclonal antibodies. Additionally, the genes encoding the immunoglobulins with human variable regions can be recovered and expressed to obtain the antibodies directly, or can be further modified to obtain analogs of antibodies such as, for example, single chain Fv molecules.

[0185] An example of a method of producing a nonhuman host, exemplified as a mouse, lacking expression of an endogenous immunoglobulin heavy chain is disclosed in U.S. Pat. No. 5,939,598. It can be obtained by a method including deleting the J segment genes from at least one endogenous heavy chain locus in an embryonic stem cell to prevent rearrangement of the locus and to prevent formation of a transcript of a rearranged immunoglobulin heavy chain locus, the deletion being effected by a targeting vector containing a gene encoding a selectable marker; and producing from the embryonic stem cell a transgenic mouse whose somatic and germ cells contain the gene encoding the selectable marker.

[0186] A method for producing an antibody of interest, such as a human antibody, is disclosed in U.S. Pat. No. 5,916,771. It includes introducing an expression vector that contains a nucleotide sequence encoding a heavy chain into one mammalian host cell in culture, introducing an expression vector containing a nucleotide sequence encoding a light chain into another mammalian host cell, and fusing the two cells to form a hybrid cell. The hybrid cell expresses an antibody containing the heavy chain and the light chain.

[0187] In a further improvement on this procedure, a method for identifying a clinically relevant epitope on an immunogen, and a correlative method for selecting an antibody that binds immunospecifically to the relevant epitope with high affinity, are disclosed in PCT publication WO 99/53049.

5.12.5 Fab Fragments and Single Chain Antibodies

[0188] According to the invention, techniques can be adapted for the production of single-chain antibodies specific to an antigenic protein of the invention (see e.g., U.S. Pat. No. 4,946,778). In addition, methods can be adapted for the construction of Fab expression libraries (see e.g., Huse, et al., Science 246:1275-1281 (1989)) to allow rapid and effective identification of monoclonal Fab fragments with the desired specificity for a protein or derivatives, fragments, analogs or homologs thereof. Antibody fragments that contain the idiotypes to a protein antigen may be produced by techniques known in the art including, but not limited to: (i) an F_{(ab′)2} fragment produced by pepsin digestion of an antibody molecule; (ii) an F_{ab} fragment generated by reducing the disulfide bridges of an F_{(ab′) 2} fragment; (iii) an F_{ab} fragment generated by the treatment of the antibody molecule with papain and a reducing agent and (iv) Fᵥ fragments.

5.12.6 Bispecific Antibodies

[0189] Bispecific antibodies are monoclonal, preferably human or humanized, antibodies that have binding specificities for at least two different antigens. In the present case, one of the binding specificities is for an antigenic protein of the invention. The second binding target is any other antigen, and advantageously is a cell-surface protein or receptor or receptor subunit.

[0190] Methods for making bispecific antibodies are known in the art. Traditionally, the recombinant production of bispecific antibodies is based on the co-expression of two immunoglobulin heavy-chain/light-chain pairs, where the two heavy chains have different specificities (Milstein and Cuello, Nature, 305:537-539 (1983)). Because of the random assortment of immunoglobulin heavy and light chains, these hybridomas (quadromas) produce a potential mixture of ten different antibody molecules, of which only one has the correct bispecific structure. The purification of the correct molecule is usually accomplished by affinity chromatography steps. Similar procedures are disclosed in WO 93/08829, published 13 May 1993, and in Traunecker et al., EMBO J., 10:3655-3659 (1991).

[0191] Antibody variable domains with the desired binding specificities (antibody-antigen combining sites) can be fused to immunoglobulin constant domain sequences. The fusion preferably is with an immunoglobulin heavy-chain constant domain, comprising at least part of the hinge, CH2, and CH3 regions. It is preferred to have the first heavy-chain constant region (CH1) containing the site necessary for light-chain binding present in at least one of the fusions. DNAs encoding the immunoglobulin heavy-chain fusions and, if desired, the immunoglobulin light chain, are inserted into separate expression vectors, and are co-transfected into a suitable host organism. For further details of generating bispecific antibodies see, for example, Suresh et al., Methods in Enzymology, 121:210 (1986).

[0192] According to another approach described in WO 96/27011, the interface between a pair of antibody molecules can be engineered to maximize the percentage of heterodimers which are recovered from recombinant cell culture. The preferred interface comprises at least a part of the CH3 region of an antibody constant domain. In this method, one or more small amino acid side chains from the interface of the first antibody molecule are replaced with larger side chains (e.g. tyrosine or tryptophan). Compensatory “cavities” of identical or similar size to the large side chain(s) are created on the interface of the second antibody molecule by replacing large amino acid side chains with smaller ones (e.g. alanine or threonine). This provides a mechanism for increasing the yield of the heterodimer over other unwanted end-products such as homodimers.

[0193] Bispecific antibodies can be prepared as full-length antibodies or antibody fragments (e.g. F(ab′)₂ bispecific antibodies). Techniques for generating bispecific antibodies from antibody fragments have been described in the literature. For example, bispecific antibodies can be prepared using chemical linkage. Brennan et al., Science 229:81 (1985) describe a procedure wherein intact antibodies are proteolytically cleaved to generate F(ab′)₂ fragments. These fragments are reduced in the presence of the dithiol complexing agent sodium arsenite to stabilize vicinal dithiols and prevent intermolecular disulfide formation. The Fab′ fragments generated are then converted to thionitrobenzoate (TNB) derivatives. One of the Fab′-TNB derivatives is then reconverted to the Fab′-thiol by reduction with mercaptoethylamine and is mixed with an equimolar amount of the other Fab′-TNB derivative to form the bispecific antibody. The bispecific antibodies produced can be used as agents for the selective immobilization of enzymes.

[0194] Additionally, Fab′ fragments can be directly recovered from E. coli and chemically coupled to form bispecific antibodies. Shalaby et al., J. Exp. Med. 175:217-225 (1992) describe the production of a fully humanized bispecific antibody F(ab′)₂ molecule. Each Fab′ fragment was separately secreted from E. coli and subjected to directed chemical coupling in vitro to form the bispecific antibody. The bispecific antibody thus formed was able to bind to cells overexpressing the ErbB2 receptor and normal human T cells, as well as trigger the lytic activity of human cytotoxic lymphocytes against human breast tumor targets.

[0195] Various techniques for making and isolating bispecific antibody fragments directly from recombinant cell culture have also been described. For example, bispecific antibodies have been produced using leucine zippers. Kostelny et al., J. Immunol. 148:1547-1553 (1992). The leucine zipper peptides from the Fos and Jun proteins were linked to the Fab′ portions of two different antibodies by gene fusion. The antibody homodimers were reduced at the hinge region to form monomers and then re-oxidized to form the antibody heterodimers. This method can also be utilized for the production of antibody homodimers. The “diabody” technology described by Hollinger et al., Proc. Natl. Acad. Sci. USA 90:6444-6448 (1993) has provided an alternative mechanism for making bispecific antibody fragments. The fragments comprise a heavy-chain variable domain (V_{H}) connected to a light-chain variable domain (V_{L}) by a linker which is too short to allow pairing between the two domains on the same chain. Accordingly, the V_{H} and V_{L} domains of one fragment are forced to pair with the complementary V_{L} and V_{H} domains of another fragment, thereby forming two antigen-binding sites. Another strategy for making bispecific antibody fragments by the use of single-chain Fv (sFv) dimers has also been reported. See, Gruber et al., J. Immunol. 152:5368 (1994).

[0196] Antibodies with more than two valencies are contemplated. For example, trispecific antibodies can be prepared. Tutt et al., J. Immunol. 147:60 (1991).

[0197] Exemplary bispecific antibodies can bind to two different epitopes, at least one of which originates in the protein antigen of the invention. Alternatively, an anti-antigenic arm of an immunoglobulin molecule can be combined with an arm which binds to a triggering molecule on a leukocyte such as a T-cell receptor molecule (e.g. CD2, CD3, CD28, or B7), or Fc receptors for IgG (FcγR), such as FcγRI (CD64), FcγRII (CD32) and FcγRIII (CD16) so as to focus cellular defense mechanisms to the cell expressing the particular antigen. Bispecific antibodies can also be used to direct cytotoxic agents to cells which express a particular antigen. These antibodies possess an antigen-binding arm and an arm which binds a cytotoxic agent or a radionuclide chelator, such as EOTUBE, DPTA, DOTA, or TETA. Another bispecific antibody of interest binds the protein antigen described herein and further binds tissue factor (TF).

5.12.7 Heteroconjugate Antibodies

[0198] Heteroconjugate antibodies are also within the scope of the present invention. Heteroconjugate antibodies are composed of two covalently joined antibodies. Such antibodies have, for example, been proposed to target immune system cells to unwanted cells (U.S. Pat. No. 4,676,980), and for treatment of HIV infection (WO 91/00360; WO 92/200373; EP 03089). It is contemplated that the antibodies can be prepared in vitro using known methods in synthetic protein chemistry, including those involving crosslinking agents. For example, immunotoxins can be constructed using a disulfide exchange reaction or by forming a thioether bond. Examples of suitable reagents for this purpose include iminothiolate and methyl-4-mercaptobutyrimidate and those disclosed, for example, in U.S. Pat. No. 4,676,980.

5.12.8 Effector Function Engineering

[0199] It can be desirable to modify the antibody of the invention with respect to effector function, so as to enhance, e.g., the effectiveness of the antibody in treating cancer. For example, cysteine residue(s) can be introduced into the Fc region, thereby allowing interchain disulfide bond formation in this region. The homodimeric antibody thus generated can have improved internalization capability and/or increased complement-mediated cell killing and antibody-dependent cellular cytotoxicity (ADCC). See Caron et al., J. Exp Med., 176: 1191-1195 (1992) and Shopes, J. Immunol., 148: 2918-2922 (1992). Homodimeric antibodies with enhanced anti-tumor activity can also be prepared using heterobifunctional cross-linkers as described in Wolff et al. Cancer Research, 53: 2560-2565 (1993). Alternatively, an antibody can be engineered that has dual Fc regions and can thereby have enhanced complement lysis and ADCC capabilities. See Stevenson et al., Anti-Cancer Drug Design, 3: 219-230 (1989).

5.12.9 Immunoconjugates

[0200] The invention also pertains to immunoconjugates comprising an antibody conjugated to a cytotoxic agent such as a chemotherapeutic agent, toxin (e.g., an enzymatically active toxin of bacterial, fungal, plant, or animal origin, or fragments thereof), or a radioactive isotope (i.e., a radioconjugate).

[0201] Chemotherapeutic agents useful in the generation of such immunoconjugates have been described above. Enzymatically active toxins and fragments thereof that can be used include diphtheria A chain, nonbinding active fragments of diphtheria toxin, exotoxin A chain (from Pseudomonas aeruginosa), ricin A chain, abrin A chain, modeccin A chain, alpha-sarcin, Aleurites fordii proteins, dianthin proteins, Phytolaca americana proteins (PAPI, PAPII, and PAP-S), momordica charantia inhibitor, curcin, crotin, sapaonaria officinalis inhibitor, gelonin, mitogellin, restrictocin, phenomycin, enomycin, and the tricothecenes. A variety of radionuclides are available for the production of radioconjugated antibodies. Examples include ²¹²Bi, 131I, ¹³¹In, ⁹⁰Y, and ¹⁸⁶Re.

[0202] Conjugates of the antibody and cytotoxic agent are made using a variety of bifunctional protein-coupling agents such as N-succinimidyl-3-(2-pyridyldithiol) propionate (SPDP), iminothiolane (IT), bifunctional derivatives of imidoesters (such as dimethyl adipimidate HCL), active esters (such as disuccinimidyl suberate), aldehydes (such as glutareldehyde), bis-azido compounds (such as bis (p-azidobenzoyl) hexanediamine), bis-diazonium derivatives (such as bis-(p-diazoniumbenzoyl)-ethylenediamine), diisocyanates (such as tolyene 2,6-diisocyanate), and bis-active fluorine compounds (such as 1,5-difluoro-2,4-dinitrobenzene). For example, a ricin immunotoxin can be prepared as described in Vitetta et al., Science, 238: 1098 (1987). Carbon-14-labeled 1-isothiocyanatobenzyl-3-methyldiethylene triaminepentaacetic acid (MX-DTPA) is an exemplary chelating agent for conjugation of radionucleotide to the antibody. See WO94/11026. In another embodiment, the antibody can be conjugated to a “receptor” (such streptavidin) for utilization in tumor pretargeting wherein the antibody-receptor conjugate is administered to the patient, followed by removal of unbound conjugate from the circulation using a claring agent and then administration of a “ligand” (e.g., avidin) that is in turn conjugated to a cytotoxic agent.

5.13 Assays for Detection of Polypeptides and Polynucleotides of the Invention

5.13.1 Sample Collection and Processing

[0203] The polypeptides of the invention individually or in combination are preferably quantified in a biological sample obtained from a patient. In the same manner, polynucleotides of the invention individually or in combination are prefereably quantified in a biological sample obtained from a patient. As used herein, a biological sample is a sample of biological tissue or fluid that contains a concentration of any of the polypeptides or polynucleotides of the invention that may be correlated with blood or tissue levels of any of the polypeptides or polynucleotides of the invention. Particularly preferred biological samples include blood serum (blood lacking a cellular component and clotting factors), blood plasma (blood lacking a cellular component), urine, cervicovaginal mucous, amniotic fluid, or fetal cells.

[0204] In one preferred embodiment, the polypeptides of the invention individually or in combination are quantified in whole blood or blood derivatives such as blood plasma or blood serum. Said samples are isolated from a patient according to standard methods well known to those of skill in the art, including venipuncture. After blood isolation from the patient, the blood sample may either be pretreated by dilution in an appropriate buffer solution, or be concentrated. Any of a number of standard aqueous buffer solutions at physiological pH may be employed, including phosphate, Tris, or others. Means of preparing blood serum or blood plasma are well known to those skilled in the art and typically involve centrifugation or filtration to produce blood plasma, or clotting followed by centrifugation or filtration to produce blood serum. Blood plasma or serum may be diluted by the addition of buffers or other reagents well known to those of skill in the art, and may be stored for up to 24 hours at 2-8° C., or at −20° C. or lower for longer periods, prior to measurement of any of the polypeptides of the invention individually or in combination.

[0205] In another preferred embodiment, any of the polynucleotides of the invention individually or in combination are quantified from cells present in the amniotic fluid. Said samples are isolated from the pregnant patient according to standard methods well known to those of skill in the art, including amniocentesis. Preferably within the second trimester of pregnancy, a thin, hollow needle is inserted from the abdomen through the uterus into the amniotic sac. A small amount (approximately 1 or 2 tablespoons) of amniotic fluid is withdrawn, with the needle then being removed. Subsequently, living cells from the withdrawn amniotic fluid are cultured for approximately two weeks before quantification of expression of any of the polynucleotides of the invention individually or in combination.

[0206] In another preferred embodiment, any of the polypeptides of the invention individually or in combination are quantified from vaginal mucous. Cervicovaginal mucous is removed from an area within the vaginal cavity such as the posterior formix, cervical canal, or uterine cavity. The sample is removed with a swab having a fibrous tip, aspirator, suction device, lavage device or the like and transferred to a suitable container for storage and transport to the testing laboratory. It is important that the sample be dispersed in a liquid that preserves the sensitive protein analytes such as any of the polypeptides of the invention which may be unstable in the sampled composition. The storage and transfer medium should prevent decline in the protein analyte level during storage and transfer. One example of a suitable preserving solution for storage and transfer consists of 0.05M Tris-HCL, pH 7.4; 0.15M NaCl, 0.02% NaN₃, 1% BSA, 500 Kallikrein Units/mL aprotinin, 1 mM phenylmethylsulfonyl fluoride (PMSF) and 5 mM EDTA.

[0207] In another preferred embodiment, any of the polypeptides of the invention individually or in combination are quantified from a sample of urine from a patient during pregnancy. The sample can be taken from any time of day, but preferably from the first morning void. One example of urine specimen collection and storage includes having the patient void into a plastic urine specimen container, and then immediately storing the container with the urine sample at 2 to 30° C. until testing. If the sample is to be stored for longer than 30 days, then it should be frozen between −20 and −70° C. until testing.

[0208] In another preferred embodiment, any of the polynucleotides of the invention individually or in combination are quantified from a sample of fetal cells and/or maternal cells derived from maternal blood. Fetal cell isolation from samples of maternal blood is achieved using any number of well-recognized detection and isolation techniques. (See for example Clin Chem Lab Med. 2002 February; 40(2):126-31, Int J Mol Med. 2002 September; 10(3):257-61, Cytometry. 2001 Dec. 1;45(4):267-76, and Expert Rev Mol Diagn. 2002 Jul.; 2(4):303-11 which are hereby incorporated by reference). Isolation of maternal blood cells is well-known to those of skill in the art.

5.13.2 Quantification of the Polypeptides of the Invention

[0209] Any of the polypeptides of the invention individually or in combination may be detected and quantified by any of a number of means well known to those of skill in the art. These may include analytic biochemical methods such as electrophoresis, capillary electrophoresis, high performance liquid chromatography (HPLC), thin layer chromatography (TLC), hyperdiffusion chromatography, by surface-enhanced laser desorption/ionization (SELDI), and the like, or various immunological methods such as fluid or gel precipitation reactions, immunodiffusion (single or double), immunoelectrophoresis, radioimmunoassay (RIA), enzyme-linked immunosorbent assays (ELISAs), immunofluorescent assays, western blotting, and the like.

[0210] As used herein, an immunoassay is an assay that utilizes an antibody to specifically bind to the analyte. The immunoassay is characterized by the use of specific binding to a particular antibody as opposed to other physical or chemical properties to isolate, target, and quantify the analyte.

5.13.3 Immunological Binding Assays

[0211] In a preferred embodiment, any of the polypeptides of the invention individually or in combination may be detected and quantified using any of a number of well-recognized immunological binding assays. (See for example, U.S. Pat. No. 5,712,103 hereby incorporated herein by reference.) For a review of the general immunoassays, see also Methods in Cell Biology Volume 37: Antibodies in Cell Biology, Asai, ed. Academic Press, Inc. N.Y. (1993); Basic and Clinical Immunology 7^{th} Edition, Stites & Terr, eds. (1991), which are hereby incorporated herein by reference.

[0212] Immunological binding assays (or immunoassays) typically utilize a “capture agent” to specifically bind to and often immobilize the analyte (in this case any of the polypeptides of the invention). The capture agent is a moiety that specifically binds to the analyte. In a preferred embodiment, the capture agent is an antibody that specifically binds one of the polypeptides of the invention.

[0213] The antibody may be provided by any of a number of means well known to those of skill in the art (see, for example Methods in Cell Biology Vol. 37: Antibodies in Cell Biology, Asai, ed. Academic Press, Inc. N.Y. (1993); and Basic and Clinical Immunology 7^{th} Edition, Stites & Terr, eds. (1991), which are hereby incorporated herein by reference). The antibody may be a whole antibody or an antibody fragment. It may be polyclonal or monoclonal, and it may be produced by challenging an organism (e.g. mouse, rat, rabbit, etc.) with any of the polypeptides of the invention or an epitope derived therefrom. Alternatively, the antibody may be produced de novo using recombinant DNA methodology (e.g. DNA vaccination) and any of the polynucleotides of the invention in full-length gene form or a fragment derived therefrom. Additionally, antibodies that specifically bind any of the polypeptides of the invention may be produced using standard methods well-known to those of skill in the art, or may be obtained commercially.

[0214] Immunoassays also often utilize a labeling agent to specifically bind to and label the binding complex formed by the capture agent and the analyte. The labeling agent may itself be one of the moieties comprising the antibody/analyte complex. Thus, the labeling agent may be a labeled version of any of the polypeptides of the invention or a labeled antibody selectively recognizing any of the polypeptides of the invention. Alternatively, the labeling agent may be a third moiety, such as another antibody, that specifically binds to an antibody complexed with a polypeptide of the invention.

[0215] In a preferred embodiment, the labeling agent is an antibody that specifically binds to the capture agent (the antibody specifically recognizing any of the polypeptides of the invention). Such agents are well known to those of skill in the art, and most typically comprise labeled antibodies that specifically bind antibodies of the particular animal species from which the capture agent is derived. Thus, for example, where the capture agent is rabbit derived anti-human antibody to any of the polypeptides of the invention, the label agent may be a goat anti-rabbit IgG; an antibody that is specific to the constant region of the rabbit antibody.

[0216] Other proteins capable of specifically binding immunoglobulin constant regions, such as protein A or protein G may also be used as the label agent. These proteins are normal constituents of the cell walls of streptococcal bacteria. They exhibit a strong non-immunogenic reactivity with immunoglobulin constant regions from a variety of species.

[0217] Throughout the assays, incubation and/or washing steps may be required after each combination of reagents. Incubation steps can vary from about 5 seconds to several hours, preferably from about 5 minutes to 24 hours. However, the incubation time will depend upon the assay format, analyte, volume of solution, concentration, and the like. Usually, the assays will be carried out at ambient temperature, although they can be conducted over a range of temperatures, such as 10° C. to 40° C.

5.13.4 Non-Competitive Assay Formats

[0218] Immunoassays for detecting any of the polypeptides of the invention may be either competitive or noncompetitive. Noncompetitive immunoassays are assays in which the amount of captured analyte (in this case any of the polypeptides of the invention) is directly measured. In one preferred “sandwich” assay, for example, the capture agent (antibodies selective for any of the polypeptides of the invention) can be bound directly to a solid substrate where they are immobilized. These immobilized antibodies then capture the protein encoded from any of the polypeptides of the invention present in the test sample. The protein thus immobilized is then bound by a labeling agent, such as a second human antibody selective for any of the polypeptides of the invention bearing a label. Alternatively, the second antibody may lack a label, but it may, in turn, be bound by a labeled third antibody specific to antibodies of the species from which the second antibody is derived.

[0219] Sandwich assays are particularly preferred as diagnostics for the present invention. Such an assay provides immobilized antibodies selective for any of the polypeptides of the invention, the polypeptides of the invention concentration standards, ¹²⁵I labeled antibodies selective for any of the polypeptides of the invention, and positive and negative controls for the polypeptides of the invention. As described above, the immobilized antibodies specifically bind to the the polypeptides of the invention present in the sample. Then the ¹²⁵I labeled antibodies selective for any of the polypeptides of the invention bind to the already bound polypeptides of the invention. Free ¹²⁵I labeled antibodies selective for any of the polypeptides of the invention are washed away and the remaining bound ¹²⁵I labeled antibodies selective for any of the polypeptides of the invention are detected using a gamma detector.

5.13.5 Competitive Assays

[0220] In competitive assays, the amount of analyte (any of the polypeptides of the invention) present in the sample is measured indirectly by measuring the amount of an added (exogenous) analyte (the polypeptides of the invention) displaced (or competed away) from a capture agent (antibody selective for the polypeptides of the invention) by the analyte present in the sample. In one competitive assay, a known amount of any of the polypeptides of the invention is added to the sample and the sample is then contacted with a capture agent, in this case an antibody that specifically binds to one of the polypeptides of the invention. The amount of the polypeptides of the invention bound to the antibody is inversely proportional to the concentration of protein present in the sample.

[0221] In a particularly preferred embodiment, the antibody is immobilized on a solid substrate. The amount of any of the polypeptides of the invention bound to the antibody may be determined either by measuring the amount of the polypeptides of the invention present in an complex consisting of an antibody specific for the polypeptides of the invention and the corresponding polypeptide of the invention, or alternatively by measuring the amount of remaining uncomplexed polypeptides of the invention. The amount of polypeptides of the invention may be detected by providing a labeled version of nay of the polypeptides of the invention.

[0222] A hapten inhibition assay is another preferred competitive assay. In this assay a known analyte, in this case any of the polypeptides of the invention is immobilized on a solid substrate. A known amount of antibody selective for any of the polypeptides of the invention is added to the sample, and the sample is then contacted with the immobilized quantity of the polypeptides of the invention. In this case, the amount of antibody selective for any of the polypeptides of the invention that is bound to the immobilized quantity of any of the polypeptides of the invention is proportional to the amount of actual polypeptides of the invention present in the sample. Again the amount of immobilized antibody may be detected by detecting either the immobilized fraction of antibody or the fraction of the antibody that remains in solution. Detection may be direct wherein the antibody is labeled or indirect by the subsequent addition of a labeled moiety that specifically binds to the antibody as described above.

5.13.6 Reduction of Non-Specific Binding

[0223] One of skill in the art will appreciate that it is often desirable to reduce non-specific binding in immunoassays. Particularly, where the assay involves an antigen or antibody immobilized on a solid substrate it is desirable to minimize the amount of non-specific binding to the substrate. Means of reducing such non-specific binding are well known to those of skill in the art. Typically, this involves coating the substrate with a proteinaceous composition. In particular, protein compositions such as bovine serum albumin (BSA), nonfat powdered milk, and gelatin are widely used with powdered milk being most preferred.

5.13.7 Other Assay Formats

[0224] Western blot (immunoblot) analysis can also be used to detect and quantify the presence of any of the polypeptides of the invention in the sample. The technique generally comprises separating sample proteins by gel electrophoresis on the basis of molecular weight, transferring the separated proteins to a suitable solid support, (such as a nitrocellulose filter, a nylon filter, or derivatized nylon filter), and incubating the sample with an antibody that specifically binds one of the polypeptides of the invention. These antibodies may be directly labeled or alternatively may be subsequently detected using labeled antibodies (e.g. labeled sheep anti-mouse antibodies) that specifically bind to the antibodies specific for the polypeptides of the invention.

5.13.8 Labels

[0225] The particular label or detectable group used in the assay is not a critical aspect of the invention, so long as it does not significantly interfere with the specific binding of the antibody used in the assay. The detectable group can be any material having a detectable physical or chemical property. Such detectable labels have been well-developed in the field of immunoassays and, in general, most any label useful in such methods can be applied to the present invention. Thus, a label is any composition detectable by spectroscopic, photochemical, biochemical, immunochemical, electrical, optical or chemical means. Useful labels in the present invention include magnetic beads (e.g. Dynabeads.™.), fluorescent dyes (e.g., fluorescein isothiocyanate, texas red, rhodamine, and the like), radiolabels (e.g., ³H, ¹²⁵I, ³⁵S, ¹⁴C, or ³²P), enzymes (e.g., horseradish peroxidase, alkaline phosphatase and others commonly used in an ELISA), and colorimetric labels such as colloidal gold or colored glass or plastic (e.g. polystyrene, polypropylene, latex, etc.) beads.

[0226] The label may be coupled directly or indirectly to the desired component of the assay according to methods well known in the art. As indicated above, a wide variety of labels may be used, with the choice of label depending on sensitivity required, ease of conjugation with the compound, stability requirements, available instrumentation, and disposal provisions.

[0227] Non-radioactive labels are often attached by indirect means. Generally, a ligand molecule (e.g., biotin) is covalently bound to the molecule. The ligand then binds to an anti-ligand (e.g., streptavidin) molecule which is either inherently detectable or covalently bound to a signal system, such as a detectable enzyme, a fluorescent compound, or a chemiluminescent compound. A number of ligands and anti-ligands can be used. Where a ligand has a natural anti-ligand, for example, biotin, thyroxine, and cortisol, it can be used in conjunction with the labeled, naturally occurring anti-ligands. Alternatively, any haptenic or antigenic compound can be used in combination with an antibody.

[0228] The molecules can also be conjugated directly to signal generating compounds, e.g., by conjugation with an enzyme or fluorophore. Enzymes of interest as labels will primarily be hydrolases, particularly phosphatases, esterases and glycosidases, or oxidoreductases, particularly peroxidases. Fluorescent compounds include fluorescein and its derivatives, rhodamine and its derivatives, dansyl, umbelliferone, etc. Chemiluminescent compounds include luciferin, and 2,3-dihydrophthalazinediones, e.g., luminol. For a review of various labeling or signal producing systems which may be used, see, U.S. Pat. No. 4,391,904, which is hereby incorporated herein by reference.

[0229] Means of detecting labels are well known to those of skill in the art. Thus, for example, where the label is a radioactive label, means for detection include a scintillation counter or photographic film as in autoradiography. Where the label is a fluorescent label, it may be detected by exciting the fluorochrome with the appropriate wavelength of light and detecting the resulting fluorescence. The fluorescence may be detected visually, by means of photographic film, by the use of electronic detectors such as charge coupled devices (CCDs) or photomultipliers and the like. Similarly, enzymatic labels may be detected by providing the appropriate substrates for the enzyme and detecting the resulting reaction product. Finally simple colorimetric labels may be detected simply by observing the color associated with the label. Thus, in various dipstick assays, conjugated gold often appears pink, while various conjugated beads appear the color of the bead.

[0230] Some assay formats do not require the use of labeled components. For instance, agglutination assays can be used to detect the presence of the target antibodies. In this case, antigen-coated particles are agglutinated by samples comprising the target antibodies. In this format, none of the components need be labeled and the presence of the target antibody is detected by simple visual inspection.

5.13.9 Substrates

[0231] As mentioned above, depending upon the assay, various components, including the antigen, target antibody, or anti-human antibody, may be bound to a solid surface. Many methods for immobilizing biomolecules to a variety of solid surfaces are known in the art. For instance, the solid surface may be a membrane (e.g., nitrocellulose), a microtiter dish (e.g., PVC, polypropylene, or polystyrene), a test tube (glass or plastic), a dipstick (e.g. glass, PVC, polypropylene, polystyrene, latex, and the like), a microcentrifuge tube, or a glass or plastic bead. The desired component may be covalently bound or noncovalently attached through nonspecific bonding.

[0232] A wide variety of organic and inorganic polymers, both natural and synthetic may be employed as the material for the solid surface. Illustrative polymers include polyethylene, polypropylene, poly(4-methylbutene), polystyrene, polymethacrylate, poly(ethylene terephthalate), rayon, nylon, poly(vinyl butyrate), polyvinylidene difluoride (PVDF), silicones, polyformaldehyde, cellulose, cellulose acetate, nitrocellulose, and the like. Other materials which may be employed, include paper, glasses, ceramics, metals, metalloids, semiconductive materials, cements or the like. In addition, are included substances that form gels, such as proteins (e.g., gelatins), lipopolysaccharides, silicates, agarose and polyacrylamides can be used. Polymers which form several aqueous phases, such as dextrans, polyalkylene glycols or surfactants, such as phospholipids, long chain (12-24 carbon atoms) alkyl ammonium salts and the like are also suitable. Where the solid surface is porous, various pore sizes may be employed depending upon the nature of the system.

[0233] In preparing the surface, a plurality of different materials may be employed, particularly as laminates, to obtain various properties. For example, protein coatings, such as gelatin can be used to avoid non-specific binding, simplify covalent conjugation, enhance signal detection or the like.

[0234] If covalent bonding between a compound and the surface is desired, the surface will usually be polyfunctional or be capable of being polyfunctionalized. Functional groups which may be present on the surface and used for linking can include carboxylic acids, aldehydes, amino groups, cyano groups, ethylenic groups, hydroxyl groups, mercapto groups and the like. The manner of linking a wide variety of compounds to various surfaces is well known and is amply illustrated in the literature. See, for example, Cuatrecasas, J. Biol. Chem. 245 3059 (1970) which is hereby incorporated herein by reference.

[0235] In addition to covalent bonding, various methods for noncovalently binding an assay component can be used. Noncovalent binding is typically nonspecific absorption of a compound to the surface. Typically, the surface is blocked with a second compound to prevent nonspecific binding of labeled assay components. Alternatively, the surface is designed such that it nonspecifically binds one component but does not significantly bind another. For example, a surface bearing a lectin such as Concanavalin A will bind a carbohydrate containing compound but not a labeled protein that lacks glycosylation. Various solid surfaces for use in noncovalent attachment of assay components are reviewed in U.S. Pat. Nos. 4,447,576 and 4,254,082, which are hereby incorporated herein by reference.

5.13.10 Mass Spectrometry

[0236] Levels of polypeptides can be detected also by mass spectrometry. Detection of disease biomarkers using mass spectrometry with protein biochip analysis is well known to those of skill in the art, and is detailed in: Rosty et al. Cancer Research 62: 1868 (2002), and Qu et al. Expert Rev Mol Diagn 2: 549 (2002), and are hereby incorporated herein by reference.

5.13.11 Determination of Levels of the Polypeptides of the Invention for Prediction of Preeclampsia

[0237] The preeclamptic condition is predicted by a statistically significant change in the concentration of any of the polypeptides of the invention individually or in combination in maternal blood, urine, or cervicovaginal mucous during pregnancy. Thus, the levels of any of the polypeptides of the invention individually or in combination provide an advantageous diagnostic of preeclampsia.

[0238] Baseline healthy levels of any of the polypeptides of the invention individually or in combination and levels indicative of preeclampsia may be determined by means well known to those of skill in the art. Generally this simply involves routine screening of healthy patients and patients that ultimately develop preeclampsia. Any variation between the two patient populations in the polypeptides of the invention individually or in combination that is determined by time of gestation, may be controlled by sampling uniformly at approximately the same gestational period, or alternatively, by determining blood, urine, or cervicovaginal mucous levels of the polypeptides of the invention (individually or in combination) as a function of period of gestation.

5.13.12 Quantification of the Polynucleotides of the Invention

[0239] Levels of any of the polynucleotides of the invention individually or in combination may be detected and quantified from tissue samples by any of a number of means well known to those of skill in the art. These may include analytic methods or techniques such as microarrays, PCR (polymerase chain reaction), RT-PCR (reverse transcriptase PCR), real-time PCR, TaqMan (Applied Biosystems), or Northern analysis.

5.14 Diagnostic Kits

5.14.1 Diagnostic Kits for Detection or Prediction of Preeclampsia Using any of the Polypeptides of the invention Individually or in Combination

[0240] The present invention provides for kits for the diagnosis of women at risk for preeclampsia. The kits preferably include one or more antibodies that specifically bind to the polypeptides of the invention. The antibodies may be free or immobilized on a solid support such as a test tube, a microtiter plate, a dipstick and the like. The kit may also contain instructional materials teaching the use of the antibody in an assay for the detection of a predilection to preeclampsia.

[0241] Additionally, the kit may contain one or more second antibodies that specifically bind to one of the polypeptides of the invention or alternatively, the first antibody. The second antibody may be labeled, or alternatively, the kit may contain a labeled third antibody that specifically binds the second antibody. The kit may also contain appropriate control series of any of the polypeptides of the invention, buffer solutions, positive and negative controls, washing solutions, dilution buffers and the like for the preparation and analysis of any of the polypeptides of the invention in samples derived from tissues, including blood plasma, blood serum, urine, or cervicovaginal mucous.

5.14.2 Diagnostic Kits for Detection or Prediction of Preeclampsia Using any of the Polynucleotides of the Invention Individually or in Combination

[0242] The present invention also provides for kits for the diagnosis of women at risk for preeclampsia. The kits preferably include one or more pairs of primers that specifically hybridize to the polynucleotides of the invention plus reagents well known to those of skill in the art for polymerase chain reaction (PCR) amplification of the polynucleotides of the invention, for example Medhurst et al. Methods Mol Med. 2003;79:229 and Dotsch et al. Expert Rev Mol Diagn. 2001 Jul.; 1(2):233.

[0243] Another preferred embodiment of the diagnostic kit for detection of preeclampsia using polynucleotides of the invention individually or in combination, is a microarray detection kit. Said microarray is comprised of a solid surface onto which single or double stranded polynucleotides of the invention are chemically or physically bonded or attached. Detection of levels of the polynucleotides of the invention are quantified by hybidization of the polynucleotides of the invention derived from tissue samples with like polynucleotides of the invention attached onto said solid surface. Either the polynucleotides of the invention derived from tissues or attached onto the solid surface may be attached to a detection label, for example Cy3 or Cy5 dyes (Amersham, Piscataway, N.J.). Microarray techniques are well known to those of skill in the art, and are detailed in Iyer V R, et al. (1999) Science 283(5398):83-7 and Whitney A R, et al. (2003). Proc Natl Acad Sci USA 100(4): 1896-901, hereby incorporated herein by reference.

5.15 Therapeutic Methods

[0244] The compositions (including polypeptide fragments, analogs, variants and antibodies or other binding partners or modulators including antisense polynucleotides) of the invention have applications in the treatment of preeclampsia.

5.15.1 Example

[0245] One embodiment of the invention is the administration of an effective amount of the one or more of the polypeptides or other composition of the invention to individuals affected by preeclampsia that can be modulated by regulating the peptides of the invention. While the mode of administration is not particularly important, parenteral administration is preferred. An exemplary mode of administration is to deliver an intravenous bolus. The dosage of polypeptides of the invention or other composition of the invention will normally be determined by the prescribing physician. It is to be expected that the dosage will vary according to the age, weight, condition and response of the individual patient. Typically, the amount of polypeptide administered per dose will be in the range of about 0.01 μg/kg to 100 mg/kg of body weight, with the preferred dose being about 0.1 μg/kg to 10 mg/kg of patient body weight. For parenteral administration, polypeptides of the invention or other composition of the invention will be formulated in an injectable form combined with a pharmaceutically acceptable parenteral vehicle. Such vehicles are well known in the art and examples include water, saline, Ringer's solution, dextrose solution, and solutions consisting of small amounts of the human serum albumin. The vehicle may contain minor amounts of additives that maintain the isotonicity and stability of the polypeptide or other active ingredient. The preparation of such solutions is within the skill of the art.

5.16 Pharmaceutical Formulations and Routes of Administration

[0246] A polypeptide or other composition of the present invention (from whatever source derived, including without limitation from recombinant and non-recombinant sources and including antibodies and other binding partners of the polypeptides of the invention) may be administered to a patient in need, by itself, or in pharmaceutical compositions where it is mixed with suitable carriers or excipient(s) at doses to treat or ameliorate a variety of disorders. Such a composition may optionally contain (in addition to protein or other active ingredient and a carrier) diluents, fillers, salts, buffers, stabilizers, solubilizers, and other materials well known in the art. The term “pharmaceutically acceptable” means a non-toxic material that does not interfere with the effectiveness of the biological activity of the active ingredient(s). The characteristics of the carrier will depend on the route of administration. The pharmaceutical composition of the invention may also contain cytokines, lymphokines, or other hematopoietic factors such as M-CSF, GM-CSF, TNF, IL-1, IL-2, IL-3, IL-4, IL-5, IL-6, IL-7, IL-8, IL-9, IL-10, IL-11, IL-12, IL-13, IL-14, IL-15, IFN, TNF0, TNF1, TNF2, G-CSF, Meg-CSF, thrombopoietin, stem cell factor, and erythropoietin. In further compositions, proteins of the invention may be combined with other agents beneficial to the treatment of the disease or disorder in question. These agents include various growth factors such as epidermal growth factor (EGF), platelet-derived growth factor (PDGF), transforming growth factors (TGF-α and TGF-β), insulin-like growth factor (IGF), as well as cytokines described herein.

[0247] The pharmaceutical composition may further contain other agents which either enhance the activity of the protein or other active ingredient or complement its activity or use in treatment. Such additional factors and/or agents may be included in the pharmaceutical composition to produce a synergistic effect with protein or other active ingredient of the invention, or to minimize side effects. Conversely, protein or other active ingredient of the present invention may be included in formulations of the particular clotting factor, cytokine, lymphokine, other hematopoietic factor, thrombolytic or anti-thrombotic factor, or anti-inflammatory agent to minimize side effects of the clotting factor, cytokine, lymphokine, other hematopoietic factor, thrombolytic or anti-thrombotic factor, or anti-inflammatory agent (such as IL-IRa, IL-1 Hy1, IL-1 Hy2, anti-TNF, corticosteroids, immunosuppressive agents). A protein of the present invention may be active in multimers (e.g., heterodimers or homodimers) or complexes with itself or other proteins. As a result, pharmaceutical compositions of the invention may comprise a protein of the invention in such multimeric or complexed form.

[0248] As an alternative to being included in a pharmaceutical composition of the invention including a first protein, a second protein or a therapeutic agent may be concurrently administered with the first protein (e.g., at the same time, or at differing times provided that therapeutic concentrations of the combination of agents is achieved at the treatment site). Techniques for formulation and administration of the compounds of the instant application may be found in “Remington's Pharmaceutical Sciences,” Mack Publishing Co., Easton, Pa., latest edition. A therapeutically effective dose further refers to that amount of the compound sufficient to result in amelioration of symptoms, e.g., treatment, healing, prevention or amelioration of the relevant medical condition, or an increase in rate of treatment, healing, prevention or amelioration of such conditions. When applied to an individual active ingredient, administered alone, a therapeutically effective dose refers to that ingredient alone. When applied to a combination, a therapeutically effective dose refers to combined amounts of the active ingredients that result in the therapeutic effect, whether administered in combination, serially or simultaneously.

[0249] In practicing the method of treatment or use of the present invention, a therapeutically effective amount of protein or other active ingredient of the present invention is administered to a mammal having a condition to be treated. Protein or other active ingredient of the present invention may be administered in accordance with the method of the invention either alone or in combination with other therapies such as treatments employing cytokines, lymphokines or other hematopoietic factors. When co-administered with one or more cytokines, lymphokines or other hematopoietic factors, protein or other active ingredient of the present invention may be administered either simultaneously with the cytokine(s), lymphokine(s), other hematopoietic factor(s), thrombolytic or anti-thrombotic factors, or sequentially. If administered sequentially, the attending physician will decide on the appropriate sequence of administering protein or other active ingredient of the present invention in combination with cytokine(s), lymphokine(s), other hematopoietic factor(s), thrombolytic or anti-thrombotic factors.

5.16.1 Routes of Administration

[0250] Suitable routes of administration may, for example, include oral, rectal, transmucosal, or intestinal administration; parenteral delivery, including intramuscular, subcutaneous, intramedullary injections, as well as intrathecal, direct intraventricular, intravenous, intraperitoneal, intranasal, or intraocular injections. Administration of protein or other active ingredient of the present invention used in the pharmaceutical composition or to practice the method of the present invention can be carried out in a variety of conventional ways, such as oral ingestion, inhalation, topical application or cutaneous, subcutaneous, intraperitoneal, parenteral or intravenous injection. Intravenous administration to the patient is preferred.

[0251] Alternately, one may administer the compound in a local rather than systemic manner, for example, via injection of the compound directly into the amniotic cavity or placental tissue, often in a depot or sustained release formulation. Furthermore, one may administer the drug in a targeted drug delivery system, for example, in a liposome coated with a specific antibody, targeting, for example, placental tissue. The liposomes will be targeted to and taken up selectively by the afflicted tissue.

[0252] The polypeptides of the invention are administered by any route that delivers an effective dosage to the desired site of action. The determination of a suitable route of administration and an effective dosage for a particular indication is within the level of skill in the art. Suitable dosage ranges for the polypeptides of the invention can be extrapolated from these dosages or from similar studies in appropriate animal models. Dosages can then be adjusted as necessary by the clinician to provide maximal therapeutic benefit.

5.16.2 Compositions and Formulations

[0253] Pharmaceutical compositions for use in accordance with the present invention thus may be formulated in a conventional manner using one or more physiologically acceptable carriers comprising excipients and auxiliaries which facilitate processing of the active compounds into preparations which can be used pharmaceutically. These pharmaceutical compositions may be manufactured in a manner that is itself known, e.g., by means of conventional mixing, dissolving, granulating, dragee-making, levigating, emulsifying, encapsulating, entrapping or lyophilizing processes. Proper formulation is dependent upon the route of administration chosen. When a therapeutically effective amount of protein or other active ingredient of the present invention is administered orally, protein or other active ingredient of the present invention will be in the form of a tablet, capsule, powder, solution or elixir. When administered in tablet form, the pharmaceutical composition of the invention may additionally contain a solid carrier such as a gelatin or an adjuvant. The tablet, capsule, and powder contain from about 5 to 95% protein or other active ingredient of the present invention, and preferably from about 25 to 90% protein or other active ingredient of the present invention. When administered in liquid form, a liquid carrier such as water, petroleum, oils of animal or plant origin such as peanut oil, mineral oil, soybean oil, or sesame oil, or synthetic oils may be added. The liquid form of the pharmaceutical composition may further contain physiological saline solution, dextrose or other saccharide solution, or glycols such as ethylene glycol, propylene glycol or polyethylene glycol. When administered in liquid form, the pharmaceutical composition contains from about 0.5 to 90% by weight of protein or other active ingredient of the present invention, and preferably from about 1 to 50% protein or other active ingredient of the present invention.

[0254] When a therapeutically effective amount of protein or other active ingredient of the present invention is administered by intravenous, cutaneous or subcutaneous injection, protein or other active ingredient of the present invention will be in the form of a pyrogen-free, parenterally acceptable aqueous solution. The preparation of such parenterally acceptable protein or other active ingredient solutions, having due regard to pH, isotonicity, stability, and the like, is within the skill in the art. A preferred pharmaceutical composition for intravenous, cutaneous, or subcutaneous injection should contain, in addition to protein or other active ingredient of the present invention, an isotonic vehicle such as Sodium Chloride Injection, Ringer's Injection, Dextrose Injection, Dextrose and Sodium Chloride Injection, Lactated Ringer's Injection, or other vehicle as known in the art. The pharmaceutical composition of the present invention may also contain stabilizers, preservatives, buffers, antioxidants, or other additives known to those of skill in the art. For injection, the agents of the invention may be formulated in aqueous solutions, preferably in physiologically compatible buffers such as Hanks's solution, Ringer's solution, or physiological saline buffer. For transmucosal administration, penetrants appropriate to the barrier to be permeated are used in the formulation. Such penetrants are generally known in the art.

[0255] For oral administration, the compounds can be formulated readily by combining the active compounds with pharmaceutically acceptable carriers well known in the art. Such carriers enable the compounds of the invention to be formulated as tablets, pills, dragees, capsules, liquids, gels, syrups, slurries, suspensions and the like, for oral ingestion by a patient to be treated. Pharmaceutical preparations for oral use can be obtained solid excipient, optionally grinding a resulting mixture, and processing the mixture of granules, after adding suitable auxiliaries, if desired, to obtain tablets or dragee cores. Suitable excipients are, in particular, fillers such as sugars, including lactose, sucrose, mannitol, or sorbitol; cellulose preparations such as, for example, maize starch, wheat starch, rice starch, potato starch, gelatin, gum tragacanth, methyl cellulose, hydroxypropylmethyl-cellulose, sodium carboxymethylcellulose, and/or polyvinylpyrrolidone (PVP). If desired, disintegrating agents may be added, such as the cross-linked polyvinyl pyrrolidone, agar, or alginic acid or a salt thereof such as sodium alginate. Dragee cores are provided with suitable coatings. For this purpose, concentrated sugar solutions may be used, which may optionally contain gum arabic, talc, polyvinyl pyrrolidone, carbopol gel, polyethylene glycol, and/or titanium dioxide, lacquer solutions, and suitable organic solvents or solvent mixtures. Dyestuffs or pigments may be added to the tablets or dragee coatings for identification or to characterize different combinations of active compound doses.

[0256] Pharmaceutical preparations which can be used orally include push-fit capsules made of gelatin, as well as soft, sealed capsules made of gelatin and a plasticizer, such as glycerol or sorbitol. The push-fit capsules can contain the active ingredients in admixture with filler such as lactose, binders such as starches, and/or lubricants such as talc or magnesium stearate and, optionally, stabilizers. In soft capsules, the active compounds may be dissolved or suspended in suitable liquids, such as fatty oils, liquid paraffin, or liquid polyethylene glycols. In addition, stabilizers may be added. All formulations for oral administration should be in dosages suitable for such administration. For buccal administration, the compositions may take the form of tablets or lozenges formulated in conventional manner.

[0257] For administration by inhalation, the compounds for use according to the present invention are conveniently delivered in the form of an aerosol spray presentation from pressurized packs or a nebuliser, with the use of a suitable propellant, e.g., dichlorodifluoromethane, trichlorofluoromethane, dichlorotetrafluoroethane, carbon dioxide or other suitable gas. In the case of a pressurized aerosol the dosage unit may be determined by providing a valve to deliver a metered amount. Capsules and cartridges of, e.g., gelatin for use in an inhaler or insufflator may be formulated containing a powder mix of the compound and a suitable powder base such as lactose or starch. The compounds may be formulated for parenteral administration by injection, e.g., by bolus injection or continuous infusion. Formulations for injection may be presented in unit dosage form, e.g., in ampules or in multi-dose containers, with an added preservative. The compositions may take such forms as suspensions, solutions or emulsions in oily or aqueous vehicles, and may contain formulatory agents such as suspending, stabilizing and/or dispersing agents.

[0258] Pharmaceutical formulations for parenteral administration include aqueous solutions of the active compounds in water-soluble form. Additionally, suspensions of the active compounds may be prepared as appropriate oily injection suspensions. Suitable lipophilic solvents or vehicles include fatty oils such as sesame oil, or synthetic fatty acid esters, such as ethyl oleate or triglycerides, or liposomes. Aqueous injection suspensions may contain substances which increase the viscosity of the suspension, such as sodium carboxymethyl cellulose, sorbitol, or dextran. Optionally, the suspension may also contain suitable stabilizers or agents which increase the solubility of the compounds to allow for the preparation of highly concentrated solutions. Alternatively, the active ingredient may be in powder form for constitution with a suitable vehicle, e.g., sterile pyrogen-free water, before use.

[0259] The compounds may also be formulated in rectal compositions such as suppositories or retention enemas, e.g., containing conventional suppository bases such as cocoa butter or other glycerides. In addition to the formulations described previously, the compounds may also be formulated as a depot preparation. Such long acting formulations may be administered by implantation (for example subcutaneously or intramuscularly) or by intramuscular injection. Thus, for example, the compounds may be formulated with suitable polymeric or hydrophobic materials (for example as an emulsion in an acceptable oil) or ion exchange resins, or as sparingly soluble derivatives, for example, as a sparingly soluble salt.

[0260] A pharmaceutical carrier for the hydrophobic compounds of the invention is a co-solvent system comprising benzyl alcohol, a nonpolar surfactant, a water-miscible organic polymer, and an aqueous phase. The co-solvent system may be the VPD co-solvent system. VPD is a solution of 3% w/v benzyl alcohol, 8% w/v of the nonpolar surfactant polysorbate 80, and 65% w/v polyethylene glycol 300, made up to volume in absolute ethanol. The VPD co-solvent system (VPD:5W) consists of VPD diluted 1:1 with a 5% dextrose in water solution. This co-solvent system dissolves hydrophobic compounds well, and itself produces low toxicity upon systemic administration. Naturally, the proportions of a co-solvent system may be varied considerably without destroying its solubility and toxicity characteristics. Furthermore, the identity of the co-solvent components may be varied: for example, other low-toxicity nonpolar surfactants may be used instead of polysorbate 80; the fraction size of polyethylene glycol may be varied; other biocompatible polymers may replace polyethylene glycol, e.g. polyvinyl pyrrolidone; and other sugars or polysaccharides may substitute for dextrose. Alternatively, other delivery systems for hydrophobic pharmaceutical compounds may be employed. Liposomes and emulsions are well known examples of delivery vehicles or carriers for hydrophobic drugs. Certain organic solvents such as dimethylsulfoxide also may be employed, although usually at the cost of greater toxicity. Additionally, the compounds may be delivered using a sustained-release system, such as semipermeable matrices of solid hydrophobic polymers containing the therapeutic agent. Various types of sustained-release materials have been established and are well known by those skilled in the art. Sustained-release capsules may, depending on their chemical nature, release the compounds for a few weeks up to over 100 days. Depending on the chemical nature and the biological stability of the therapeutic reagent, additional strategies for protein or other active ingredient stabilization may be employed.

[0261] The pharmaceutical compositions also may comprise suitable solid or gel phase carriers or excipients. Examples of such carriers or excipients include but are not limited to calcium carbonate, calcium phosphate, various sugars, starches, cellulose derivatives, gelatin, and polymers such as polyethylene glycols. Many of the active ingredients of the invention may be provided as salts with pharmaceutically compatible counter ions. Such pharmaceutically acceptable base addition salts are those salts which retain the biological effectiveness and properties of the free acids and which are obtained by reaction with inorganic or organic bases such as sodium hydroxide, magnesium hydroxide, ammonia, trialkylamine, dialkylamine, monoalkylamine, dibasic amino acids, sodium acetate, potassium benzoate, triethanol amine and the like.

[0262] The pharmaceutical composition of the invention may be in the form of a complex of the protein(s) or other active ingredient of present invention along with protein or peptide antigens. The protein and/or peptide antigen will deliver a stimulatory signal to both B and T lymphocytes. B lymphocytes will respond to antigen through their surface immunoglobulin receptor. T lymphocytes will respond to antigen through the T cell receptor (TCR) following presentation of the antigen by NMC proteins. MHC and structurally related proteins including those encoded by class I and class II MHC genes on host cells will serve to present the peptide antigen(s) to T lymphocytes. The antigen components could also be supplied as purified MHC-peptide complexes alone or with co-stimulatory molecules that can directly signal T cells. Alternatively antibodies able to bind surface immunoglobulin and other molecules on B cells as well as antibodies able to bind the TCR and other molecules on T cells can be combined with the pharmaceutical composition of the invention.

[0263] The pharmaceutical composition of the invention may be in the form of a liposome in which protein of the present invention is combined, in addition to other pharmaceutically acceptable carriers, with amphipathic agents such as lipids which exist in aggregated form as micelles, insoluble monolayers, liquid crystals, or lamellar layers in aqueous solution. Suitable lipids for liposomal formulation include, without limitation, monoglycerides, diglycerides, sulfatides, lysolecithins, phospholipids, saponin, bile acids, and the like. Preparation of such liposomal formulations is within the level of skill in the art, as disclosed, for example, in U.S. Pat. Nos. 4,235,871; 4,501,728; 4,837,028; and 4,737,323, all of which are hereby incorporated herein by reference.

[0264] The amount of protein or other active ingredient of the present invention in the pharmaceutical composition of the present invention will depend upon the nature and severity of the condition being treated, and on the nature of prior treatments which the patient has undergone. Ultimately, the attending physician will decide the amount of protein or other active ingredient of the present invention with which to treat each individual patient. Initially, the attending physician will administer low doses of protein or other active ingredient of the present invention and observe the patient's response. Larger doses of protein or other active ingredient of the present invention may be administered until the optimal therapeutic effect is obtained for the patient, and at that point the dosage is not increased further. It is contemplated that the various pharmaceutical compositions used to practice the method of the present invention should contain about 0.01 μg to about 100 mg (preferably about 0.1 μg to about 10 mg, more preferably about 0.1 μg to about 1 mg) of protein or other active ingredient of the present invention per kg body weight. When administered, the therapeutic composition for use in this invention is, of course, in a pyrogen-free, physiologically acceptable form. Further, the composition may desirably be encapsulated or injected in a viscous form for delivery to the site of bone, cartilage or tissue damage. Therapeutically useful agents other than a protein or other active ingredient of the invention which may also optionally be included in the composition as described above, may alternatively or additionally, be administered simultaneously or sequentially with the composition in the methods of the invention.

[0265] The therapeutic compositions are also presently valuable for veterinary applications. Particularly domestic animals and thoroughbred horses, in addition to humans, are desired patients for such treatment with proteins or other active ingredient of the present invention. The dosage regimen of a protein-containing pharmaceutical composition to be used will be determined by the attending physician considering various factors which modify the action of the proteins, e.g., the patient's age, sex, and diet, the severity of any infection, time of administration and other clinical factors. The dosage may vary with the type protein used in co-administration. For example, the addition of other known protein factors, cytokines or the like to the final composition, may also affect the dosage. Progress can be monitored by periodic assessment of symptoms (for example high blood pressure).

[0266] Polynucleotides of the present invention can also be used for gene therapy. Such polynucleotides can be introduced either in vivo or ex vivo into cells for expression in a mammalian subject. Polynucleotides of the invention may also be administered by other known methods for introduction of nucleic acid into a cell or organism (including, without limitation, in the form of viral vectors or naked DNA). Cells may also be cultured ex vivo in the presence of proteins of the present invention in order to proliferate or to produce a desired effect on or activity in such cells. Treated cells can then be introduced in vivo for therapeutic purposes.

5.16.3 Effective Dosage

[0267] Pharmaceutical compositions suitable for use in the present invention include compositions wherein the active ingredients are contained in an effective amount to achieve its intended purpose. More specifically, a therapeutically effective amount means an amount effective to prevent development of or to alleviate the existing symptoms of the subject being treated (for example, high blood pressure). Determination of the effective amount is well within the capability of those skilled in the art, especially in light of the detailed disclosure provided herein. For any compound used in the method of the invention, the therapeutically effective dose can be estimated initially from appropriate in vitro assays. For example, a dose can be formulated in animal models to achieve a circulating concentration range that can be used to more accurately determine useful doses in humans. For example, a dose can be formulated in animal models to achieve a circulating concentration range that includes the IC₅₀ as determined in cell culture (i.e., the concentration of the test compound which achieves a half-maximal inhibition of the protein's biological activity). Such information can be used to more accurately determine useful doses in humans.

[0268] A therapeutically effective dose refers to that amount of the compound that results in amelioration of symptoms or a prolongation of survival in a patient. Toxicity and therapeutic efficacy of such compounds can be determined by standard pharmaceutical procedures in cell cultures or experimental animals, e.g., for determining the LD₅₀ (the dose lethal to 50% of the population) and the ED₅₀ (the dose therapeutically effective in 50% of the population). The dose ratio between toxic and therapeutic effects is the therapeutic index and it can be expressed as the ratio between LD₅₀ and ED₅₀. Compounds which exhibit high therapeutic indices are preferred. The data obtained from these cell culture assays and animal studies can be used in formulating a range of dosage for use in human. The dosage of such compounds lies preferably within a range of circulating concentrations that include the ED₅₀ with little or no toxicity. The dosage may vary within this range depending upon the dosage form employed and the route of administration utilized. The exact formulation, route of administration and dosage can be chosen by the individual physician in view of the patient's condition. See, e.g., Fingl et al., 1975, in “The Pharmacological Basis of Therapeutics”, Ch. 1 p.1. Dosage amount and interval may be adjusted individually to provide plasma levels of the active moiety which are sufficient to maintain the desired effects, or minimal effective concentration (MEC). The MEC will vary for each compound but can be estimated from in vitro data. Dosages necessary to achieve the MEC will depend on individual characteristics and route of administration. However, HPLC assays or bioassays can be used to determine plasma concentrations.

[0269] Dosage intervals can also be determined using MEC value. Compounds should be administered using a regimen that maintains plasma levels above the MEC for 10-90% of the time, preferably between 30-90% and most preferably between 50-90%. In cases of local administration or selective uptake, the effective local concentration of the drug may not be related to plasma concentration.

[0270] An exemplary dosage regimen for polypeptides or other compositions of the invention will be in the range of about 0.01 μg/kg to 100 mg/kg of body weight daily, with the preferred dose being about 0.1 μg/kg to 25 mg/kg of patient body weight daily, varying in adults and children. Dosing may be once daily, or equivalent doses may be delivered at longer or shorter intervals.

[0271] The amount of composition administered will, of course, be dependent on the subject being treated, on the subject's age and weight, the severity of the affliction, the manner of administration and the judgment of the prescribing physician.

5.16.4 Packaging

[0272] The compositions may, if desired, be presented in a pack or dispenser device which may contain one or more unit dosage forms containing the active ingredient. The pack may, for example, comprise metal or plastic foil, such as a blister pack. The pack or dispenser device may be accompanied by instructions for administration. Compositions comprising a compound of the invention formulated in a compatible pharmaceutical carrier may also be prepared, placed in an appropriate container, and labeled for treatment of an indicated condition.

5.17 Examples

[0273] The present invention is illustrated in the following examples. Upon consideration of the present disclosure, one of skill in the art will appreciate that many other embodiments and variations may be made in the scope of the present invention. Accordingly, it is intended that the broader aspects of the present invention not be limited to the disclosure of the following examples. The present invention is not to be limited in scope by the exemplified embodiments which are intended as illustrations of single aspects of the invention, and compositions and methods which are functionally equivalent are within the scope of the invention. Indeed, numerous modifications and variations in the practice of the invention are expected to occur to those skilled in the art upon consideration of the present preferred embodiments. Consequently, the only limitations which should be placed upon the scope of the invention are those which appear in the appended claims.

[0274] All references cited within the body of the instant specification are hereby incorporated by reference in their entirety.

### EXAMPLES

### Example 1

### Isolation of SEQ ID NO: 1 through 852 from a cDNA Libraries of Human Cells

[0275] The novel nucleic acids of SEQ ID NO: 1 through 852 were obtained from several human normal and pre-eclamptic placental cDNA libraries using standard PCR, sequencing by hybridization sequence signature analysis, and Sanger sequencing techniques. The inserts of the library were amplified with PCR using primers specific for vector sequences flanking the inserts. These samples were spotted onto nylon membranes and interrogated with oligonucleotide probes to give sequence signatures. The clones were clustered into groups of similar or identical sequences, and single representative clones were selected from each group for gel sequencing. The 5′ sequence of the amplified inserts were then deduced using the reverse M13 sequencing primer in a typical Sanger sequencing protocol. PCR products were purified and subjected to fluorescent dye terminator cycle sequencing. Single-pass gel sequencing was done using a 377 Applied Biosystems (ABI) sequencer. These inserts was identified as a novel sequence not previously obtained from this library and not previously reported in public databases. These sequences are designated as SEQ ID NO: 1 through 852 in the attached sequence listing.

### Example 2

### Assemblage OF SEQ ID NO: 1 Through 852

[0276] The nucleic acids (SEQ ID NO: 1 through 852) of the invention were assembled from sequences that were obtained from various cDNA libraries by methods described in Example 1 above, and in some cases obtained from one or more public databases. The final sequence was assembled using the EST sequence as seed. Then a recursive algorithm was used to extend the seed into an extended assemblage, by pulling additional sequences from different databases (i.e. Nuvelo's database containing EST sequences, dbEST, gb pri, and UniGene) that belong to this assemblage. The algorithm terminated when there was no additional sequences from the above databases that would extend the assemblage. Inclusion of component sequences into the assemblage was based on a BLASTN hit to the extending assemblage with BLAST score greater than 300 and percent identity greater than 95%.

[0277] The nearest neighbor results for the assembled contigs (SEQ ID NO: 1-852) were obtained by using the BLASTN algorithm against the nucleotide (nt) database from Genbank (National Center for Biotechnology Information http://www.ncbi.nlm.nih.gov). The nucleotide database used was the version as of Dec. 30, 2002. The nearest neighbor results for the polypeptides (SEQ ID NO: 853-1704) corresponding to the assembled contigswere obtained by a FASTA search against Genpept, using FASTXY algorithm. FASTXY is an improved version of FASTA alignment that allows in-codon frame shifts. The version of the Genpept database was the version as of Jan. 10, 2003. The nearest neighbor results showed the closest homologue for each assemblage from Genpept (and contain the translated amino acid sequences for which the assemblages encodes SEQ ID NO 853 through 1704). The predicted amino acid sequences corresponding to SEQ ID NO: 1 through 852 were obtained by using a software program called FASTY (available from http://fasta:bioch.virginia.edu) which selects a polypeptide based on a comparison of translated novel polynucleotide to known polynucleotides (W. R. Pearson, Methods in Enzymology, 183:63-98 (1990), incorporated herein by reference). For ease of creating SEQ ID Numbers, the following formula was used: nucleotide SEQ ID NO added to 852. (For Example, the polypeptide corresponding to nucleotide SEQ ID NO 1 is SEQ ID NO 853).

[0278] The nearest neighbor results for both the nucleotide contigs (SEQ ID NO 1 through 852) and corresponding polypeptides (SEQ ID NO 853 through 1704) are set forth below. In some cases, no nearest neighbor result could be determined, and therefore are excluded from the following table.

TABLE 1

| SEQ | Genbank | | | | |
|---|---|---|---|---|---|
| ID | Accesssion | BLAST | Percent | | |
| NO: | Number | Score | Identity | Annotation | Organism |
| 1 | AF090949 | 1710 | 97 | HBV-X associated protein 2 | Cercopithecus |
| | | | | | aethiops |
| 1 | U31913 | 1736 | 99 | HBV-X associated protein | Homo sapiens |
| 1 | U78521 | 1740 | 100 | immunophilin homolog ARA9 | Homo sapiens |
| 2 | AAH12333 | 1168 | 100 | BC012333 Unknown (protein for | Homo sapiens |
| | | | | MGC: 2084) | |
| 2 | AF187981_1 | 1168 | 100 | AF187981 delta7-sterol-C5- | Homo sapiens |
| | | | | desaturase | |
| 2 | D85181 | 1273 | 100 | fungal sterol-C5-desaturase | Homo sapiens |
| | | | | homolog | |
| 4 | A84511 | 1017 | 99 | unnamed protein product | unidentified |
| 4 | AF498970_1 | 1016 | 100 | AF498970 small GTP binding | Homo sapiens |
| | | | | protein RhoA | |
| 4 | AX427410 | 1017 | 99 | unnamed protein product | unidentified |
| 5 | AAH04312 | 485 | 98 | BC004312 insulin-like growth | Homo sapiens |
| | | | | factor binding protein 2 (36 kD) | |
| 5 | AAH09902 | 485 | 98 | BC009902 Unknown (protein for | Homo sapiens |
| | | | | MGC: 2339) | |
| 5 | AAH12769 | 485 | 98 | BC012769 Unknown (protein for | Homo sapiens |
| | | | | MGC: 16256) | |
| 6 | AAH02434 | 430 | 100 | BC002434 p8 protein (candidate of | Homo sapiens |
| | | | | metastasis 1) | |
| 6 | AF069074 | 430 | 100 | P8 protein | Homo sapiens |
| 6 | AF135266_1 | 430 | 100 | AF135266 p8 protein homolog | Homo sapiens |
| 7 | AB047892 | 258 | 82 | hypothetical protein | Macaca |
| | | | | | fascicularis |
| 8 | AAH01199 | 833 | 99 | BC001199 Similar to glucose | Homo sapiens |
| | | | | regulated protein, 58 kDa | |
| 8 | AJ440721 | 833 | 99 | thioredoxin related protein | Homo sapiens |
| 8 | AL834423 | 833 | 99 | hypothetical protein | Homo sapiens |
| 9 | AAH00866 | 1124 | 100 | BC000866 tissue inhibitor of | Homo sapiens |
| | | | | metalloproteinase 1 (erythroid | |
| | | | | potentiating activity, | |
| | | | | collagenase inhibitor) | |
| 9 | M59906 | 1124 | 100 | collagenase inhibitor | Homo sapiens |
| 9 | X03124 | 1124 | 100 | precursor | Homo sapiens |
| 10 | AAH00518 | 834 | 83 | BC000518 Similar to brain acid- | Homo sapiens |
| | | | | soluble protein 1 | |
| 10 | AF039656 | 822 | 81 | neuronal tissue-enriched acidic | Homo sapiens |
| | | | | protein | |
| 10 | AF521668_1 | 516 | 59 | AF521668 CAP23 | Gallus |
| | | | | | gallus |
| 11 | AAH05931 | 733 | 100 | BC005931 hemoglobin, alpha 2 | Homo sapiens |
| 11 | AAH08572 | 733 | 100 | BC008572 hemoglobin, alpha 2 | Homo sapiens |
| 11 | BC032122 | 733 | 100 | hemoglobin, alpha 2 | Homo sapiens |
| 12 | AF347006 | 1171 | 90 | cytochrome c oxidase subunit I | Homo sapiens |
| 12 | AF382012 | 1159 | 91 | cytochrome c oxidase subunit I | Homo sapiens |
| 12 | AF382013 | 1159 | 91 | cytochrome c oxidase subunit I | Homo sapiens |
| 13 | AF242729_1 | 1242 | 100 | AF242729 HT022 | Homo sapiens |
| 13 | AJ245874 | 1242 | 100 | putative ATG/GTP binding protein | Homo sapiens |
| 13 | AJ250344 | 1242 | 100 | hypothetical protein | Homo sapiens |
| 14 | AAH17050 | 1367 | 100 | BC017050 2,3-bisphosphoglycerate | Homo sapiens |
| | | | | mutase | |
| 14 | M23068 | 1367 | 100 | 2,3-bisphosphoglycerate | Homo sapiens |
| 14 | X04327 | 1367 | 100 | 2,3 biphosphoglycerated mutase | Homo sapiens |
| | | | | (AA 1-259) | |
| 15 | AAH02334 | 921 | 100 | BC002334 DAZ associated protein 2 | Homo sapiens |
| 15 | AAH07900 | 921 | 100 | BC007900 DAZ associated protein 2 | Homo sapiens |
| 15 | D31767 | 921 | 100 | KIAA0058 | Homo sapiens |
| 16 | AAH09571 | 308 | 98 | BC009571 Similar to stimulated by | Homo sapiens |
| | | | | retinoic acid 13 | |
| 16 | U95006 | 309 | 98 | D9 splice variant A | Homo sapiens |
| 16 | U95007 | 273 | 98 | D9 splice variant B | Homo sapiens |
| 17 | AAH11674 | 493 | 66 | BC011674 Similar to procollagen- | Homo sapiens |
| | | | | lysine, 2-oxoglutarate 5- | |
| | | | | dioxygenase 3 | |
| 17 | AC004876_4 | 493 | 66 | AC004876 lysyl hydroxylase 3 | Homo sapiens |
| 17 | AF207069 | 493 | 66 | lysyl hydroxylase 3 | Homo sapiens |
| 18 | AAH16765 | 1778 | 99 | BC016765 Unknown (protein for | Homo sapiens |
| | | | | MGC: 22663) | |
| 18 | AF153882_1 | 1785 | 100 | AF153882 reversion-induced LIM | Homo sapiens |
| | | | | protein | |
| 18 | AF154335_1 | 1785 | 100 | AF154335 reversion-induced LIM | Homo sapiens |
| | | | | protein | |
| 19 | AF023268 | 1150 | 74 | metaxin | Homo sapiens |
| 19 | BC023071 | 1050 | 68 | metaxin | Mus musculus |
| 19 | U46920 | 1150 | 74 | metaxin | Homo sapiens |
| 20 | AF033815 | 363 | 34 | Pr180 | Mason-Pfizer |
| | | | | | monkey virus |
| 20 | AF193053_1 | 575 | 100 | AF193053 unknown | Homo sapiens |
| 20 | Y10392 | 500 | 43 | protease | Human |
| | | | | | endogenous |
| | | | | | retrovirus K |
| 21 | AF318351_1 | 3211 | 100 | AF318351 unknown | Homo sapiens |
| 21 | AF318377_1 | 3211 | 100 | AF318377 unknown | Homo sapiens |
| 21 | AX106709 | 3211 | 100 | unnamed protein product | Homo sapiens |
| 22 | AL357374 | 2678 | 100 | bA353C18.3.2 (splicing factor | Homo sapiens |
| | | | | CC1.3, isoform 2 (CC1.4)) | |
| 22 | AY061882 | 2663 | 99 | transcription coactivator CAPER | Mus musculus |
| 22 | L10911 | 2678 | 100 | splicing factor | Homo sapiens |
| 23 | AAH08807 | 2069 | 90 | BC008807 keratin 6A | Homo sapiens |
| 23 | AAH14152 | 2069 | 90 | BC014152 Similar to keratin 6A | Homo sapiens |
| 23 | L42583 | 2069 | 90 | keratin type II | Homo sapiens |
| 24 | AK000496 | 301 | 72 | unnamed protein product | Homo sapiens |
| 24 | AK025116 | 271 | 67 | unnamed protein product | Homo sapiens |
| 24 | AK090511 | 282 | 60 | unnamed protein product | Homo sapiens |
| 25 | AAH16842 | 2431 | 99 | BC016842 Unknown (protein for | Homo sapiens |
| | | | | MGC: 10135) | |
| 25 | AK027643 | 2435 | 100 | unnamed protein product | Homo sapiens |
| 25 | AL834398 | 2529 | 99 | hypothetical protein | Homo sapiens |
| 26 | AAH02563 | 1176 | 100 | BC002563 Similar to zinc/iron | Homo sapiens |
| | | | | regulated transporter-like | |
| 26 | AAH07886 | 1176 | 100 | BC007886 Unknown (protein for | Homo sapiens |
| | | | | MGC: 14180) | |
| 26 | AAH14303 | 1176 | 100 | BC014303 Unknown (protein for | Homo sapiens |
| | | | | MGC: 16418) | |
| 27 | AF056732 | 3342 | 100 | prostaglandin transporter | Homo sapiens |
| 27 | BC041140 | 3453 | 99 | solute carrier family 21 | Homo sapiens |
| | | | | (prostaglandin transporter), | |
| | | | | member 2 | |
| 27 | U70867 | 3342 | 100 | prostaglandin transporter hPGT | Homo sapiens |
| 28 | AAH15206 | 335 | 100 | BC015206 guanine nucleotide | Homo sapiens |
| | | | | binding protein 10 | |
| 28 | AAH16319 | 335 | 100 | BC016319 guanine nucleotide | Homo sapiens |
| | | | | binding protein 10 | |
| 28 | AF493877_1 | 335 | 100 | AF493877 guanine nucleotide | Homo sapiens |
| | | | | binding protein gamma 10 | |
| 29 | D26307 | 1148 | 66 | Jun-D | Rattus |
| | | | | | norvegicus |
| 29 | X51346 | 1419 | 97 | jun-D gene product (AA 1-303) | Homo sapiens |
| 29 | X56681 | 1388 | 96 | junD protein | Homo sapiens |
| 30 | AY081680 | 693 | 100 | chlorophyll a/b-binding protein | Arabidopsis |
| | | | | CP29 | thaliana |
| 30 | AY133566 | 693 | 100 | At5g01530/F7A7_50 | Arabidopsis |
| | | | | | thaliana |
| 30 | BT000363 | 693 | 100 | chlorophyll a/b-binding protein | Arabidopsis |
| | | | | CP29 | thaliana |
| 31 | AY086905 | 622 | 100 | photosystem II type I | Arabidopsis |
| | | | | chlorophyll a/b binding protein, | thaliana |
| | | | | putative | |
| 31 | AY128345 | 622 | 100 | photosystem II type I chlorophyll | Arabidopsis |
| | | | | a/b binding protein, putative | thaliana |
| 31 | BT000726 | 622 | 100 | putative photosystem II type I | Arabidopsis |
| | | | | chlorophyll a/b binding protein | thaliana |
| 32 | AF177203_1 | 847 | 98 | AF177203 cerebral cell adhesion | Homo sapiens |
| | | | | molecule | |
| 32 | AK074519 | 872 | 100 | unnamed protein product | Homo sapiens |
| 32 | AK074523 | 872 | 100 | unnamed protein product | Homo sapiens |
| 33 | AY050935 | 497 | 100 | putative photosystem II type I | Arabidopsis |
| | | | | chlorophyll a/b binding protein | thaliana |
| 33 | AY058180 | 497 | 100 | At1g29930/F1N18_23 | Arabidopsis |
| | | | | | thaliana |
| 33 | AY091169 | 497 | 100 | putative chlorophyll a/b-binding | Arabidopsis |
| | | | | protein | thaliana |
| 34 | AF178954 | 2149 | 88 | monocarboxylate transporter 4 | Mus musculus |
| 34 | U81800 | 2399 | 100 | monocarboxylate transporter | Homo sapiens |
| 34 | U87627 | 2164 | 88 | putative monocarboxylate | Rattus |
| | | | | transporter | norvegicus |
| 35 | AAH18345 | 173 | 100 | BC018345 Unknown (protein for | Homo sapiens |
| | | | | MGC: 8802) | |
| 35 | AF237776_1 | 173 | 100 | AF237776 MAP kinase-interacting | Homo sapiens |
| | | | | kinase 2b | |
| 35 | AL137565 | 173 | 100 | hypothetical protein | Homo sapiens |
| 36 | AF006013 | 3773 | 99 | dishevelled 3 | Homo sapiens |
| 36 | BC032459 | 3784 | 99 | dishevelled, dsh homolog 3 | Homo sapiens |
| | | | | (Drosophila) | |
| 36 | U75651 | 3806 | 100 | dishevelled 3 | Homo sapiens |
| 37 | AK000268 | 2659 | 100 | unnamed protein product | Homo sapiens |
| 37 | AK053678 | 1598 | 71 | unnamed protein product | Mus musculus |
| 37 | L00193 | 1342 | 58 | epidermal keratin subunit I | Mus musculus |
| 38 | AX354357 | 840 | 100 | unnamed protein product | Homo sapiens |
| 38 | BC002198 | 243 | 42 | Similar to hypothetical protein | Mus musculus |
| | | | | FLJ20093 | |
| 38 | BC039642 | 658 | 75 | Unknown (protein for | Mus musculus |
| | | | | IMAGE: 5352548) | |
| 39 | AF012348 | 857 | 84 | smooth muscle gamma actin | Gallus |
| | | | | | gallus |
| 39 | S63494 | 857 | 84 | gamma-actin | Gallus |
| | | | | | gallus |
| 39 | U20365 | 857 | 84 | smooth muscle gamma-actin | Mus musculus |
| 40 | AB023209 | 2102 | 61 | KIAA0992 protein | Homo sapiens |
| 40 | AF077041_1 | 2057 | 100 | AF077041 SIH002 | Homo sapiens |
| 40 | AF151909_1 | 2161 | 100 | AF151909 CGI-151 protein | Homo sapiens |
| 41 | AF287271_1 | 714 | 100 | AF287271 ribosomal protein L23 | Mus musculus |
| 41 | AF401577_1 | 714 | 100 | AF401577 ribosomal protein L23 | Ictalurus |
| | | | | | punctatus |
| 41 | BC025918 | 714 | 100 | ribosomal protein L23 | Mus musculus |
| 42 | U43916 | 817 | 100 | TMP | Homo sapiens |
| 42 | Y07909 | 817 | 100 | progression associated protein | Homo sapiens |
| 42 | Z50751 | 817 | 100 | B4B | Homo sapiens |
| 43 | AAH09647 | 2778 | 99 | BC009647 Unknown (protein for | Homo sapiens |
| | | | | MGC: 5096) | |
| 43 | M13078 | 2773 | 99 | alkaline phosphatase precursor | Homo sapiens |
| 43 | M19159 | 2780 | 100 | placental alkaline phosphatase-1 | Homo sapiens |
| 44 | AF326591 | 2240 | 100 | fenestrated-endothelial linked | Homo sapiens |
| | | | | structure protein | |
| 44 | AF348827 | 2232 | 99 | PV1 protein | Homo sapiens |
| 44 | AL834363 | 2304 | 99 | hypothetical protein | Homo sapiens |
| 45 | AAH11686 | 5877 | 100 | BC011686 damage-specific DNA | Homo sapiens |
| | | | | binding protein 1 (127 kD) | |
| 45 | L40326 | 5877 | 100 | X-associated protein 1 | Homo sapiens |
| 45 | U18299 | 5877 | 100 | DDBa p127 | Homo sapiens |
| 46 | U66661 | 1330 | 100 | GABA-A receptor epsilon subunit | Homo sapiens |
| 46 | Y07637 | 1330 | 100 | putative GABA-gated chloride | Homo sapiens |
| | | | | channel | |
| 46 | Y09765 | 1330 | 100 | GABA receptor epsilon subunit | Homo sapiens |
| 47 | AF380181_1 | 11506 | 99 | AF380181 SON DNA binding protein | Homo sapiens |
| | | | | isoform C | |
| 47 | AF380184_1 | 12117 | 99 | AF380184 SON DNA binding protein | Homo sapiens |
| | | | | isoform F | |
| 47 | AY026895 | 11842 | 97 | NREBP | Homo sapiens |
| 48 | A20470 | 2142 | 99 | preA-PAI-2 | synthetic |
| | | | | | construct |
| 48 | AAH12609 | 2148 | 100 | BC012609 Similar to serine (or | Homo sapiens |
| | | | | cysteine) proteinase inhibitor, | |
| | | | | clade B (ovalbumin), member 2 | |
| 48 | Y00630 | 2139 | 99 | PAI-2 precursor (AA −22 to 393) | Homo sapiens |
| 49 | AB037819 | 7936 | 100 | KIAA1398 protein | Homo sapiens |
| 49 | AL132765 | 5785 | 95 | bA462D18.3.2 (ribosome binding | Homo sapiens |
| | | | | protein 1 (dog 180 kDa homolog) | |
| | | | | (KIAA1398) (isoform 2)) | |
| 49 | X87224 | 6518 | 84 | ribosome receptor | Canis |
| | | | | | familiaris |
| 50 | AAH00716 | 1700 | 99 | BC000716 seryl-tRNA synthetase | Homo sapiens |
| 50 | D49914 | 1700 | 99 | Seryl tRNA Synthetase | Homo sapiens |
| 50 | X91257 | 1700 | 99 | seryl-tRNA synthetase | Homo sapiens |
| 51 | D29640 | 4698 | 57 | KIAA0051 | Homo sapiens |
| 51 | L33075 | 4698 | 57 | ras GTPase-activating-like | Homo sapiens |
| | | | | protein | |
| 51 | U51903 | 8003 | 100 | RasGAP-related protein | Homo sapiens |
| 52 | AAH17338 | 2576 | 99 | BC017338 fucosidase, alpha-L-1, | Homo sapiens |
| | | | | tissue | |
| 52 | M29877 | 2581 | 100 | alpha-L-fucosidase precursor (EC | Homo sapiens |
| | | | | 3.2.1.5) | |
| 52 | M80815 | 2576 | 99 | alpha-L-fucosidase | Homo sapiens |
| 53 | AAH03067 | 3601 | 100 | BC003067 growth arrest and DNA- | Homo sapiens |
| | | | | damage-inducible 34 | |
| 53 | AK001361 | 3568 | 99 | unnamed protein product | Homo sapiens |
| 53 | U83981 | 3601 | 100 | apoptosis associated protein | Homo sapiens |
| 54 | AAH02717 | 379 | 77 | BC002717 Similar to chorionic | Homo sapiens |
| | | | | somatomammotropin hormone 1 | |
| | | | | (placental lactogen) | |
| 54 | AAH05921 | 379 | 77 | BC005921 chorionic | Homo sapiens |
| | | | | somatomammotropin hormone 1 | |
| | | | | (placental lactogen) | |
| 54 | AAH20756 | 379 | 77 | BC020756 chorionic | Homo sapiens |
| | | | | somatomammotropin hormone 1 | |
| | | | | (placental lactogen) | |
| 55 | M57939 | 2349 | 100 | ribonucleoprotein antigen | Homo sapiens |
| 55 | X04654 | 2385 | 97 | 70 K protein (AA 1-614) | Homo sapiens |
| 55 | X84841 | 2349 | 100 | 68 kDa (U1) ribonucleoprotein | Homo sapiens |
| 56 | AAH09945 | 3737 | 99 | BC009945 Unknown (protein for | Homo sapiens |
| | | | | IMAGE: 4123572) | |
| 56 | AB018289 | 5502 | 100 | KIAA0746 protein | Homo sapiens |
| 56 | AK030487 | 4620 | 87 | unnamed protein product | Mus musculus |
| 57 | AJ422147 | 664 | 100 | C15 protein | Homo sapiens |
| 57 | AX352692 | 664 | 100 | unnamed protein product | Homo sapiens |
| 57 | AX357061 | 664 | 100 | unnamed protein product | Homo sapiens |
| 59 | AAH01501 | 1520 | 100 | BC001501 Unknown (protein for | Homo sapiens |
| | | | | MGC: 2233) | |
| 59 | AAH14078 | 1520 | 100 | BC014078 cyclin D1 (PRAD1: | Homo sapiens |
| | | | | parathyroid adenomatosis 1) | |
| 59 | BC025302 | 1520 | 100 | cyclin D1 (PRAD1: parathyroid | Homo sapiens |
| | | | | adenomatosis 1) | |
| 60 | BC036285 | 1936 | 100 | protein kinase, cAMP-dependent, | Homo sapiens |
| | | | | regulatory, type I, alpha (tissue | |
| | | | | specific extinguisher 1) | |
| 60 | M18468 | 1936 | 100 | cAMP-dependent protein kinase | Homo sapiens |
| | | | | regulatory subunit type 1 | |
| 60 | M33336 | 1936 | 100 | cAMP-dependent protein kinase | Homo sapiens |
| | | | | type I-alpha subunit | |
| 61 | BC024165 | 600 | 100 | polymerase (RNA) II (DNA | Homo sapiens |
| | | | | directed) polypeptide J (13.3 kD) | |
| 61 | X82385 | 600 | 100 | RNA polymerase II subunit | Homo sapiens |
| 61 | X98433 | 600 | 100 | RNA polymerase II subunit | Homo sapiens |
| 62 | AL138761 | 8033 | 99 | bA16H23.2 (collagen, type XVII, | Homo sapiens |
| | | | | alpha 1 (BP180)) | |
| 62 | M91669 | 8228 | 100 | autoantigen | Homo sapiens |
| 62 | U76604 | 8037 | 99 | 180 kDa bullous pemphigoid | Homo sapiens |
| | | | | antigen 2/type XVII collagen | |
| 63 | AAH03575 | 2373 | 100 | BC003575 mannosyl (alpha-1,3-)- | Homo sapiens |
| | | | | glycoprotein beta-1,2-N- | |
| | | | | acetylglucosaminyltransferase | |
| 63 | M55621 | 2363 | 99 | N-acetylglucosaminyltransferase I | Homo sapiens |
| 63 | M61829 | 2373 | 100 | alpha-1,3-mannosyl-glycoprotein | Homo sapiens |
| | | | | beta-1,2-N- | |
| | | | | acetylglucosaminyltransferase | |
| 64 | L13923 | 16639 | 99 | fibrillin | Homo sapiens |
| 64 | L28748 | 16362 | 97 | putative | Bos taurus |
| 64 | X63556 | 17359 | 100 | fibrillin | Homo sapiens |
| 65 | AAH02576 | 3661 | 100 | BC002576 matrix metalloproteinase | Homo sapiens |
| | | | | 2 (gelatinase A, 72 kD gelatinase, | |
| | | | | 72 kD type IV collagenase) | |
| 65 | J03210 | 3584 | 100 | collagenase type IV precursor | Homo sapiens |
| 65 | M55593 | 3661 | 100 | type IV collagenase | Homo sapiens |
| 66 | AAH22087 | 2466 | 99 | BC022087 Similar to CD36 antigen | Homo sapiens |
| | | | | (collagen type I receptor, | |
| | | | | thrombospondin receptor)-like 1 | |
| 66 | AF467889_1 | 2380 | 86 | AF467889 high density lipoprotein | Sus scrofa |
| | | | | receptor SR-BI | |
| 66 | Z22555 | 2684 | 100 | CLA-1 | Homo sapiens |
| 67 | AF106202_1 | 1249 | 100 | AF106202 endothelial cell protein | Homo sapiens |
| | | | | C receptor precursor | |
| 67 | AF375468_1 | 1249 | 100 | AF375468 endothelial protein C | Homo sapiens |
| | | | | receptor | |
| 67 | X89079 | 1249 | 100 | centrocyclin | Homo sapiens |
| 68 | AF153603_1 | 666 | 100 | AF153603 TSC-22 related protein | Homo sapiens |
| 68 | AF183393_1 | 666 | 100 | AF183393 TSC-22-like Protein | Homo sapiens |
| 68 | AF228339 | 666 | 100 | glucocorticoid-induced GILZ | Homo sapiens |
| 69 | AF111168 | 3586 | 99 | unknown | Homo sapiens |
| 69 | AK075445 | 2876 | 99 | unnamed protein product | Homo sapiens |
| 69 | AX136231 | 2876 | 99 | unnamed protein product | Homo sapiens |
| 70 | AAH11234 | 1220 | 100 | BC011234 Similar to splicing | Homo sapiens |
| | | | | factor 30, survival of motor | |
| | | | | neuron-related | |
| 70 | AF083385 | 1220 | 100 | 30 kDa splicing factor; SPF 30 | Homo sapiens |
| 70 | AF107463 | 1220 | 100 | splicing factor | Homo sapiens |
| 71 | AAH10240 | 1921 | 100 | BC010240 cathepsin B | Homo sapiens |
| 71 | L16510 | 1912 | 99 | cathepsin B | Homo sapiens |
| 71 | M14221 | 1915 | 99 | preprocathepsin B | Homo sapiens |
| 72 | AK056033 | 398 | 83 | unnamed protein product | Homo sapiens |
| 73 | AE014836_21 | 182 | 23 | AE014836 hypothetical protein | Plasnodium |
| | | | | | falciparun |
| | | | | | 3D7 |
| 73 | AK033354 | 174 | 24 | unnamed protein product | Mus musculus |
| 74 | AF222743_1 | 2415 | 100 | AF222743 Sec61 alpha-1 | Mus musculus |
| 74 | BC003707 | 2415 | 100 | sec61 homolog | Mus musculus |
| 74 | M96630 | 2415 | 100 | sec61-like protein | Rattus sp. |
| 75 | AF332086_1 | 3193 | 96 | AF332086 Rad21 | Mus musculus |
| 75 | D38551 | 3284 | 100 | The ha1237 gene product is | Homo sapiens |
| | | | | related to S.pombe rad21 gene | |
| | | | | product. | |
| 75 | X98294 | 3275 | 99 | HR21spA | Homo sapiens |
| 76 | AAH16325 | 925 | 100 | BC016325 ADP-ribosylation factor 4 | Homo sapiens |
| 76 | AF493883_1 | 925 | 100 | AF493883 ADP-ribosylation factor | Homo sapiens |
| | | | | protein 4 | |
| 76 | BC022866 | 925 | 100 | ADP-ribosylation factor 4 | Homo sapiens |
| 77 | AAH18201 | 763 | 100 | BC018201 Unknown (protein for | Homo sapiens |
| | | | | MGC: 21505) | |
| 77 | AF217965_1 | 763 | 100 | AF217965 unknown | Homo sapiens |
| 77 | AF217972_1 | 763 | 100 | AF217972 unknown | Homo sapiens |
| 78 | AAH00211 | 1127 | 97 | BC000211 eukaryotic translation | Homo sapiens |
| | | | | elongation factor 1 beta 2 | |
| 78 | AAH04931 | 1127 | 97 | BC004931 eukaryotic translation | Homo sapiens |
| | | | | elongation factor 1 beta 2 | |
| 78 | X60489 | 1127 | 97 | elongation factor-1-beta | Homo sapiens |
| 79 | D82984 | 1758 | 93 | C/EBP alpha protein | Bos taurus |
| 79 | U34070 | 1857 | 96 | CCAAT/enhancer binding protein | Homo sapiens |
| | | | | alpha | |
| 79 | Y11525 | 1927 | 100 | CCAAT/enhancer binding protein | Homo sapiens |
| | | | | alpha | |
| 80 | AK025116 | 341 | 71 | unnamed protein product | Homo sapiens |
| 80 | AK090511 | 358 | 72 | unnamed protein product | Homo sapiens |
| 80 | AK096373 | 341 | 70 | unnamed protein product | Homo sapiens |
| 81 | AAH13963 | 2458 | 100 | BC013963 Similar to adenylyl | Homo sapiens |
| | | | | cyclase-associated protein | |
| 81 | AAH17196 | 2458 | 100 | BC017196 adenylyl cyclase- | Homo sapiens |
| | | | | associated protein | |
| 81 | M98474 | 2458 | 100 | CAP protein | Homo sapiens |
| 82 | AAH02464 | 2175 | 99 | BC002464 coagulation factor II | Homo sapiens |
| | | | | (thrombin) receptor | |
| 82 | AF391809_1 | 2179 | 99 | AF391809 coagulation factor II | Homo sapiens |
| | | | | (thrombin) receptor | |
| 82 | M62424 | 2187 | 100 | thrombin receptor | Homo sapiens |
| 83 | AF085250 | 759 | 100 | calmodulin | Perca |
| | | | | | flavescens |
| 83 | D83350 | 759 | 100 | calmodulin | Anas |
| | | | | | platyrhynchos |
| 83 | K01945 | 759 | 100 | calmodulin (cDNA clone 71) | Xenopus |
| | | | | | laevis |
| 84 | AL050265 | 2193 | 100 | hypothetical protein | Homo sapiens |
| 84 | BC033475 | 2128 | 96 | similar to TAR DNA-binding | Mus musculus |
| | | | | protein-43 (TDP-43) | |
| 84 | U23731 | 2193 | 100 | TAR DNA-binding protein-43 | Homo sapiens |
| 85 | AAH01495 | 1673 | 99 | BC001495 chromosome 1 open | Homo sapiens |
| | | | | reading frame 8 | |
| 85 | AAH16374 | 1697 | 100 | BC016374 chromosome 1 open | Homo sapiens |
| | | | | reading frame 8 | |
| 85 | AF290615_1 | 1673 | 99 | AF290615 liver membrane-bound | Homo sapiens |
| | | | | protein | |
| 86 | AK025047 | 319 | 69 | unnamed protein product | Homo sapiens |
| 86 | AK090511 | 327 | 70 | unnamed protein product | Homo sapiens |
| 86 | AK092450 | 358 | 69 | unnamed protein product | Homo sapiens |
| 87 | AAH00642 | 683 | 99 | BC000642 MY047 protein | Homo sapiens |
| 87 | AF063605 | 688 | 100 | brain my047 protein | Homo sapiens |
| 87 | AX136119 | 683 | 99 | unnamed protein product | Homo sapiens |
| 88 | AF035947_1 | 1394 | 100 | AF035947 cytokine-inducible | Homo sapiens |
| | | | | inhibitor of signalling type 1b | |
| 88 | AF132297_1 | 1332 | 99 | AF132297 cytokine-inducible SH2- | Homo sapiens |
| | | | | containing protein | |
| 88 | BC031590 | 1321 | 100 | cytokine inducible SH2-containing | Homo sapiens |
| | | | | protein | |
| 89 | AF151018_1 | 863 | 100 | AF151018 HSPC184 | Homo sapiens |
| 89 | AK012047 | 863 | 100 | unnamed protein product | Mus musculus |
| 89 | AK075227 | 863 | 100 | unnamed protein product | Homo sapiens |
| 90 | AK025116 | 323 | 68 | unnamed protein product | Homo sapiens |
| 90 | AK090929 | 316 | 70 | unnamed protein product | Homo sapiens |
| 90 | U22376 | 203 | 61 | alternatively spliced product | Homo sapiens |
| | | | | using exon 13A | |
| 91 | AAH09357 | 782 | 98 | BC009357 transgelin 2 | Homo sapiens |
| 91 | AY007127 | 887 | 98 | similar to Homo sapiens mRNA for | |
| | | | | KIAA0120 gene with GenBank | |
| | | | | Accession Number D21261.1 | |
| 91 | D21261 | 782 | 98 | similar to human 22 kDa, SM22 mRNA | Homo sapiens |
| | | | | (HUM22SM). | |
| 92 | AE005963 | 413 | 91 | TonB-dependent receptor | Caulobacter |
| | | | | | crescentus |
| | | | | | CB15 |
| 92 | AE005978 | 307 | 67 | TonB-dependent receptor | Caulobacter |
| | | | | | crescentus |
| | | | | | CB15 |
| 92 | AE005979 | 307 | 67 | TonB-dependent receptor | Caulobacter |
| | | | | | crescentus |
| | | | | | CB15 |
| 93 | AAH14006 | 367 | 81 | BC014006 Similar to 6- | Homo sapiens |
| | | | | phosphogluconolactonase | |
| 93 | AJ243972 | 367 | 81 | 6-phosphogluconolactonase | Homo sapiens |
| 93 | BC006594 | 325 | 71 | RIKEN cDNA 1110030K05 gene | Mus musculus |
| 94 | AAH03125 | 2055 | 99 | BC003125 Unknown (protein for | Homo sapiens |
| | | | | MGC: 3222) | |
| 94 | AK027877 | 2055 | 99 | unnamed protein product | Homo sapiens |
| 94 | AL136916 | 2055 | 99 | hypothetical protein | Homo sapiens |
| 95 | AAH03681 | 2956 | 100 | BC003681 Unknown (protein for | Homo sapiens |
| | | | | IMAGE: 3453235) | |
| 95 | AL096828 | 3008 | 100 | dJ963E22.1 (Novel protein similar | Homo sapiens |
| | | | | to NY-REN-2 Antigen) | |
| 95 | AX400070 | 2878 | 96 | unnamed protein product | Homo sapiens |
| 96 | AF161372_1 | 872 | 100 | AF161372 HSPC254 | Homo sapiens |
| 96 | BC021602 | 519 | 98 | Unknown (protein for | Mus musculus |
| | | | | IMAGE: 5102170) | |
| 96 | BC021603 | 519 | 98 | Unknown (protein for | Mus musculus |
| | | | | IMAGE: 5102465) | |
| 97 | AAH11714 | 476 | 100 | BC011714 Similar to heterogeneous | Homo sapiens |
| | | | | nuclear ribonucleoprotein D-like | |
| 97 | AB017020 | 476 | 100 | JKTBP | Mus musculus |
| 97 | BC021374 | 476 | 100 | heterogeneous nuclear | Mus musculus |
| | | | | ribonucleoprotein D-like | |
| 98 | AAH02673 | 1063 | 100 | BC002673 protein kinase H11; | Homo sapiens |
| | | | | small stress protein-like protein | |
| | | | | HSP22 | |
| 98 | AF191017_1 | 1063 | 100 | AF191017 E2IG1 | Homo sapiens |
| 98 | AF250138_1 | 1063 | 100 | AF250138 small stress protein- | Homo sapiens |
| | | | | like protein HSP22 | |
| 99 | AAH05033 | 2990 | 99 | BC005033 Unknown (protein for | Homo sapiens |
| | | | | MGC: 12692) | |
| 99 | AAH15620 | 2990 | 99 | BC015620 Unknown (protein for | Homo sapiens |
| | | | | IMAGE: 4843317) | |
| 99 | D89980 | 2990 | 99 | alpha actinin 4 | Homo sapiens |
| 100 | AAH11908 | 1787 | 100 | BC011908 Unknown (protein for | Homo sapiens |
| | | | | MGC: 20321) | |
| 100 | AAH14564 | 1787 | 100 | BC014564 Unknown (protein for | Homo sapiens |
| | | | | MGC: 2063) | |
| 100 | AAH18695 | 1787 | 100 | BC018695 Unknown (protein for | Homo sapiens |
| | | | | MGC: 3838) | |
| 101 | AAH12977 | 1363 | 100 | BC012977 nuclear LIM interactor- | Homo sapiens |
| | | | | interacting factor | |
| 101 | AF229162_1 | 1363 | 100 | AF229162 nuclear LIM interactor- | Homo sapiens |
| | | | | interacting factor | |
| 101 | AF229163 | 1363 | 100 | nuclear LIM interactor- | Homo sapiens |
| | | | | interacting factor | |
| 102 | AAH09718 | 355 | 76 | BC009718 epithelial membrane | Homo sapiens |
| | | | | protein 3 | |
| 102 | U52101 | 355 | 76 | YMP | Homo sapiens |
| 102 | U87947 | 355 | 76 | hematopoietic neural membrane | Homo sapiens |
| | | | | protein | |
| 103 | AF162781_1 | 4987 | 88 | AF162781 SH2-containing inositol | Mus musculus |
| | | | | 5-phosphatase 2 | |
| 103 | L36818 | 6041 | 99 | 51C protein | Homo sapiens |
| 103 | Y14385 | 5272 | 92 | inositol polyphosphate 5- | Homo sapiens |
| | | | | phosphatase | |
| 104 | AAH17369 | 1011 | 92 | BC017369 splicing factor, | Homo sapiens |
| | | | | arginine/serine-rich 7 (35 kD) | |
| 104 | AAH17908 | 1011 | 92 | BC017908 splicing factor, | Homo sapiens |
| | | | | arginine/serine-rich 7 (35 kD) | |
| 104 | BC022328 | 1011 | 92 | splicing factor, arginine/serine- | Homo sapiens |
| | | | | rich 7 (35 kD) | |
| 105 | AAH14323 | 1209 | 99 | BC014323 Similar to accessory | Homo sapiens |
| | | | | proteins BAP31/BAP29 | |
| 105 | X81109 | 1213 | 100 | tumor-associated antigen | Homo sapiens |
| 105 | Z31696 | 1213 | 100 | CDM | Homo sapiens |
| 106 | AAH15763 | 3102 | 100 | BC015763 hypothetical protein | Homo sapiens |
| | | | | FLJ20258 | |
| 106 | AK000265 | 3093 | 99 | unnamed protein product | Homo sapiens |
| 106 | AK075098 | 2998 | 99 | unnamed protein product | Homo sapiens |
| 107 | AAH07858 | 2250 | 100 | BC007858 inhibin, beta A (activin | Homo sapiens |
| | | | | A, activin AB alpha polypeptide) | |
| 107 | M13436 | 2250 | 100 | beta-A inhibin | Homo sapiens |
| 107 | X57578 | 2250 | 100 | activin beta-A subunit | Homo sapiens |
| 108 | AK027598 | 3474 | 100 | unnamed protein product | Homo sapiens |
| 108 | AX481758 | 3498 | 99 | unnamed protein product | Homo sapiens |
| 108 | AX481760 | 3498 | 99 | unnamed protein product | Homo sapiens |
| 109 | AAH15958 | 1926 | 86 | BC015958 Unknown (protein for | Homo sapiens |
| | | | | MGC: 15290) | |
| 109 | AJ401269 | 1926 | 86 | polyadenylate-binding protein 1 | Bos taurus |
| 109 | AK044829 | 1922 | 85 | unnamed protein product | Mus musculus |
| 110 | AAH10623 | 3729 | 96 | BC010623 Similar to nuclear | Homo sapiens |
| | | | | factor (erythroid-derived 2)-like 1 | |
| 110 | AK090459 | 4032 | 100 | FLJ00380 protein | Homo sapiens |
| 110 | X77366 | 3926 | 100 | hbZ17 | Homo sapiens |
| 111 | AAH03177 | 3500 | 100 | BC003177 KIAA1536 protein | Homo sapiens |
| 111 | AK027881 | 3480 | 99 | unnamed protein product | Homo sapiens |
| 111 | AL136895 | 3500 | 100 | hypothetical protein | Homo sapiens |
| 112 | AY054301 | 4981 | 94 | type III preprocollagen alpha 1 | Homo sapiens |
| | | | | chain | |
| 112 | BC028178 | 6603 | 100 | Similar to collagen, type III, | Homo sapiens |
| | | | | alpha 1 (Ehlers-Danlos syndrome | |
| | | | | type IV, autosomal dominant) | |
| 112 | X14420 | 4981 | 94 | prepro-alpha-1 type 3 collagen | Homo sapiens |
| 113 | AAH11819 | 3473 | 99 | BC011819 DEAD/H (Asp-Glu-Ala- | Homo sapiens |
| | | | | Asp/His) box polypeptide 3 | |
| 113 | AF000982 | 3476 | 100 | dead box, X isoform | Homo sapiens |
| 113 | AF000983 | 3476 | 100 | dead box, X isoform | Homo sapiens |
| 114 | AAH14959 | 1160 | 100 | BC014959 RING1 and YY1 binding | Homo sapiens |
| | | | | protein | |
| 114 | AF179286_1 | 1160 | 100 | AF179286 death effector domain- | Homo sapiens |
| | | | | associated factor | |
| 114 | BC036459 | 1156 | 99 | RING1 and YY1 binding protein | Homo sapiens |
| 115 | AK002791 | 282 | 81 | unnamed protein product | Mus musculus |
| 115 | AK003292 | 282 | 81 | unnamed protein product | Mus musculus |
| 115 | BC016191 | 282 | 81 | RIKEN cDNA 0610038D11 gene | Mus musculus |
| 116 | AAH08442 | 1106 | 100 | BC008442 Similar to transmembrane | Homo sapiens |
| | | | | 4 superfamily member 1 | |
| 116 | AAH10166 | 1106 | 100 | BC010166 Similar to transmembrane | Homo sapiens |
| | | | | 4 superfamily member 1 | |
| 116 | M90657 | 1106 | 100 | L6 | Homo sapiens |
| 117 | AAH10354 | 1764 | 100 | BC010354 PTD010 protein | Homo sapiens |
| 117 | AB009685 | 1764 | 100 | DERP2 | Homo sapiens |
| 117 | AF131820 | 1764 | 100 | Unknown | Homo sapiens |
| 118 | AF217787 | 1172 | 99 | extracellular glutathione | Homo sapiens |
| | | | | peroxidase | |
| 118 | D00632 | 1192 | 99 | glutathione peroxidase | Homo sapiens |
| 118 | X58295 | 1192 | 99 | glutathione peroxidase | Homo sapiens |
| 119 | AAH00531 | 939 | 97 | BC000531 insulin-like growth | Homo sapiens |
| | | | | factor 2 (somatomedin A) | |
| 119 | AF517226_1 | 939 | 97 | AF517226 insulin-like growth | Homo sapiens |
| | | | | factor 2 (somatomedin A) | |
| 119 | M17863 | 942 | 97 | preproinsulin-like growth factor | Homo sapiens |
| | | | | II, domains A-E | |
| 120 | AJ310544 | 2183 | 100 | EGLN2 protein | Homo sapiens |
| 120 | AX553864 | 2183 | 100 | unnamed protein product | Homo sapiens |
| 120 | BC036051 | 2183 | 100 | Similar to egl nine homolog 2 (C. elegans) | Homo sapiens |
| 121 | AAH00867 | 915 | 98 | BC000867 PRO0659 protein | Homo sapiens |
| 121 | AL834135 | 1118 | 99 | hypothetical protein | Homo sapiens |
| 121 | AX405861 | 1118 | 99 | unnamed protein product | Homo sapiens |
| 122 | AB051480 | 1087 | 60 | KIAA1693 protein | Homo sapiens |
| 122 | AL136890 | 1741 | 83 | hypothetical protein | Homo sapiens |
| 122 | AX402334 | 1084 | 60 | unnamed protein product | Homo sapiens |
| 123 | AB037755 | 4896 | 99 | KIAA1334 protein | Homo sapiens |
| 123 | AF155135_1 | 4845 | 99 | AF155135 novel retinal pigment | Homo sapiens |
| | | | | epithelial cell protein | |
| 123 | AF202315_1 | 4141 | 85 | AF202315 ankycorbin | Mus musculus |
| 124 | AK090929 | 329 | 76 | unnamed protein product | Homo sapiens |
| 124 | AK097965 | 338 | 77 | unnamed protein product | Homo sapiens |
| 124 | BC033959 | 336 | 70 | similar to Alu subfamily SQ | Homo sapiens |
| | | | | sequence contamination warning | |
| | | | | entry | |
| 125 | AAH12444 | 1319 | 100 | BC012444 Similar to chloride | Homo sapiens |
| | | | | intracellular channel 4 | |
| 125 | AF097330_1 | 1305 | 99 | AF097330 H1 chloride channel; | Homo sapiens |
| | | | | p64H1; CLIC4 | |
| 125 | AL117424 | 1319 | 100 | hypothetical protein | Homo sapiens |
| 126 | AB034747 | 904 | 100 | small integral membrane protein | Homo sapiens |
| | | | | of lysosome/late endosome | |
| 126 | AF171100 | 812 | 85 | TBX1 protein | Mus musculus |
| 126 | BC018559 | 812 | 85 | LPS-induced TNF-alpha factor | Mus musculus |
| 127 | AAH10645 | 1737 | 100 | BC010645 Similar to | Homo sapiens |
| | | | | sialyltransferase 4C (beta- | |
| | | | | galactosidase alpha-2,3- | |
| | | | | sialytransferase) | |
| 127 | AY040826 | 1715 | 97 | alpha 2,3-sialyltransferase IV | Homo sapiens |
| | | | | type B+18 | |
| 127 | L23767 | 1710 | 100 | a2,3 sialyltransferse | Homo sapiens |
| 128 | AAH09329 | 639 | 64 | BC009329 triosephosphate | Homo sapiens |
| | | | | isomerase 1 | |
| 128 | AAH11611 | 639 | 64 | BC011611 Similar to | Homo sapiens |
| | | | | triosephosphate isomerase 1 | |
| 128 | AAH15100 | 639 | 64 | BC015100 triosephosphate | Homo sapiens |
| | | | | isomerase 1 | |
| 129 | AAH18986 | 1064 | 91 | BC018986 Unknown (protein for | Homo sapiens |
| | | | | MGC: 20092) | |
| 129 | AB059653 | 1060 | 90 | prostaglandin dehydrogenase I | Macaca |
| | | | | | fascicularis |
| 129 | L76465 | 1057 | 90 | NAD+-dependent 15- | Homo sapiens |
| | | | | hydroxyprostaglandin | |
| | | | | dehydrogenase | |
| 130 | AAH00690 | 794 | 100 | BC000690 ribosomal protein L24 | Homo sapiens |
| 130 | BC002110 | 794 | 100 | ribosomal protein L24 | Mus musculus |
| 130 | X78443 | 794 | 100 | ribosomal protein L24 | Rattus |
| | | | | | norvegicus |
| 131 | AAH11402 | 1122 | 100 | BC011402 Similar to decidual | Homo sapiens |
| | | | | protein induced by progesterone | |
| 131 | AB022718 | 1122 | 100 | DEPP | Homo sapiens |
| 131 | AL136653 | 1116 | 99 | hypothetical protein | Homo sapiens |
| 132 | AF108841 | 402 | 81 | pol protein | Homo sapiens |
| 132 | AF108843 | 415 | 75 | pol protein | Homo sapiens |
| 132 | U88902 | 317 | 73 | integrase | Homo sapiens |
| 133 | A07358 | 1408 | 99 | VAC beta | Mus musculus |
| 133 | AAH04376 | 1417 | 100 | BC004376 annexin A8 | Homo sapiens |
| 133 | X16662 | 1408 | 99 | vascular anticoagulant-beta (AA 1-327) | Homo sapiens |
| 134 | AF068227 | 2236 | 100 | putative transmembrane protein | Homo sapiens |
| 134 | AK032293 | 1426 | 76 | unnamed protein product | Mus musculus |
| 134 | BC025487 | 1447 | 77 | Similar to ceroid-lipofuscinosis, | Mus musculus |
| | | | | neuronal 5 | |
| 135 | AAH10652 | 1355 | 100 | BC010652 Unknown (protein for | Homo sapiens |
| | | | | MGC: 9753) | |
| 135 | AF217980_1 | 1338 | 98 | AF217980 unknown | Homo sapiens |
| 135 | AX119063 | 965 | 96 | unnamed protein product | Homo sapiens |
| 136 | AK000496 | 374 | 71 | unnamed protein product | Homo sapiens |
| 136 | AK025116 | 400 | 72 | unnamed protein product | Homo sapiens |
| 136 | AK057830 | 369 | 72 | unnamed protein product | Homo sapiens |
| 137 | AF001900 | 1702 | 100 | secreted frizzled-related protein | Homo sapiens |
| 137 | AF056087 | 1702 | 100 | secreted frizzled related protein | Homo sapiens |
| 137 | BC036503 | 1690 | 99 | Unknown (protein for MGC: 43294) | Homo sapiens |
| 138 | AAH14052 | 2127 | 100 | BC014052 transcriptional co- | Homo sapiens |
| | | | | activator with PDZ-binding motif | |
| | | | | (TAZ) | |
| 138 | AJ299431 | 2127 | 100 | transcriptional coactivator | Homo sapiens |
| 138 | AK022036 | 2127 | 100 | unnamed protein product | Homo sapiens |
| 139 | AAH07493 | 254 | 80 | BC007493 galactosidase, beta 1 | Homo sapiens |
| 139 | M22590 | 254 | 80 | beta-galactosidase precursor (EC | Homo sapiens |
| | | | | 3.2.1.23) | |
| 139 | M34423 | 254 | 80 | beta-galactosidase precursor (EC | Homo sapiens |
| | | | | 3.2.1.23) | |
| 140 | AAH15928 | 2186 | 100 | BC015928 Unknown (protein for | Homo sapiens |
| | | | | MGC: 8773) | |
| 140 | AB037797 | 2313 | 100 | KIAA1376 protein | Homo sapiens |
| 140 | AK088288 | 2153 | 98 | unnamed protein product | Mus musculus |
| 141 | AF087873_1 | 383 | 100 | AF087873 protein kinase inhibitor | Homo sapiens |
| 141 | AF225513_1 | 383 | 100 | AF225513 cAMP-dependent protein | Homo sapiens |
| | | | | kinase inhibitor beta | |
| 141 | BC036011 | 383 | 100 | protein kinase (cAMP-dependent, | Homo sapiens |
| | | | | catalytic) inhibitor beta | |
| 142 | X53305 | 736 | 100 | stathmin | Homo sapiens |
| 142 | X94912 | 736 | 100 | Pr22 | Homo sapiens |
| 142 | Z11566 | 736 | 100 | Pr22 protein | Homo sapiens |
| 143 | AF148856_2 | 150 | 79 | AF148856 unknown | Homo sapiens |
| 143 | AL096744 | 153 | 82 | hypothetical protein | Homo sapiens |
| 143 | M80341 | 150 | 79 | ORF2 | Homo sapiens |
| 144 | AF421375 | 619 | 44 | unknown | Homo sapiens |
| 144 | AK002154 | 798 | 94 | unnamed protein product | Homo sapiens |
| 144 | AK023417 | 819 | 100 | unnamed protein product | Homo sapiens |
| 145 | AF151807_1 | 2197 | 99 | AF151807 CGI-49 protein | Homo sapiens |
| 145 | AK075178 | 2150 | 97 | unnamed protein product | Homo sapiens |
| 145 | BC026185 | 2137 | 97 | Similar to CGI-49 protein | Homo sapiens |
| 146 | AAH10123 | 2134 | 100 | BC010123 SH3-domain binding | Homo sapiens |
| | | | | protein 5 (BTK-associated) | |
| 146 | AB005047 | 2134 | 100 | SH3 binding protein | Homo sapiens |
| 146 | AB027562 | 2008 | 94 | vascular endothelial cell | Rattus |
| | | | | specific protein 18 | norvegicus |
| 147 | AJ131023 | 5309 | 99 | oxytocinase/insulin-responsive | Homo sapiens |
| | | | | aminopeptidase, variant 1 | |
| 147 | U62768 | 5318 | 99 | oxytocinase splice variant 1 | Homo sapiens |
| 147 | U62769 | 5242 | 99 | oxytocinase splice variant 2 | Homo sapiens |
| 148 | AF234263 | 2521 | 99 | cathepsin C | Homo sapiens |
| 148 | U79415 | 2527 | 100 | prepro dipeptidyl peptidase I | Homo sapiens |
| 148 | X87212 | 2527 | 100 | cathepsin C | Homo sapiens |
| 149 | BC003426 | 1438 | 94 | Similar to eukaryotic translation | Mus musculus |
| | | | | initiation factor 2B, subunit 1 | |
| | | | | (alpha, 26 kD) | |
| 149 | U05821 | 1419 | 92 | translation initiation factor | Rattus |
| | | | | eIF-2B alpha-subunit | norvegicus |
| 149 | X95648 | 1526 | 100 | alfa subunit | Homo sapiens |
| 150 | AAH14093 | 2678 | 97 | BC014093 Similar to amiloride | Homo sapiens |
| | | | | binding protein 1 (amine oxidase | |
| | | | | (copper-containing)) | |
| 150 | M55602 | 2431 | 89 | amiloride-binding protein | Homo sapiens |
| 150 | X78212 | 2678 | 97 | amiloride binding protein | Homo sapiens |
| 151 | AK003633 | 925 | 98 | unnamed protein product | Mus musculus |
| 151 | AK007989 | 925 | 98 | unnamed protein product | Mus musculus |
| 151 | AK076212 | 925 | 98 | unnamed protein product | Mus musculus |
| 152 | AAH18340 | 1692 | 99 | BC018340 Unknown (protein for | Homo sapiens |
| | | | | MGC: 9372) | |
| 152 | X79066 | 1692 | 99 | ERF-1 | Homo sapiens |
| 152 | X99404 | 1684 | 99 | Berg36 | Homo sapiens |
| 153 | AB055977 | 492 | 93 | I3 protein | Homo sapiens |
| 153 | AF041430 | 492 | 93 | pRGR2 | Homo sapiens |
| 153 | AF106966 | 492 | 93 | I3 protein | Homo sapiens |
| 154 | AAH14438 | 1018 | 100 | BC014438 Unknown (protein for | Homo sapiens |
| | | | | MGC: 22947) | |
| 154 | AE006639_3 | 1018 | 100 | AE006639 HN1 like | Homo sapiens |
| 154 | AK023154 | 1018 | 100 | unnamed protein product | Homo sapiens |
| 155 | J03779 | 3944 | 100 | common acute lymphoblastic | Homo sapiens |
| | | | | leukemia antigen precursor | |
| 155 | M26628 | 3919 | 99 | enkephalinase | Homo sapiens |
| 155 | Y00811 | 3919 | 99 | CALLA protein (AA 1-750) | Homo sapiens |
| 156 | AB035304 | 4092 | 100 | cadherin-5 | Homo sapiens |
| 156 | U84722 | 4086 | 99 | vascular endothelial cadherin | Homo sapiens |
| 156 | X79981 | 4092 | 100 | VE-cadherin | Homo sapiens |
| 157 | AX019983 | 739 | 100 | unnamed protein product | Homo sapiens |
| 157 | BC026254 | 739 | 100 | insulin-like 4 (placenta) | Homo sapiens |
| 157 | L34838 | 739 | 100 | EPIL | Homo sapiens |
| 158 | AF139894_1 | 1813 | 100 | AF139894 RNA-binding protein | Mus musculus |
| | | | | alpha-CP1 | |
| 158 | AF139895_1 | 1813 | 100 | AF139895 RNA-binding protein | Mus musculus |
| | | | | alpha-CP1 | |
| 158 | BC004793 | 1813 | 100 | poly(rC)-binding protein 1 | Mus musculus |
| 159 | U12390 | 369 | 67 | beta-galactosidase alpha peptide | Cloning |
| | | | | | vector |
| | | | | | pSport1 |
| 159 | U12391 | 355 | 88 | beta-galactosidase alpha peptide | Cloning |
| | | | | | vector |
| | | | | | pSport2 |
| 159 | Y14836 | 294 | 68 | beta-galactosidase | Phagemid |
| | | | | | cloning |
| | | | | | vector |
| | | | | | pTZ19U |
| 160 | AF218012_1 | 1751 | 100 | AF218012 unknown | Homo sapiens |
| 160 | AF218030_1 | 1751 | 100 | AF218030 unknown | Homo sapiens |
| 160 | AL121586 | 1778 | 100 | dJ477O4.1.1 (novel protein | Homo sapiens |
| | | | | similar to otoferlin and | |
| | | | | dysferlin, isoform 1) | |
| 161 | AAH00352 | 1286 | 100 | BC000352 proteasome (prosome, | Homo sapiens |
| | | | | macropain) activator subunit 1 | |
| | | | | (PA28 alpha) | |
| 161 | AAH07503 | 1286 | 100 | BC007503 proteasome (prosome, | Homo sapiens |
| | | | | macropain) activator subunit 1 | |
| | | | | (PA28 alpha) | |
| 161 | AF078829_1 | 1286 | 100 | AF078829 proteasome activator | Homo sapiens |
| | | | | PA28 alpha | |
| 162 | AAH16155 | 382 | 100 | BC016155 Ras homolog enriched in | Homo sapiens |
| | | | | brain 2 | |
| 162 | AF493921_1 | 382 | 100 | AF493921 Ras family small GTP | Homo sapiens |
| | | | | binding protein RHEB2 | |
| 162 | Z29677 | 382 | 100 | Ras-related GTP-binding protein | Homo sapiens |
| 163 | AAH10423 | 2657 | 100 | BC010423 Ig superfamily receptor | Homo sapiens |
| | | | | LNIR | |
| 163 | AF160477_1 | 2655 | 99 | AF160477 Ig superfamily receptor | Homo sapiens |
| | | | | LNIR precursor | |
| 163 | AF426163_1 | 2657 | 100 | AF426163 nectin 4 | Homo sapiens |
| 164 | AJ295142 | 3578 | 99 | Clq receptor protein | Homo sapiens |
| 164 | BC028075 | 3577 | 99 | complement component 1, q | Homo sapiens |
| | | | | subcomponent, receptor 1 | |
| 164 | U94333 | 3587 | 100 | C1qR(p) | Homo sapiens |
| 165 | AAH14271 | 3392 | 100 | BC014271 endoglin (Osler-Rendu- | Homo sapiens |
| | | | | Weber syndrome 1) | |
| 165 | J05481 | 3319 | 99 | endoglin precursor | Homo sapiens |
| 165 | U37439 | 3385 | 99 | endoglin | Homo sapiens |
| 166 | AAH07411 | 323 | 98 | BC007411 Unknown (protein for | Homo sapiens |
| | | | | MGC: 2554) | |
| 166 | AF051782 | 319 | 97 | diaphanous 1 | Homo sapiens |
| 166 | U96963 | 322 | 98 | p140mDia | Mus musculus |
| 167 | AF151966_1 | 1875 | 66 | AF151966 GTPase activating | Gallus |
| | | | | protein Rap1-GAP | gallus |
| 167 | BC030891 | 2109 | 95 | Unknown (protein for | Mus musculus |
| | | | | IMAGE: 4485689) | |
| 167 | M64788 | 3477 | 100 | GTPase activating protein | Homo sapiens |
| 168 | AX206708 | 1968 | 100 | unnamed protein product | Homo sapiens |
| 168 | M92934 | 1968 | 100 | connective tissue growth factor | Homo sapiens |
| 168 | X78947 | 1968 | 100 | connective tissue growth factor | Homo sapiens |
| 169 | AAH18823 | 849 | 100 | BC018823 Unknown (protein for | Homo sapiens |
| | | | | MGC: 1236) | |
| 169 | AK007729 | 809 | 97 | unnamed protein product | Mus musculus |
| 169 | U30826 | 849 | 100 | SRp40-1 | Homo sapiens |
| 170 | AAH07333 | 2823 | 100 | BC007333 etc variant gene 5 (ets- | Homo sapiens |
| | | | | related molecule) | |
| 170 | X76184 | 2823 | 100 | etc-related protein | Homo sapiens |
| 170 | X96381 | 2823 | 100 | erm | Homo sapiens |
| 171 | AAH02599 | 996 | 99 | BC002599 corticotropin releasing | Homo sapiens |
| | | | | hormone | |
| 171 | AAH11031 | 996 | 99 | BC011031 Similar to corticotropin | Homo sapiens |
| | | | | releasing hormone | |
| 171 | V00571 | 996 | 99 | corticotropin releasing factor | Homo sapiens |
| 172 | AF151872_1 | 1069 | 100 | AF151872 CGI-114 protein | Homo sapiens |
| 172 | AL110239 | 1066 | 99 | hypothetical protein | Homo sapiens |
| 172 | AX399865 | 1069 | 100 | unnamed protein product | Homo sapiens |
| 173 | AAH00732 | 1553 | 100 | BC000732 glioblastoma amplified | Homo sapiens |
| | | | | sequence | |
| 173 | AAH01837 | 1553 | 100 | BC001837 glioblastoma amplified | Homo sapiens |
| | | | | sequence | |
| 173 | BC030821 | 1553 | 100 | glioblastoma amplified sequence | Homo sapiens |
| 174 | AAH01483 | 2103 | 100 | BC001483 Unknown (protein for | Homo sapiens |
| | | | | MGC: 1364) | |
| 174 | AAH09241 | 2103 | 100 | BC009241 Unknown (protein for | Homo sapiens |
| | | | | MGC: 3556) | |
| 174 | BC023599 | 2103 | 100 | TRK-fused gene | Homo sapiens |
| 175 | AAH12806 | 3278 | 100 | BC012806 solute carrier family 5 | Homo sapiens |
| | | | | (sodium-dependent vitamin | |
| | | | | transporter), member 6 | |
| 175 | AAH15631 | 3278 | 100 | BC015631 solute carrier family 5 | Homo sapiens |
| | | | | (sodium-dependent vitamin | |
| | | | | transporter), member 6 | |
| 175 | AF116241 | 3272 | 99 | sodium-dependent multivitamin | Homo sapiens |
| | | | | transporter | |
| 177 | AAH04324 | 744 | 100 | BC004324 ribosomal protein S16 | Homo sapiens |
| 177 | AAH07977 | 744 | 100 | BC007977 ribosomal protein S16 | Homo sapiens |
| 177 | X17665 | 744 | 100 | ribosomal protein S16 (AA 1-146) | Rattus |
| | | | | | rattus |
| 178 | AB047555 | 624 | 90 | IZP6 | Mus musculus |
| | | | | | musculus |
| 178 | AK007948 | 624 | 90 | unnamed protein product | Mus musculus |
| 178 | BC004729 | 624 | 90 | RIKEN cDNA 1810063P04 gene | Mus musculus |
| 179 | BC003337 | 1957 | 100 | actin, gamma 1 | Mus musculus |
| 179 | BC021796 | 1957 | 100 | actin, gamma 1 | Mus musculus |
| 179 | BC023248 | 1957 | 100 | actin, gamma, cytoplasmic | Mus musculus |
| 180 | AAH11700 | 2048 | 100 | BC011700 glutamate-ammonia ligase | Homo sapiens |
| | | | | (glutamine synthase) | |
| 180 | AAH11852 | 2048 | 100 | BC011852 glutamate-ammonia ligase | Homo sapiens |
| | | | | (glutamine synthase) | |
| 180 | AAH18992 | 2048 | 100 | BC018992 Unknown (protein for | Homo sapiens |
| | | | | MGC: 20095 | |
| 181 | AF234654_1 | 1155 | 100 | AF234654 PLAC1 | Homo sapiens |
| 181 | AK075086 | 1155 | 100 | unnamed protein product | Homo sapiens |
| 181 | BC022335 | 1155 | 100 | placenta-specific 1 | Homo sapiens |
| 182 | AAB67977 | 4108 | 99 | AF019413 complement factor B | Homo sapiens |
| 182 | AAH04143 | 4121 | 100 | BC004143 B-factor, properdin | Homo sapiens |
| 182 | AAH07990 | 4121 | 100 | BC007990 B-factor, properdin | Homo sapiens |
| 183 | AAH17399 | 355 | 98 | BC017399 Similar to RIKEN cDNA | Homo sapiens |
| | | | | 1810037I17 gene | |
| 183 | AK007721 | 236 | 68 | unnamed protein product | Mus musculus |
| 183 | BC002135 | 236 | 68 | Unknown (protein for MGC: 7243) | Mus musculus |
| 184 | AAH13383 | 1701 | 100 | BC013383 calumenin | Homo sapiens |
| 184 | AF013759 | 1701 | 100 | calumein | Homo sapiens |
| 184 | U67280 | 1695 | 99 | calumenin | Homo sapiens |
| 185 | AF069065 | 596 | 97 | induced cAMP early repressor | Homo sapiens |
| | | | | type 1 | |
| 185 | AJ311667 | 588 | 95 | induced cAMP early repressor, | Mus musculus |
| | | | | ICER I | |
| 185 | D14826 | 608 | 100 | hCREM 2alpha-a protein | Homo sapiens |
| 186 | AAH00452 | 1043 | 100 | BC000452 Similar to thioredoxin | Homo sapiens |
| | | | | peroxidase 1 | |
| 186 | AAH03022 | 1043 | 100 | BC003022 Similar to thioredoxin | Homo sapiens |
| | | | | peroxidase 1 | |
| 186 | BC039428 | 1043 | 100 | Similar to peroxiredoxin 2 | Homo sapiens |
| 187 | AB056107 | 2995 | 100 | zinc finger protein homologous to | Homo sapiens |
| | | | | mouse Zfp91 | |
| 187 | AB057443 | 2775 | 100 | testis specific ZFP91 | Homo sapiens |
| 187 | AF310246_1 | 2586 | 99 | AF310246 FKSG11 | Homo sapiens |
| 188 | AF023476 | 4954 | 100 | meltrin-L precursor | Homo sapiens |
| 188 | AF023477 | 3855 | 99 | meltrin-S | Homo sapiens |
| 188 | D50411 | 3939 | 80 | meltrin alpha | Mus musculus |
| 189 | AF154121_1 | 2195 | 94 | AF154121 sodium-dependent high- | Homo sapiens |
| | | | | affinity dicarboxylate | |
| | | | | transporter | |
| 189 | AL034424 | 2126 | 91 | dJ257E24.2.1 (sodium-dependent | Homo sapiens |
| | | | | high-affinity dicarboxylate | |
| | | | | transporter (NADC3, SDCT2) | |
| | | | | (isoform 1)) | |
| 189 | AY072810 | 2126 | 91 | energy metabolism-related sodium- | Homo sapiens |
| | | | | dependent high-affinity | |
| | | | | dicarboxylate transporter | |
| 190 | AF400594 | 352 | 54 | endothelial nitric oxide synthase | Homo sapiens |
| 190 | AF519768_1 | 352 | 54 | AF519768 nitric oxide synthase 3 | Homo sapiens |
| | | | | (endothelial cell) | |
| 190 | D26607 | 350 | 53 | endothelial nitric oxide synthase | Homo sapiens |
| 191 | AAH01462 | 1835 | 100 | BC001462 protease, serine, 8 | Homo sapiens |
| | | | | (prostasin) | |
| 191 | L41351 | 1835 | 100 | prostasin | Homo sapiens |
| 191 | U33446 | 1835 | 100 | prostasin | Homo sapiens |
| 192 | AK025116 | 272 | 73 | unnamed protein product | Homo sapiens |
| 192 | AK090913 | 310 | 71 | unnamed protein product | Homo sapiens |
| 192 | BC033959 | 200 | 70 | similar to Alu subfamily SQ | Homo sapiens |
| | | | | sequence contamination warning | |
| | | | | entry | |
| 193 | AF346465 | 7291 | 91 | latent transforming growth factor | Mus musculus |
| | | | | beta binding protein 1S | |
| 193 | AF489528_1 | 7887 | 99 | AF489528 transforming growth | Homo sapiens |
| | | | | factor-beta binding protein-1S | |
| 193 | M34057 | 7903 | 100 | transforming growth factor-beta 1 | Homo sapiens |
| | | | | binding protein precursor | |
| 194 | AY004254 | 1199 | 90 | endoplasmic reticulum protein 29 | Rattus |
| | | | | precursor | norvegicus |
| 194 | X94910 | 1334 | 100 | ERp28 | Homo sapiens |
| 194 | Y10264 | 1199 | 90 | ERp29 precursor | Rattus |
| | | | | | norvegicus |
| 195 | AF119917_58 | 250 | 100 | AF119896 PRO2751 | Homo sapiens |
| 196 | AB020692 | 4158 | 100 | KIAA0885 protein | Homo sapiens |
| 196 | BC016898 | 4107 | 98 | Unknown (protein for MGC: 19174) | Mus musculus |
| 196 | X52311 | 4102 | 98 | unr protein (AA 1-798) | Rattus |
| | | | | | norvegicus |
| 198 | AL049698 | 7034 | 98 | dJ470B24.1.3 (myeloid/lymphoid or | Homo sapiens |
| | | | | mixed-lineage leukemia (trithorax | |
| | | | | (Drosophila) homolog); | |
| | | | | translocated to, 4 (AF-6) | |
| | | | | (isoform 3)) | |
| 198 | AL049698 | 7050 | 98 | dJ470B24.1.5 (myeloid/lymphoid or | Homo sapiens |
| | | | | mixed-lineage leukemia (trithorax | |
| | | | | (Drosophila) homolog); | |
| | | | | translocated to, 4 (AF-6) | |
| | | | | (isoform 5)) | |
| 198 | AL161973 | 7363 | 100 | hypothetical protein | Homo sapiens |
| 199 | AAH21288 | 2134 | 100 | BC021288 Unknown (protein for | Homo sapiens |
| | | | | MGC: 29494) | |
| 199 | J03263 | 1934 | 98 | membrane glycoprotein | Homo sapiens |
| 199 | J04182 | 2041 | 96 | lysosomal membrane glycoprotein-1 | Homo sapiens |
| 200 | AC002400 | 817 | 100 | Acyl carrier protein, | Homo sapiens |
| | | | | Mitochondrial (ACP) (5′partial) | |
| 200 | AF087660_1 | 788 | 100 | AF087660 NADH: ubiquinone | Homo sapiens |
| | | | | oxidoreductase SDAP subunit | |
| 200 | AK018717 | 672 | 85 | unnamed protein product | Mus musculus |
| 201 | AB031550 | 1298 | 87 | pctp-L | Mus musculus |
| 201 | AF151810_1 | 1470 | 90 | AF151810 CGI-52 protein | Homo sapiens |
| 201 | Z81134 | 419 | 39 | Hypothetical protein T28D6.7 | Caenorhabditis |
| | | | | | elegans |
| 203 | AAH09392 | 5306 | 99 | BC009392 Unknown (protein for | Homo sapiens |
| | | | | MGC: 15329) | |
| 203 | AB011149 | 5318 | 100 | KIAA0577 protein | Homo sapiens |
| 203 | AP000512 | 5318 | 100 | RNA helicase | Homo sapiens |
| 204 | AAH08751 | 3757 | 99 | BC008751 calpain 1, (mu/I) large | Homo sapiens |
| | | | | subunit | |
| 204 | AAH17200 | 3762 | 100 | BC017200 calpain 1, (mu/I) large | Homo sapiens |
| | | | | subunit | |
| 204 | X04366 | 3762 | 100 | CANP, large subunit (aa 1-714) | Homo sapiens |
| 205 | AB093679 | 740 | 100 | ribosomal protein L26 | Macaca |
| | | | | | fascicularis |
| 205 | X69392 | 740 | 100 | ribosomal protein L26 | Homo sapiens |
| 205 | X80699 | 740 | 100 | L26 | Mus musculus |
| 206 | AAH06391 | 1974 | 100 | BC006391 inhibin, alpha | Homo sapiens |
| 206 | M13981 | 1974 | 100 | inhibin A-subunit precursor | Homo sapiens |
| 206 | X04445 | 1974 | 100 | preproinhibin | Homo sapiens |
| 207 | AK025116 | 190 | 66 | unnamed protein product | Homo sapiens |
| 207 | AK092450 | 300 | 63 | unnamed protein product | Homo sapiens |
| 207 | AK097214 | 305 | 68 | unnamed protein product | Homo sapiens |
| 208 | AF130117_48 | 337 | 73 | AF130089 PRO2550 | Homo sapiens |
| 208 | AK000385 | 333 | 70 | unnamed protein product | Homo sapiens |
| 208 | AK092450 | 336 | 70 | unnamed protein product | Homo sapiens |
| 209 | AB062485 | 161 | 77 | OK/SW-CL.18 | Homo sapiens |
| 209 | AF090930_1 | 172 | 51 | AF090930 PRO0478 | Homo sapiens |
| 209 | AX399919 | 158 | 68 | unnamed protein product | Homo sapiens |
| 210 | AF063591_1 | 1401 | 99 | AF063591 brain my033 protein | Homo sapiens |
| 210 | BC022522 | 1411 | 100 | antigen identified by monoclonal | Homo sapiens |
| | | | | antibody MRC OX-2 | |
| 210 | BC031103 | 1411 | 100 | antigen identified by monoclonal | Homo sapiens |
| | | | | antibody MRC OX-2 | |
| 211 | AAH00692 | 2582 | 100 | BC000692 Similar to | Homo sapiens |
| | | | | hyaluronoglucosaminidase 2 | |
| 211 | AC002455 | 2579 | 99 | human PH-20 homolog (LUCA-2) | Homo sapiens |
| 211 | U09577 | 2579 | 99 | lysosomal hyaluronidase | Homo sapiens |
| 212 | AAH02700 | 2294 | 100 | BC002700 Similar to keratin 7 | Homo sapiens |
| 212 | AF509887 | 2294 | 100 | keratin 7 | Homo sapiens |
| 212 | AF509892 | 2294 | 100 | keratin 7 | Homo sapiens |
| 213 | AF523361_1 | 1951 | 99 | AF523361 CD34 antigen | Homo sapiens |
| 213 | M81945 | 1955 | 100 | hematopoietic stem cell antigen | Homo sapiens |
| 213 | S53910 | 1951 | 99 | CD34 | Homo sapiens |
| 214 | AB037891 | 493 | 100 | Bc10 | Mus musculus |
| 214 | AF303656_1 | 493 | 100 | AF303656 bladder cancer-related | Mus musculus |
| | | | | protein | |
| 214 | BC026935 | 493 | 100 | bladder cancer associated protein | Mus musculus |
| 215 | AF322909 | 3026 | 100 | transmembrane glycoprotein HGFIN | Homo sapiens |
| 215 | BC032783 | 3003 | 97 | Similar to glycoprotein | Homo sapiens |
| | | | | (transmembrane) nmb | |
| 215 | X76534 | 3026 | 100 | NMB | Homo sapiens |
| 216 | AAH17352 | 3091 | 100 | BC017352 Unknown (protein for | Homo sapiens |
| | | | | MGC: 29525) | |
| 216 | AF230388_1 | 3085 | 99 | AF230388 tripartite motif protein | Homo sapiens |
| | | | | TRIM29 alpha | |
| 216 | L24203 | 3085 | 99 | ataxia-telangiectasia group D- | Homo sapiens |
| | | | | associated protein | |
| 217 | AK003609 | 523 | 100 | unnamed protein product | Mus musculus |
| 217 | AL136635 | 523 | 100 | hypothetical protein | Homo sapiens |
| 217 | BC016408 | 523 | 100 | RIKEN cDNA 1110011F09 gene | Mus musculus |
| 218 | AF073310 | 7103 | 100 | insulin receptor substrate-2 | Homo sapiens |
| 218 | AF385932_1 | 7014 | 99 | AF385932 insulin receptor | Homo sapiens |
| | | | | substrate 2 insertion mutant | |
| 218 | AF385933_1 | 7026 | 99 | AF385933 insulin receptor | Homo sapiens |
| | | | | substrate 2 insertion mutant | |
| 219 | AAH09586 | 1584 | 70 | BC009586 Unknown (protein for | Homo sapiens |
| | | | | MGC: 14649) | |
| 219 | D26485 | 1584 | 70 | core I protein | Homo sapiens |
| 219 | L16842 | 1584 | 70 | ubiquinol-cytochrome c reductase | Homo sapiens |
| | | | | core I protein | |
| 220 | AF062534 | 1919 | 100 | genethonin 1 | Homo sapiens |
| 220 | AK050416 | 1083 | 62 | unnamed protein product | Mus musculus |
| 220 | BC022301 | 1919 | 100 | genethonin 1 | Homo sapiens |
| 221 | AAH08950 | 956 | 100 | BC008950 Unknown (protein for | Homo sapiens |
| | | | | MGC: 3593) | |
| 221 | AF112202_1 | 956 | 100 | AF112202 prenylated rab acceptor 1 | Homo sapiens |
| 221 | AJ133534 | 951 | 99 | prenylated Rab acceptor 1 (PRA1) | Homo sapiens |
| 222 | AAH14257 | 888 | 100 | BC014257 Similar to DKFZp564J157 | Homo sapiens |
| | | | | protein | |
| 222 | AAH16064 | 888 | 100 | BC016064 DKFZp564J157 protein | Homo sapiens |
| 222 | AX405840 | 888 | 100 | unnamed protein product | Homo sapiens |
| 223 | AAH02394 | 2275 | 100 | BC002394 ceroid-lipofuscinosis, | Homo sapiens |
| | | | | neuronal 3, juvenile (Batten, | |
| | | | | Spielmeyer-Vogt disease) | |
| 223 | AAH04433 | 2275 | 100 | BC004433 ceroid-lipofuscinosis, | Homo sapiens |
| | | | | neuronal 3, juvenile (Batten, | |
| | | | | Spielmeyer-Vogt disease) | |
| 223 | U32680 | 2275 | 100 | CLN3 protein | Homo sapiens |
| 224 | AF443072_1 | 17656 | 99 | AF443072 laminin alpha5 chain | Homo sapiens |
| | | | | precursor | |
| 224 | AL354836 | 17668 | 99 | bA157P1.1.1 (laminin alpha 5) | Homo sapiens |
| 224 | AX463738 | 17656 | 99 | laminin 5 | Homo sapiens |
| 225 | BC024366 | 703 | 100 | ribosomal protein L27 | Mus musculus |
| 225 | X07424 | 703 | 100 | ribosomal protein L27 (AA 1-136) | Rattus |
| | | | | | norvegicus |
| 225 | X56852 | 703 | 100 | ribosomal protein L27 | Gallus |
| | | | | | gallus |
| 226 | AAH13131 | 969 | 100 | BC013131 Similar to hypothetical | Homo sapiens |
| | | | | protein FLJ10702 | |
| 226 | AK001564 | 969 | 100 | unnamed protein product | Homo sapiens |
| 226 | BC013719 | 969 | 100 | hypothetical protein FLJ10702 | Mus musculus |
| 227 | AF214737_1 | 5676 | 100 | AF214737 C9orf10a | Homo sapiens |
| 227 | BC010304 | 3765 | 93 | Unknown (protein for | Mus musculus |
| | | | | IMAGE: 3597827) | |
| 227 | D80005 | 5676 | 100 | KIAA0183 | Homo sapiens |
| 228 | AF113127_1 | 1186 | 99 | AF113127 S1R protein | Homo sapiens |
| 228 | AF151877_1 | 1203 | 94 | AF151877 CGI-119 protein | Homo sapiens |
| 228 | AF182041_1 | 1186 | 99 | AF182041 z-protein | Homo sapiens |
| 229 | AAH11616 | 1514 | 100 | BC011616 Similar to cyclin D3 | Homo sapiens |
| 229 | AF517525_1 | 1511 | 99 | AF517525 cyclin D3 | Homo sapiens |
| 229 | M92287 | 1514 | 100 | cyclin D3 | Homo sapiens |
| 230 | AAH11581 | 4280 | 100 | BC011581 Similar to oxysterol | Homo sapiens |
| | | | | binding protein | |
| 230 | AF185696_1 | 4280 | 100 | AF185696 oxysterol-binding | Homo sapiens |
| | | | | protein 1 | |
| 230 | AF185705 | 4280 | 100 | oxysterol binding protein 1 | Homo sapiens |
| 231 | AF053745 | 462 | 32 | pol polyprotein | Mus dunni |
| | | | | | endogenous |
| | | | | | virus |
| 231 | AF151794 | 473 | 35 | pol protein | Phascolarctos |
| | | | | | cinereus |
| 231 | D10032 | 506 | 36 | gag-pol precursor polyprotein | Baboon |
| | | | | | endogenous |
| | | | | | virus strain |
| | | | | | M7 |
| 232 | AF012920 | 625 | 100 | GEC-1 | Cavia |
| | | | | | porcellus |
| 232 | AF312680 | 625 | 100 | GEC-1 | Cavia |
| | | | | | porcellus |
| 232 | BC004602 | 625 | 100 | RIKEN cDNA 9130422N19 gene | Mus musculus |
| 233 | AAH14241 | 1733 | 100 | BC014241 Similar to hypothetical | Homo sapiens |
| | | | | protein, MGC: 7035 | |
| 233 | AB093636 | 1687 | 96 | hypothetical protein | Macaca |
| | | | | | fascicularis |
| 233 | AK046512 | 1274 | 74 | unnamed protein product | Mus musculus |
| 234 | AF140240_1 | 749 | 100 | AF140240 transcription factor | Homo sapiens |
| | | | | TBX3 | |
| 234 | AK075457 | 749 | 100 | unnamed protein product | Homo sapiens |
| 234 | BC025258 | 749 | 100 | T-box 3 (ulnar mammary syndrome) | Homo sapiens |
| 235 | AB062477 | 166 | 64 | OK/SW-CL.41 | Homo sapiens |
| 235 | AK054840 | 167 | 65 | unnamed protein product | Homo sapiens |
| 235 | AK092888 | 224 | 74 | unnamed protein product | Homo sapiens |
| 236 | AAH01863 | 320 | 100 | BC001863 hypoxia-inducible | Homo sapiens |
| | | | | protein 2 | |
| 236 | AF144755_1 | 320 | 100 | AF144755 hypoxia-inducible | Homo sapiens |
| | | | | protein 2 | |
| 236 | AX105363 | 320 | 100 | unnamed protein product | Homo sapiens |
| 237 | AAH00718 | 1025 | 97 | BC000718 Similar to dynamitin | Homo sapiens |
| | | | | (dynactin complex 50 kD subunit) | |
| 237 | AAH09468 | 1025 | 97 | BC009468 dynactin 2 (p50) | Homo sapiens |
| 237 | AAH14083 | 1025 | 97 | BC014083 dynactin 2 (p50) | Homo sapiens |
| 238 | AB037669 | 2790 | 100 | L-type amino acid transporter 2 | Homo sapiens |
| 238 | AF171669_1 | 2790 | 100 | AF171669 glycoprotein-associated | Homo sapiens |
| | | | | amino acid transporter LAT2 | |
| 238 | Y18483 | 2778 | 99 | SLC7A8 protein | Homo sapiens |
| 239 | AF118094_21 | 187 | 48 | AF118082 PRO1902 | Homo sapiens |
| 239 | AF119917_13 | 158 | 61 | AF119851 PRO1722 | Homo sapiens |
| 239 | AK097266 | 185 | 60 | unnamed protein product | Homo sapiens |
| 240 | AK075392 | 1353 | 90 | unnamed protein product | Homo sapiens |
| 240 | AX136157 | 1353 | 90 | unnamed protein product | Homo sapiens |
| 240 | AX179293 | 1356 | 90 | 21676 ADH | Homo sapiens |
| 241 | AF328769_1 | 2426 | 91 | AF328769 PC2-glutamine-rich- | Homo sapiens |
| | | | | associated protein | |
| 241 | AK090465 | 2677 | 99 | FLJ00386 protein | Homo sapiens |
| 241 | BC017110 | 2677 | 99 | Unknown (protein for MGC: 16010) | Homo sapiens |
| 242 | AAH10514 | 2363 | 100 | BC010514 clusterin (complement | Homo sapiens |
| | | | | lysis inhibitor, SP-40,40, | |
| | | | | sulfated glycoprotein 2, | |
| | | | | testosterone-repressed prostate | |
| | | | | message 2, apolipoprotein J) | |
| 242 | AAH19588 | 2363 | 100 | BC019588 clusterin (complement | Homo sapiens |
| | | | | lysis inhibitor, SP-40,40, | |
| | | | | sulfated glycoprotein 2, | |
| | | | | testosterone-repressed prostate | |
| | | | | message 2, apolipoprotein J) | |
| 242 | X14723 | 2363 | 100 | SP-40,40 prepropetide (AA −22 to | Homo sapiens |
| | | | | 427) | |
| 243 | AAH06786 | 1161 | 100 | BC006786 cellular repressor of | Homo sapiens |
| | | | | E1A-stimulated genes | |
| 243 | AAH08628 | 1161 | 100 | BC008628 cellular repressor of | Homo sapiens |
| | | | | E1A-stimulated genes | |
| 243 | AF084523 | 1161 | 100 | cellular repressor of E1A- | Homo sapiens |
| | | | | stimulated genes CREG | |
| 244 | AX167114 | 8220 | 99 | unnamed protein product | Homo sapiens |
| 244 | BC036531 | 8206 | 99 | Unknown (protein for MGC: 33668) | Homo sapiens |
| 244 | Z74615 | 8220 | 99 | prepro-alpha1(I) collagen | Homo sapiens |
| 245 | AB025412 | 5671 | 98 | Ten-m3 | Mus musculus |
| 245 | AF195418_1 | 5676 | 99 | AF195418 ODZ3 | Mus musculus |
| 245 | AK001336 | 5447 | 100 | unnamed protein product | Homo sapiens |
| 246 | AAH03550 | 1419 | 100 | BC003550 Similar to CGI-20 | Homo sapiens |
| | | | | protein | |
| 246 | AF132954_1 | 1577 | 99 | AF132954 CGI-20 protein | Homo sapiens |
| 246 | AK003551 | 1613 | 95 | unnamed protein product | Mus musculus |
| 247 | BC022512 | 242 | 96 | platelet/endothelial cell | Homo sapiens |
| | | | | adhesion molecule (CD31 antigen) | |
| 247 | L34657 | 242 | 96 | platelet endothelial cell | Homo sapiens |
| | | | | adhesion molecule-1 | |
| 247 | M28526 | 242 | 96 | PECAM-1 precursor | Homo sapiens |
| 248 | AAH12138 | 1849 | 100 | BC012138 Similar to guanine | Homo sapiens |
| | | | | nucleotide binding protein (G | |
| | | | | protein), alpha inhibiting | |
| | | | | activity polypeptide 2 | |
| 248 | AF493906_1 | 1849 | 100 | AF493906 guanine nucleotide | Homo sapiens |
| | | | | binding protein alpha i2 | |
| 248 | X04828 | 1849 | 100 | G protein alpha-subunit (AA 1-355) | Homo sapiens |
| 249 | AF081258_1 | 3091 | 100 | AF081258 testis-specific | Homo sapiens |
| | | | | chromodomain Y-like protein | |
| 249 | AF081259_1 | 3091 | 100 | AF081259 testis-specific | Homo sapiens |
| | | | | chromodomain Y-like protein | |
| 249 | AF081261_1 | 2614 | 88 | AF081261 testis-specific | Mus musculus |
| | | | | chromodomain Y-like protein | |
| 250 | AF162856_1 | 5147 | 65 | AF162856 receptor-like protein | Mus musculus |
| | | | | tyrosine phosphatase rho-1 | |
| 250 | X58287 | 7569 | 97 | protein-tyrosine phosphatase | Mus musculus |
| 250 | X58288 | 7731 | 99 | protein-tyrosine phosphatase | Homo sapiens |
| 251 | AK096998 | 303 | 65 | unnamed protein product | Homo sapiens |
| 251 | AK097965 | 304 | 73 | unnamed protein product | Homo sapiens |
| 251 | BC033959 | 333 | 77 | similar to Alu subfamily SQ | Homo sapiens |
| | | | | sequence contamination warning | |
| | | | | entry | |
| 252 | AAH18991 | 1272 | 100 | BC018991 hepatoma-derived growth | Homo sapiens |
| | | | | factor (high-mobility group | |
| | | | | protein 1-like) | |
| 252 | AJ237996 | 1205 | 95 | hepatoma derived growth factor | Bos taurus |
| 252 | D16431 | 1272 | 100 | hepatoma-derived GF | Homo sapiens |
| 253 | AAH17197 | 1785 | 99 | BC017197 myeloid cell leukemia | Homo sapiens |
| | | | | sequence 1 (BCL2-related) | |
| 253 | AF147742_1 | 1785 | 99 | AF147742 myeloid cell | Homo sapiens |
| | | | | differentiation protein | |
| 253 | AF162677 | 1785 | 99 | myeloid cell leukemia protein 1 | Homo sapiens |
| 254 | AF274892 | 2520 | 100 | glucose transporter 3 | Homo sapiens |
| 254 | BC039196 | 2520 | 100 | solute carrier family 2 | Homo sapiens |
| | | | | (facilitated glucose | |
| | | | | transporter), member 3 | |
| 254 | M20681 | 2520 | 100 | glucose transporter-like protein | Homo sapiens |
| 255 | AAH00730 | 3448 | 100 | BC000730 calpain 6 | Homo sapiens |
| 255 | AJ000388 | 3439 | 99 | calpain-like protease, CANPX | Homo sapiens |
| 255 | AL031117 | 3448 | 100 | dJ914P14.1 (calpain-like protease | Homo sapiens |
| | | | | CANPX) | |
| 256 | AAH03143 | 1980 | 100 | BC003143 dual specificity | Homo sapiens |
| | | | | phosphatase 6 | |
| 256 | AAH03562 | 1980 | 100 | BC003562 dual specificity | Homo sapiens |
| | | | | phosphatase 6 | |
| 256 | X93920 | 1980 | 100 | protein-tyrosine-phosphatase | Homo sapiens |
| 257 | AB023194 | 6006 | 100 | KIAA0977 protein | Homo sapiens |
| 257 | AK052533 | 3549 | 61 | unnamed protein product | Mus musculus |
| 257 | AL049939 | 1823 | 99 | hypothetical protein | Homo sapiens |
| 258 | AAH15031 | 4447 | 100 | BC015031 Unknown (protein for | Homo sapiens |
| | | | | MGC: 9105) | |
| 258 | AB018266 | 4447 | 100 | KIAA0723 protein | Homo sapiens |
| 258 | BC029070 | 4375 | 98 | Similar to matrin 3 | Mus musculus |
| 259 | AAH18726 | 1229 | 100 | BC018726 CD74 antigen (invariant | Homo sapiens |
| | | | | polypeptide of major | |
| | | | | histocompatibility complex, class | |
| | | | | II antigen-associated) | |
| 259 | M13560 | 1229 | 100 | cell surface glycoprotein | Homo sapiens |
| 259 | X00497 | 1229 | 100 | putative p33 | Homo sapiens |
| 260 | AF114262_3 | 2305 | 88 | AF114260 forkhead protein AFXH | Mus musculus |
| 260 | X93996 | 2624 | 100 | AFX | Homo sapiens |
| 260 | Y11284 | 2489 | 97 | AFX1 | Homo sapiens |
| 261 | AAH09409 | 1688 | 100 | BC009409 Unknown (protein for | Homo sapiens |
| | | | | MGC: 10655) | |
| 261 | X13425 | 1688 | 100 | GA733-1 protein (AA 1-323) | Homo sapiens |
| 261 | X77754 | 1688 | 100 | gp50/TROP-2 | Homo sapiens |
| 262 | AAH02532 | 795 | 100 | BC002532 epididymal secretory | Homo sapiens |
| | | | | protein (19.5 kD) | |
| 262 | X67698 | 795 | 100 | orf | Homo sapiens |
| 262 | X78134 | 795 | 100 | epididymal secretory protein 14.6 | Macaca |
| | | | | | fascicularis |
| 263 | AK075092 | 233 | 100 | unnamed protein product | Homo sapiens |
| 264 | AAH16692 | 1163 | 100 | BC016692 progesterone receptor | Homo sapiens |
| | | | | membrane component 2 | |
| 264 | AJ002030 | 1163 | 100 | progresterone binding protein | Homo sapiens |
| 264 | AY069921 | 525 | 60 | membrane progesterone receptor- | Oncorhynchus |
| | | | | like protein | mykiss |
| 265 | AAH16041 | 1441 | 100 | BC016041 insulin-like growth | Homo sapiens |
| | | | | factor-binding protein 4 | |
| 265 | M62403 | 1441 | 100 | IGF-BP 4 | Homo sapiens |
| 265 | Y12508 | 1441 | 100 | insulin-like growth factor | Homo sapiens |
| | | | | binding protein 4 | |
| 266 | AK000575 | 734 | 100 | unnamed protein product | Homo sapiens |
| 266 | AK013438 | 484 | 72 | unnamed protein product | Mus musculus |
| 266 | AY116892 | 734 | 100 | HCF-1 beta-propeller interacting | Homo sapiens |
| | | | | protein | |
| 267 | AAH14410 | 2273 | 100 | BC014410 Similar to EGF- | Homo sapiens |
| | | | | containing fibulin-like | |
| | | | | extracellular matrix protein 1 | |
| 267 | AK077302 | 2156 | 93 | unnamed protein product | Mus musculus |
| 267 | AY004330 | 2273 | 100 | EGF-containing fibulin-like | Homo sapiens |
| | | | | extracellular matrix protein 1 | |
| 268 | AF102552 | 11066 | 84 | 270 kDa ankyrin G isoform | Rattus |
| | | | | | norvegicus |
| 268 | L40632 | 7184 | 95 | ankyrin 3 | Mus musculus |
| 268 | U13616 | 20107 | 99 | ankyrin G | Homo sapiens |
| 269 | AC002073 | 3406 | 100 | Lim Kinase | Homo sapiens |
| 269 | AL117466 | 3183 | 100 | hypothetical protein | Homo sapiens |
| 269 | D45906 | 3406 | 100 | LIMK-2 | Homo sapiens |
| 270 | AAH00836 | 633 | 100 | BC000836 CGI-127 protein | Homo sapiens |
| 270 | AF135161_1 | 633 | 100 | AF135161 unknown | Homo sapiens |
| 270 | AF151885_1 | 633 | 100 | AF151885 CGI-127 protein | Homo sapiens |
| 271 | A16768 | 356 | 79 | kunitz type protease inhibitor | synthetic |
| | | | | | construct |
| 271 | BC033174 | 501 | 98 | Similar to collagen, type VI, | Homo sapiens |
| | | | | alpha 3 | |
| 271 | X52022 | 501 | 98 | collagen type VI, alpha 3 chain | Homo sapiens |
| 272 | AAH04440 | 405 | 100 | BC004440 Unknown (protein for | Homo sapiens |
| | | | | MGC: 4033) | |
| 272 | AAH19336 | 424 | 98 | BC019336 Unknown (protein for | Homo sapiens |
| | | | | IMAGE: 3617778) | |
| 272 | U91512 | 399 | 98 | ninjurin | Homo sapiens |
| 273 | AAH18127 | 1250 | 93 | BC018127 Similar to | Homo sapiens |
| | | | | Peptidylglycine alpha-amidating | |
| | | | | monooxygenase | |
| 273 | AB095007 | 1250 | 93 | peptidylglycine alpha-amidating | Homo sapiens |
| | | | | monooxygenase | |
| 273 | AF035320 | 1279 | 100 | peptidylglycine alpha-amidating | Homo sapiens |
| | | | | monooxygenase | |
| 274 | AAH13398 | 6167 | 100 | BC013398 pumilio (Drosophila) | Homo sapiens |
| | | | | homolog 1 | |
| 274 | AF315592_1 | 6167 | 100 | AF315592 Pumilio 1 | Homo sapiens |
| 274 | D43951 | 6233 | 100 | KIAA0099 protein | Homo sapiens |
| 275 | AAH00465 | 826 | 100 | BC000465 growth arrest and DNA- | Homo sapiens |
| | | | | damage-inducible, gamma | |
| 275 | AAH19325 | 826 | 100 | BC019325 growth arrest and DNA- | Homo sapiens |
| | | | | damage-inducible, gamma | |
| 275 | AF494037_1 | 826 | 100 | AF494037 growth arrest and DNA- | Homo sapiens |
| | | | | damage-inducible, gamma | |
| 276 | AAH01955 | 883 | 100 | BC001955 ribosomal protein S10 | Homo sapiens |
| 276 | AAH04334 | 883 | 100 | BC004334 ribosomal protein S10 | Homo sapiens |
| 276 | AAH05012 | 883 | 100 | BC005012 ribosomal protein S10 | Homo sapiens |
| 277 | AAH12740 | 4687 | 99 | BC012740 Similar to dystroglycan | Homo sapiens |
| | | | | 1 (dystrophin-associated | |
| | | | | glycoprotein 1) | |
| 277 | AAH14616 | 4687 | 99 | BC014616 Unknown (protein for | Homo sapiens |
| | | | | MGC: 3618) | |
| 277 | L19711 | 4703 | 100 | dystroglycan | Homo sapiens |
| 278 | AAH20983 | 583 | 100 | BC020983 pituitary tumor- | Homo sapiens |
| | | | | transforming 1 interacting | |
| | | | | protein | |
| 278 | BC031097 | 583 | 100 | pituitary tumor-transforming 1 | Homo sapiens |
| | | | | interacting protein | |
| 278 | BC034250 | 583 | 100 | pituitary tumor-transforming 1 | Homo sapiens |
| | | | | interacting protein | |
| 279 | AAH07082 | 185 | 100 | BC007082 SWI/SNF related, matrix | Homo sapiens |
| | | | | associated, actin dependent | |
| | | | | regulator of chromatin, subfamily | |
| | | | | e, member 1 | |
| 279 | AAH11017 | 185 | 100 | BC011017 SWI/SNF related, matrix | Homo sapiens |
| | | | | associated, actin dependent | |
| | | | | regulator of chromatin, subfamily | |
| | | | | e, member 1 | |
| 279 | AF035262 | 185 | 100 | BAF57 | Homo sapiens |
| 281 | AF099154 | 13656 | 86 | von Willebrand factor | Canis |
| | | | | | familiaris |
| 281 | M25865 | 15510 | 99 | von Willebrand factor | Homo sapiens |
| 281 | X04385 | 15515 | 100 | VWF pre-pro-polypeptide (−22 to | Homo sapiens |
| | | | | 2791) | |
| 282 | AAH17692 | 1500 | 78 | BC017692 Similar to quiescin Q6 | Homo sapiens |
| 282 | AF361868 | 1492 | 78 | sulfhydryl oxidase | Homo sapiens |
| 282 | U97276 | 2262 | 84 | quiescin | Homo sapiens |
| 284 | AAH12123 | 1528 | 100 | BC012123 golgi phosphoprotein 3 | Homo sapiens |
| 284 | AJ296152 | 1528 | 100 | Golgi protein | Homo sapiens |
| 284 | BC033725 | 1528 | 100 | golgi phosphoprotein 3 (coat- | Homo sapiens |
| | | | | protein) | |
| 285 | AAH08726 | 2687 | 100 | BC008726 oxidative-stress | Homo sapiens |
| | | | | responsive 1 | |
| 285 | AB017642 | 2687 | 100 | oxidative-stress responsive 1 | Homo sapiens |
| 285 | AB029024 | 2355 | 100 | KIAA1101 protein | Homo sapiens |
| 286 | AAH00478 | 3403 | 99 | BC000478 heat shock 70 kD protein | Homo sapiens |
| | | | | 9B (mortalin-2) | |
| 286 | BC024034 | 3403 | 99 | heat shock 70 kD protein 9B | Homo sapiens |
| | | | | (mortalin-2) | |
| 286 | BC030634 | 3399 | 99 | heat shock 70 kD protein 9B | Homo sapiens |
| | | | | (mortalin-2) | |
| 287 | BC006834 | 892 | 100 | B-cell translocation gene 1, | Mus musculus |
| | | | | anti-proliferative | |
| 287 | BC018309 | 892 | 100 | B-cell translocation gene 1, | Mus musculus |
| | | | | anti-proliferative | |
| 287 | Z16410 | 892 | 100 | btg1 | Mus musculus |
| 288 | AE003667 | 256 | 81 | CG9318-PA | Drosophila |
| | | | | | melanogaster |
| 288 | AF026213 | 244 | 71 | Hypothetical protein F08F1.7 | Caenorhabditis |
| | | | | | elegans |
| 288 | AY069665 | 256 | 81 | LD44273p | Drosophila |
| | | | | | melanogaster |
| 289 | A03736 | 3879 | 100 | factor XIIIa | Homo sapiens |
| 289 | M14354 | 3879 | 100 | clotting factor XIIIa precursor | Homo sapiens |
| | | | | (EC 2.3.2.13) | |
| 289 | M14539 | 4016 | 99 | factor XIII precursor | Homo sapiens |
| 290 | AAH06541 | 969 | 99 | BC006541 integrin, beta 5 | Homo sapiens |
| 290 | J05633 | 962 | 98 | integrin beta-5 subunit precursor | Homo sapiens |
| 290 | X53002 | 969 | 99 | precusor polypeptide (AA −23 to | Homo sapiens |
| | | | | 776) | |
| 291 | D50929 | 7262 | 100 | The KIAA0139 gene product is | Homo sapiens |
| | | | | related to mouse centrosomin B. | |
| 291 | U58046 | 7262 | 100 | p167 | Homo sapiens |
| 291 | U78311 | 7262 | 100 | translation initiation factor 3 | Homo sapiens |
| | | | | large subunit | |
| 292 | AAH01571 | 2935 | 100 | BC001571 eukaryotic translation | Homo sapiens |
| | | | | initiation factor 3, subunit 8 | |
| | | | | (110 kD) | |
| 292 | AC002544 | 2935 | 100 | Translation initiation factor | Homo sapiens |
| | | | | eIF-p110 | |
| 292 | U46025 | 2935 | 100 | translation intiation factor eIF- | Homo sapiens |
| | | | | 3 p110 subunit | |
| 293 | AB019987 | 6513 | 99 | chromosome-associated | Homo sapiens |
| | | | | polypeptide-C | |
| 293 | AF092564 | 6041 | 99 | chromosome-associated protein-C | Homo sapiens |
| 293 | AL136877 | 6517 | 100 | hypothetical protein | Homo sapiens |
| 294 | AAH01756 | 2880 | 99 | BC001756 phosphoglucomutase 1 | Homo sapiens |
| 294 | AAH19920 | 2873 | 99 | BC019920 Unknown (protein for | Homo sapiens |
| | | | | MGC: 29909) | |
| 294 | M83088 | 2880 | 99 | PGM1 | Homo sapiens |
| 295 | AB020664 | 3759 | 100 | KIAA0857 protein | Homo sapiens |
| 295 | AF334812_1 | 3333 | 100 | AF334812 Rab11 interacting | Homo sapiens |
| | | | | protein Rip11a | |
| 295 | BC035013 | 3303 | 99 | Similar to Rab coupling protein | Homo sapiens |
| 296 | AF356518_1 | 1637 | 100 | AF356518 junctional adhesion | Homo sapiens |
| | | | | molecule 3 precursor | |
| 296 | AF448478_1 | 1637 | 100 | AF448478 junctional adhesional | Homo sapiens |
| | | | | molecule-3 | |
| 296 | AJ416101 | 1870 | 100 | junction adhesion molecule 3 | Homo sapiens |
| 297 | AF130117_48 | 239 | 76 | AF130089 PRO2550 | Homo sapiens |
| 297 | AK000385 | 240 | 76 | unnamed protein product | Homo sapiens |
| 297 | AK090988 | 218 | 71 | unnamed protein product | Homo sapiens |
| 298 | AAH01562 | 3284 | 100 | BC001562 nuclear receptor | Homo sapiens |
| | | | | coactivator 4 | |
| 298 | AL162047 | 3284 | 100 | hypothetical protein | Homo sapiens |
| 298 | L49399 | 3284 | 100 | ORF | Homo sapiens |
| 299 | AAH02356 | 2379 | 100 | BC002356 nucleobindin 1 | Homo sapiens |
| 299 | M96824 | 2326 | 98 | nucleobindin | Homo sapiens |
| 299 | U31342 | 2357 | 99 | nucleobindin | Homo sapiens |
| 300 | AAH17180 | 4694 | 100 | BC017180 Unknown (protein for | Homo sapiens |
| | | | | MGC: 790) | |
| 300 | AK088028 | 4597 | 97 | unnamed protein product | Mus musculus |
| 300 | BC007126 | 4597 | 97 | Unknown (protein for MGC: 5677) | Mus musculus |
| 301 | AAH08099 | 378 | 100 | BC008099 Unknown (protein for | Homo sapiens |
| | | | | IMAGE: 4183312) | |
| 301 | AAH18427 | 214 | 100 | BC018427 Unknown (protein for | Homo sapiens |
| | | | | IMAGE: 4515233) | |
| 302 | AF137053_1 | 2310 | 99 | AF137053 mutant desmin | Homo sapiens |
| 302 | BC032116 | 2313 | 99 | desmin | Homo sapiens |
| 302 | U59167 | 2325 | 100 | desmin | Homo sapiens |
| 303 | AL445795 | 23376 | 99 | heparan sulfate proteoglycan | Homo sapiens |
| | | | | perlecan | |
| 303 | M85289 | 23477 | 99 | heparan sulfate proteoglycan | Homo sapiens |
| 303 | X62515 | 23627 | 99 | Human basement membrane heparan | Homo sapiens |
| | | | | sulfate proteoglycan core protein | |
| 304 | AK025116 | 206 | 48 | unnamed protein product | Homo sapiens |
| 304 | AK057830 | 227 | 49 | unnamed protein product | Homo sapiens |
| 304 | AK090511 | 194 | 51 | unnamed protein product | Homo sapiens |
| 305 | AAH00429 | 309 | 100 | BC000429 chromosome 14 open | Homo sapiens |
| | | | | reading frame 2 | |
| 305 | AAH01944 | 309 | 100 | BC001944 chromosome 14 open | Homo sapiens |
| | | | | reading frame 2 | |
| 305 | AF054175 | 309 | 100 | mitochondrial proteolipid 68MP | Homo sapiens |
| | | | | homolog | |
| 306 | AAH01263 | 2152 | 100 | BC001263 serum/glucocorticoid | Homo sapiens |
| | | | | regulated kinase | |
| 306 | AF153609_1 | 2152 | 100 | AF153609 serine/threonine protein | Homo sapiens |
| | | | | kinase sgk | |
| 306 | AX553549 | 2152 | 100 | unnamed protein product | Homo sapiens |
| 307 | AAH07103 | 710 | 100 | BC007103 small acidic protein | Homo sapiens |
| 307 | AAH16352 | 710 | 100 | BC016352 small acidic protein | Homo sapiens |
| 307 | AAH20937 | 710 | 100 | BC020937 small acidic protein | Homo sapiens |
| 309 | AY043487 | 412 | 100 | selenoprotein SelM | Homo sapiens |
| 309 | AY043488 | 367 | 85 | selenoprotein SelM | Mus musculus |
| 309 | BC019742 | 345 | 85 | Unknown (protein for MGC: 30803) | Mus musculus |
| 310 | AF124719_1 | 1018 | 100 | AF124719 GM2 activator protein | Homo sapiens |
| 310 | X61095 | 1039 | 97 | GM2-activator protein | Homo sapiens |
| 310 | X62078 | 1018 | 100 | GM2 activator protein | Homo sapiens |
| 311 | AB028974 | 1802 | 100 | KIAA1051 protein | Homo sapiens |
| 311 | AX082622 | 1995 | 100 | unnamed protein product | Homo sapiens |
| 311 | AX082622 | 2129 | 100 | unnamed protein product | Homo sapiens |
| 312 | BC026690 | 3964 | 100 | CD97 antigen | Homo sapiens |
| 312 | U76764 | 3796 | 87 | CD97 | Homo sapiens |
| 312 | X84700 | 3951 | 99 | leucocyte antigen CD97 | Homo sapiens |
| 313 | K03195 | 2422 | 99 | glucose transporter glycoprotein | Homo sapiens |
| 313 | M13979 | 2367 | 97 | glucose-transporter protein | Rattus |
| | | | | | norvegicus |
| 313 | M22063 | 2367 | 97 | glucose transporter protein | Rattus |
| | | | | | norvegicus |
| 314 | AAH19297 | 1801 | 100 | BC019297 Unknown (protein for | Homo sapiens |
| | | | | MGC: 4111) | |
| 314 | AK021655 | 1801 | 100 | unnamed protein product | Homo sapiens |
| 314 | AK022757 | 1801 | 100 | unnamed protein product | Homo sapiens |
| 315 | AC005943 | 1522 | 100 | methyl-CpG binding protein MBD3 | Homo sapiens |
| 315 | AF072247 | 1522 | 100 | methyl-CpG binding domain- | Homo sapiens |
| | | | | containing protein MBD3 | |
| 315 | AF072248 | 1427 | 95 | methyl-CpG binding domain- | Mus musculus |
| | | | | containing protein MBD3 | |
| 316 | AB018009 | 2602 | 100 | L-type amino acid transporter 1 | Homo sapiens |
| 316 | AB018542 | 2602 | 100 | CD98 light chain | Homo sapiens |
| 316 | AF104032 | 2602 | 100 | L-type amino acid transporter | Homo sapiens |
| | | | | subunit LAT1 | |
| 318 | AAH10737 | 1911 | 100 | BC010737 Similar to reticulon 4 | Homo sapiens |
| 318 | AAH12619 | 1911 | 100 | BC012619 Unknown (protein for | Homo sapiens |
| | | | | MGC: 13655) | |
| 318 | BC026788 | 1911 | 100 | reticulon 4 | Homo sapiens |
| 319 | AAH02412 | 3766 | 99 | BC002412 inner membrane protein, | Homo sapiens |
| | | | | mitochondrial (mitofilin) | |
| 319 | D21094 | 3766 | 99 | motor protein | Homo sapiens |
| 319 | L42572 | 3771 | 100 | transmembrane protein | Homo sapiens |
| 320 | AAH01925 | 573 | 100 | BC001925 FK506-binding protein 1A | Homo sapiens |
| | | | | (12 kD) | |
| 320 | AAH05147 | 573 | 100 | BC005147 FK506-binding protein 1A | Homo sapiens |
| | | | | (12 kD) | |
| 320 | M93060 | 573 | 100 | FK506-binding protein 12 | Homo sapiens |
| 321 | AF116721_20 | 391 | 100 | AF116620 PRO1068 | Homo sapiens |
| 322 | AK075023 | 1335 | 99 | unnamed protein product | Homo sapiens |
| 322 | AL117442 | 1344 | 100 | hypothetical protein | Homo sapiens |
| 322 | BC002138 | 1302 | 96 | Unknown (protein for | Mus musculus |
| | | | | IMAGE: 3484538) | |
| 323 | AAH07674 | 382 | 100 | BC007674 CD24 antigen (small cell | Homo sapiens |
| | | | | lung carcinoma cluster 4 antigen) | |
| 323 | L33930 | 382 | 100 | signal transducer CD24 | Homo sapiens |
| 323 | M58664 | 382 | 100 | signal transducer CD24 | Homo sapiens |
| 324 | AAH12181 | 4260 | 100 | BC012181 Similar to paired basic | Homo sapiens |
| | | | | amino acid cleaving enzyme | |
| | | | | (furin, membrane associated | |
| | | | | receptor protein) | |
| 324 | U20436 | 4060 | 95 | furin endoprotease | Cricetulus |
| | | | | | griseus |
| 324 | X17094 | 4260 | 100 | furin (AA 1-794) | Homo sapiens |
| 325 | AAH15236 | 876 | 100 | BC015236 hypothetical protein | Homo sapiens |
| 325 | AF335324_1 | 876 | 100 | AF335324 RTP801 | Homo sapiens |
| 325 | AY090097 | 876 | 100 | REDD-1 | Homo sapiens |
| 326 | AK000496 | 332 | 66 | unnamed protein product | Homo sapiens |
| 326 | AK025116 | 327 | 69 | unnamed protein product | Homo sapiens |
| 326 | AK057830 | 358 | 69 | unnamed protein product | Homo sapiens |
| 327 | AAH10058 | 3813 | 100 | BC010058 exostoses (multiple) 2 | Homo sapiens |
| 327 | U62740 | 3813 | 100 | EXT2 | Homo sapiens |
| 327 | U67368 | 3813 | 100 | multiple exostosis 2 | Homo sapiens |
| 328 | AAH08301 | 1967 | 100 | BC008301 tuftelin 1 | Homo sapiens |
| 328 | AF254260_1 | 1967 | 100 | AF254260 tuftelin 1 | Homo sapiens |
| 328 | AF254860 | 1967 | 100 | tuftelin 1 | Homo sapiens |
| 330 | AF272662_1 | 6961 | 80 | AF272662 alpha 1 type V collagen | Rattus |
| | | | | | norvegicus |
| 330 | D90279 | 7452 | 86 | collagen alpha 1(V) chain | Homo sapiens |
| | | | | precursor | |
| 330 | M76729 | 7422 | 85 | pro-alpha-1 type V collagen | Homo sapiens |
| 331 | AAH03155 | 1193 | 76 | BC003155 coatomer protein | Homo sapiens |
| | | | | complex, subunit epsilon | |
| 331 | AAH07250 | 1193 | 76 | BC007250 coatomer protein | Homo sapiens |
| | | | | complex, subunit epsilon | |
| 331 | AAH17285 | 1193 | 76 | BC017285 Unknown (protein for | Homo sapiens |
| | | | | MGC: 29652) | |
| 332 | AX354381 | 347 | 100 | unnamed protein product | Homo sapiens |
| 333 | AF202636_1 | 2164 | 100 | AF202636 angiopoietin-like | Homo sapiens |
| | | | | protein PP1158 | |
| 333 | AX079971 | 2164 | 100 | unnamed protein product | Homo sapiens |
| 333 | BC023647 | 2164 | 100 | angiopoietin-like 4 | Homo sapiens |
| 334 | AAH12777 | 162 | 100 | BC012777 Unknown (protein for | Homo sapiens |
| | | | | MGC: 16395) | |
| 334 | AK056767 | 1189 | 100 | unnamed protein product | Homo sapiens |
| 334 | AL831913 | 713 | 85 | hypothetical protein | Homo sapiens |
| 335 | AAH01270 | 1896 | 100 | BC001270 SH3-domain GRB2-like 1 | Homo sapiens |
| 335 | U65999 | 1896 | 100 | SH3-containing protein EEN | Homo sapiens |
| 335 | X99656 | 1896 | 100 | SH3-containing Grb-2-like 1 | Homo sapiens |
| 336 | AAH00385 | 4505 | 100 | BC000385 Unknown (protein for | Homo sapiens |
| | | | | MGC: 8429) | |
| 336 | AF102803 | 4505 | 100 | alphaE-catenin | Homo sapiens |
| 336 | D13866 | 4505 | 100 | alpha-catenin | Homo sapiens |
| 337 | AAH07564 | 601 | 90 | BC007564 annexin All | Homo sapiens |
| 337 | AJ278464 | 601 | 90 | annexin All | Homo sapiens |
| 337 | AJ278465 | 601 | 90 | annexin All | Homo sapiens |
| 338 | AAH01491 | 1470 | 99 | BC001491 heme oxygenase | Homo sapiens |
| | | | | (decycling) 1 | |
| 338 | X06985 | 1475 | 100 | heme oxygenase (AA 1-288) | Homo sapiens |
| 338 | Z82244 | 1475 | 100 | bK286B10.2 (Heme Oxygenase | Homo sapiens |
| | | | | (decycling) 1 (HO-1 EC | |
| | | | | 1.14.99.3)) | |
| 340 | AAH13910 | 1671 | 100 | BC013910 Similar to death | Homo sapiens |
| | | | | effector domain-containing | |
| 340 | AAH16724 | 1671 | 100 | BC016724 death effector domain- | Homo sapiens |
| | | | | containing | |
| 340 | AJ010973 | 1671 | 100 | DEDD protein | Homo sapiens |
| 341 | A16794 | 881 | 95 | cDNA isolated for this protein | Homo sapiens |
| | | | | using a monoclonal antibody | |
| | | | | directed against the p27k | |
| | | | | prosomal protein | |
| 341 | BC022354 | 956 | 97 | proteasome (prosome, macropain) | Homo sapiens |
| | | | | subunit, alpha type 6 | |
| 341 | D10755 | 956 | 97 | proteasome subunit R-IOTA | Rattus sp. |
| 342 | AAH09581 | 2041 | 100 | BC009581 hydroxysteroid (17-beta) | Homo sapiens |
| | | | | dehydrogenase 2 | |
| 342 | L11708 | 2041 | 100 | 17 beta hydroxysteroid | Homo sapiens |
| | | | | dehydrogenase type 2 | |
| 342 | L40802 | 2041 | 100 | 17-hydroxysteroid dehydrogenase | Homo sapiens |
| 343 | AAH08452 | 586 | 100 | BC008452 ATPase, H+ transporting, | Homo sapiens |
| | | | | lysosomal (vacuolar proton pump), | |
| | | | | member J | |
| 343 | AF038954 | 586 | 100 | vacuolar H(+)-ATPase subunit | Homo sapiens |
| 343 | S82464 | 573 | 96 | vacuolar H(+)-ATPase subunit; V- | Bos taurus |
| | | | | ATPase subunit; M16 | |
| 344 | AE003452 | 193 | 35 | CG9350-PB | Drosophila |
| | | | | | melanogaster |
| 344 | AJ510148 | 571 | 72 | mitochondrial NADH: ubiquinone | Bos taurus |
| | | | | oxidoreductase B14.7 subunit | |
| 344 | AK008201 | 532 | 65 | unnamed protein product | Mus musculus |
| 345 | AB020685 | 3216 | 100 | KIAA0878 protein | Homo sapiens |
| 345 | AK006650 | 2065 | 93 | unnamed protein product | Mus musculus |
| 345 | BC041337 | 3212 | 99 | Rho-related BTB domain containing 3 | Homo sapiens |
| 346 | AB058749 | 1868 | 100 | KIAA1846 protein | Homo sapiens |
| 346 | AK092295 | 1868 | 100 | unnamed protein product | Homo sapiens |
| 346 | AL035661 | 1868 | 100 | dJ568C11.3 (novel AMP-binding | Homo sapiens |
| | | | | enzyme similar to acetyl-coenzyme | |
| | | | | A synthethase (acetate-coA | |
| | | | | ligase)) | |
| 347 | AF009242 | 1168 | 100 | proline-rich Gla protein 1 | Homo sapiens |
| 347 | AF419154 | 577 | 52 | mitotic phosphoprotein 77 | Xenopus |
| | | | | | laevis |
| 347 | BC030786 | 1169 | 84 | proline-rich Gla (G- | Homo sapiens |
| | | | | carboxyglutamic acid) polypeptide 1 | |
| 348 | AF000652 | 1503 | 99 | syntenin | Homo sapiens |
| 348 | AF006636 | 1508 | 100 | melanoma differentiation | Homo sapiens |
| | | | | associated protein-9 | |
| 348 | U83463 | 1503 | 99 | scaffold protein Pbp1 | Homo sapiens |
| 349 | AF312032 | 5200 | 99 | ephrin type-B receptor 4 | Homo sapiens |
| | | | | precursor | |
| 349 | AY056047 | 5200 | 99 | receptor protein tyrosine kinase | Homo sapiens |
| | | | | EphB4 | |
| 349 | U07695 | 5196 | 99 | tyrosine kinase | Homo sapiens |
| 350 | AF015553 | 4955 | 99 | TFII-I protein | Homo sapiens |
| 350 | AF038969 | 4949 | 99 | general transcription factor 2-I | Homo sapiens |
| 350 | Y14946 | 4949 | 99 | SPIN protein | Homo sapiens |
| 351 | AAH07452 | 1442 | 100 | BC007452 Similar to WW domain | Homo sapiens |
| | | | | binding protein 2 | |
| 351 | AAH10616 | 1442 | 100 | BC010616 Unknown (protein for | Homo sapiens |
| | | | | MGC: 18269) | |
| 351 | U79458 | 1458 | 100 | WW domain binding protein-2 | Homo sapiens |
| 352 | AB097511 | 3996 | 93 | hypothetical protein | Macaca |
| | | | | | fascicularis |
| 352 | AL359292 | 7373 | 99 | dJ448K1.1.1 (absent in melanoma | Homo sapiens |
| | | | | 1, isoform 1) | |
| 352 | U83115 | 8577 | 100 | non-lens beta gamma-crystallin | Homo sapiens |
| | | | | like protein | |
| 353 | AAH05921 | 357 | 86 | BC005921 chorionic | Homo sapiens |
| | | | | somatomammotropin hormone 1 | |
| | | | | (placental lactogen) | |
| 353 | AAH20756 | 357 | 86 | BC020756 chorionic | Homo sapiens |
| | | | | somatomammotropin hormone 1 | |
| | | | | (placental lactogen) | |
| 353 | AAH22044 | 357 | 86 | BC022044 chorionic | Homo sapiens |
| | | | | somatomammotropin hormone 2 | |
| 354 | AY158924 | 650 | 100 | histone protein Hist2h2aa2 | Mus musculus |
| 354 | AY158925 | 650 | 100 | histone protein Hist2h2aa1 | Mus musculus |
| 354 | AY158953 | 650 | 100 | histone protein Hist2h3c2 | Mus musculus |
| 355 | AF226614_1 | 2929 | 100 | AF226614 ferroportin1 | Homo sapiens |
| 355 | AF231121_1 | 2929 | 100 | AF231121 iron-regulated | Homo sapiens |
| | | | | transporter IREG1 | |
| 355 | BC037733 | 2929 | 100 | solute carrier family 11 (proton- | Homo sapiens |
| | | | | coupled divalent metal ion | |
| | | | | transporters), member 3 | |
| 356 | AAH01693 | 709 | 100 | BC001693 lectin, galactoside- | Homo sapiens |
| | | | | binding, soluble, 1 (galectin 1) | |
| 356 | AAH20675 | 709 | 100 | BC020675 lectin, galactoside- | Homo sapiens |
| | | | | binding, soluble, 1 (galectin 1) | |
| 356 | X14829 | 709 | 100 | beta-galactoside-binding lectin | Homo sapiens |
| | | | | (AA 1-135) | |
| 357 | AF151794 | 521 | 39 | pol protein | Phascolarctos |
| | | | | | cinereus |
| 357 | AJ293657 | 496 | 37 | polymerase | Porcine |
| | | | | | endogenous |
| | | | | | type C |
| | | | | | retrovirus |
| 357 | M26927 | 517 | 39 | pol polyprotein | Gibbon ape |
| | | | | | leukemia |
| | | | | | virus |
| 358 | AAD18076 | 689 | 99 | AF129756 G6c | Homo sapiens |
| 358 | AJ012008 | 689 | 99 | Ly6-C protein | Homo sapiens |
| 358 | AJ315533 | 689 | 99 | LY6G6C protein | Homo sapiens |
| 359 | AAH11682 | 2559 | 100 | BC011682 Similar to cathepsin F | Homo sapiens |
| 359 | AF132894_1 | 2559 | 100 | AF132894 cathepsin F | Homo sapiens |
| 359 | AJ007331 | 2559 | 100 | cysteine proteinase | Homo sapiens |
| 360 | AF151048_1 | 407 | 87 | AF151048 HSPC214 | Homo sapiens |
| 360 | AF247565_1 | 423 | 91 | AF247565 anaphase promoting | Homo sapiens |
| | | | | complex subunit 11 | |
| 360 | AF247789_1 | 423 | 91 | AF247789 putative anaphase- | Homo sapiens |
| | | | | promoting complex subunit APC11 | |
| 361 | AAH11811 | 559 | 92 | BC011811 Unknown (protein for | Homo sapiens |
| | | | | MGC: 20260) | |
| 361 | AF218016_1 | 432 | 76 | AF218016 unknown | Homo sapiens |
| 362 | AAH17201 | 634 | 98 | BC017201 insulin-like growth | Homo sapiens |
| | | | | factor binding protein 7 | |
| 362 | L19182 | 634 | 98 | MAC25 | Homo sapiens |
| 362 | S75725 | 634 | 98 | prostacyclin-stimulating factor; | Homo sapiens |
| | | | | PGI2-stimulating factor; PSF | |
| 364 | AF126110_1 | 643 | 96 | AF126110 fibulin-1 isoform D | Homo sapiens |
| | | | | precursor | |
| 364 | BC022497 | 643 | 96 | fibulin 1 | Homo sapiens |
| 364 | U01244 | 643 | 96 | fibulin-1D | Homo sapiens |
| 365 | AAH05839 | 414 | 97 | BC005839 follistatin-like 3 | Homo sapiens |
| | | | | (secreted glycoprotein) | |
| 365 | BC033119 | 414 | 97 | follistatin-like 3 (secreted | Homo sapiens |
| | | | | glycoprotein) | |
| 365 | U76702 | 414 | 97 | follistatin-related protein FLRG | Homo sapiens |
| 366 | AAH00163 | 601 | 99 | BC000163 vimentin | Homo sapiens |
| 366 | BC030573 | 601 | 99 | Unknown (protein for MGC: 16183) | Homo sapiens |
| 366 | X56134 | 601 | 99 | vimentin | Homo sapiens |
| 367 | AB018265 | 5555 | 100 | KIAA0722 protein | Homo sapiens |
| 367 | AF045458 | 5460 | 100 | serine/threonine kinase ULK1 | Homo sapiens |
| 367 | AF072370_1 | 4865 | 89 | AF072370 UNC51.1 serine/threonine | Mus musculus |
| | | | | kinase | |
| 368 | AAH00865 | 227 | 100 | BC000865 Unknown (protein for | Homo sapiens |
| | | | | IMAGE: 3460093) | |
| 369 | AAH02978 | 279 | 91 | BC002978 CD81 antigen (target of | Homo sapiens |
| | | | | antiproliferative antibody 1) | |
| 369 | AF116600 | 279 | 91 | CD81 | Pan |
| | | | | | troglodytes |
| 369 | M33680 | 279 | 91 | 26-kDa cell surface protein TAPA-1 | Homo sapiens |
| 370 | AAH15156 | 678 | 100 | BC015156 ferritin, heavy | Homo sapiens |
| | | | | polypeptide 1 | |
| 370 | AAH16009 | 678 | 100 | BC016009 ferritin, heavy | Homo sapiens |
| | | | | polypeptide 1 | |
| 370 | AAH16857 | 678 | 100 | BC016857 ferritin, heavy | Homo sapiens |
| | | | | polypeptide 1 | |
| 371 | AAH08012 | 298 | 67 | BC008012 eukaryotic translation | Homo sapiens |
| | | | | elongation factor 1 delta | |
| | | | | (guanine nucleotide exchange | |
| | | | | protein) | |
| 371 | AAH09907 | 298 | 67 | BC009907 eukaryotic translation | Homo sapiens |
| | | | | elongation factor 1 delta | |
| | | | | (guanine nucleotide exchange | |
| | | | | protein) | |
| 371 | AAH12819 | 298 | 67 | BC012819 eukaryotic translation | Homo sapiens |
| | | | | elongation factor 1 delta | |
| | | | | (guanine nucleotide exchange | |
| | | | | protein) | |
| 372 | AAH20756 | 470 | 83 | BC020756 chorionic | Homo sapiens |
| | | | | somatomammotropin hormone 1 | |
| | | | | (placental lactogen) | |
| 372 | AAH22044 | 470 | 83 | BC022044 chorionic | Homo sapiens |
| | | | | somatomammotropin hormone 2 | |
| 372 | M15894 | 461 | 92 | chorionic somatomammotropin | Homo sapiens |
| | | | | precursor | |
| 373 | A65264 | 705 | 100 | unnamed protein product | unidentified |
| 373 | AAH01288 | 574 | 93 | BC001288 Similar to decay | Homo sapiens |
| | | | | accelerating factor for | |
| | | | | complement (CD55, Cromer blood | |
| | | | | group system) | |
| 373 | M31516 | 574 | 93 | decay-accelerating factor | Homo sapiens |
| 374 | AF289553_1 | 193 | 75 | AF289553 unknown | Homo sapiens |
| 374 | AK096998 | 202 | 64 | unnamed protein product | Homo sapiens |
| 374 | AK097342 | 207 | 78 | unnamed protein product | Homo sapiens |
| 375 | AAH05326 | 499 | 98 | BC005326 ribosomal protein L27a | Homo sapiens |
| 375 | AAH20169 | 499 | 98 | BC020169 Unknown (protein for | Homo sapiens |
| | | | | IMAGE: 3543815) | |
| 375 | U14968 | 499 | 98 | ribosomal protein L27a | Homo sapiens |
| 377 | AAH21297 | 282 | 91 | BC021297 Similar to Dynein heavy | Homo sapiens |
| | | | | chain 64C | |
| 377 | AB002323 | 282 | 91 | KIAA0325 | Homo sapiens |
| 377 | AY004877 | 267 | 94 | cytoplasmic dynein heavy chain | Mus musculus |
| 378 | BC026018 | 643 | 100 | Similar to laminin, beta 1 | Homo sapiens |
| 378 | M20206 | 643 | 100 | laminin B1 | Homo sapiens |
| 378 | M55370 | 643 | 100 | laminin B1 | Homo sapiens |
| 379 | AF061658 | 585 | 91 | cytidine deaminase | Homo sapiens |
| 379 | AJ000474 | 585 | 91 | cytidine deaminase | Homo sapiens |
| 379 | L27943 | 585 | 91 | cytidine deaminase | Homo sapiens |
| 380 | AAH18986 | 412 | 73 | BC018986 Unknown (protein for | Homo sapiens |
| | | | | MGC: 20092) | |
| 380 | AF229830 | 412 | 73 | prostaglandin dehydrogenase | Papio |
| | | | | | hamadryas |
| 380 | U63296 | 412 | 73 | 15-hydroxyprostaglandin | Homo sapiens |
| | | | | dehydrogenase | |
| 381 | AAH00749 | 507 | 100 | BC000749 lactate dehydrogenase A | Homo sapiens |
| 381 | AAH01829 | 507 | 100 | BC001829 lactate dehydrogenase A | Homo sapiens |
| 381 | X03077 | 507 | 100 | lactate dehydrogenase-A | Homo sapiens |
| 382 | AAH00903 | 749 | 84 | BC000903 high-mobility group | Homo sapiens |
| | | | | (nonhistone chromosomal) protein 2 | |
| 382 | AAH01063 | 749 | 84 | BC001063 high-mobility group | Homo sapiens |
| | | | | (nonhistone chromosomal) protein 2 | |
| 382 | X62534 | 749 | 84 | HMG-2 | Homo sapiens |
| 383 | AK075214 | 338 | 91 | unnamed protein product | Homo sapiens |
| 383 | AX417526 | 338 | 91 | unnamed protein product | Homo sapiens |
| 383 | AX417528 | 338 | 91 | unnamed protein product | Homo sapiens |
| 384 | AF135060 | 735 | 96 | fibrillin-2 | Rattus |
| | | | | | norvegicus |
| 384 | U03272 | 745 | 99 | fibrillin-2 | Homo sapiens |
| 384 | X62009 | 745 | 98 | fibrillin 5 | Homo sapiens |
| 385 | AAH13083 | 478 | 100 | BC013083 Similar to cystatin C | Homo sapiens |
| | | | | (amyloid angiopathy and cerebral | |
| | | | | hemorrhage) | |
| 385 | X12763 | 478 | 100 | ompA - cystatin C fusion | synthetic |
| | | | | preprotein (AA −21 to 120) | construct |
| 385 | X61681 | 478 | 100 | cystatin C | Homo sapiens |
| 387 | AF135060 | 523 | 89 | fibrillin-2 | Rattus |
| | | | | | norvegicus |
| 387 | L39790 | 532 | 90 | fibrillin 2 | Mus musculus |
| 387 | U03272 | 597 | 100 | fibrillin-2 | Homo sapiens |
| 388 | M65149 | 1200 | 85 | CELF | Rattus |
| | | | | | norvegicus |
| 388 | M83667 | 1430 | 100 | NF-IL6-beta protein | Homo sapiens |
| 388 | S63168 | 1418 | 99 | CCAAT/enhancer-binding protein | Homo sapiens |
| | | | | delta; C/EBP delta | |
| 389 | AF186111_1 | 228 | 52 | AF186111 NOTCH4-like protein | Homo sapiens |
| 389 | AL512735 | 228 | 52 | hypothetical protein | Homo sapiens |
| 389 | AX133831 | 228 | 52 | unnamed protein product | Homo sapiens |
| 390 | M13452 | 641 | 90 | lamin A protein | Homo sapiens |
| 390 | X03444 | 631 | 95 | put. lamin A precursor (aa 1-702) | Homo sapiens |
| 390 | X66870 | 629 | 84 | lamin A | Rattus |
| | | | | | norvegicus |
| 391 | U14631 | 244 | 100 | 11 beta-hydroxysteroid | Homo sapiens |
| | | | | dehydrogenase type II | |
| 391 | U26726 | 244 | 100 | 11-beta-hydroxysteroid | Homo sapiens |
| | | | | dehydrogenase type 2 | |
| 391 | U27317 | 244 | 100 | 11 beta-hydroxysteroid | Homo sapiens |
| | | | | dehydrogenase 2 | |
| 392 | AB049946 | 666 | 100 | mitochondrial ribosomal protein | Homo sapiens |
| | | | | S15 | |
| 392 | AF265439_1 | 415 | 100 | AF265439 DC37 | Homo sapiens |
| 392 | BC031336 | 666 | 100 | mitochondrial ribosomal protein | Homo sapiens |
| | | | | S15 | |
| 393 | AAH13733 | 333 | 92 | BC013733 px19-like protein | Homo sapiens |
| 393 | AAH13748 | 333 | 92 | BC013748 px19-like protein | Homo sapiens |
| 393 | AF201925_1 | 333 | 92 | AF201925 PRELI | Homo sapiens |
| 394 | AAH02362 | 694 | 100 | BC002362 lactate dehydrogenase B | Homo sapiens |
| 394 | AAH15122 | 694 | 100 | BC015122 lactate dehydrogenase B | Homo sapiens |
| 394 | Y00711 | 694 | 100 | lactate dehydrogenase B (AA 1-334) | Homo sapiens |
| 395 | AAH03070 | 427 | 76 | BC003070 GATA-binding protein 3 | Homo sapiens |
| 395 | AAH06793 | 427 | 76 | BC006793 GATA-binding protein 3 | Homo sapiens |
| 395 | X55037 | 427 | 76 | GATA-3 | Homo sapiens |
| 396 | AF269289_1 | 287 | 94 | AF269289 unknown | Homo sapiens |
| 397 | AAH07728 | 376 | 80 | BC007728 Unknown (protein for | Homo sapiens |
| | | | | MGC: 12671) | |
| 397 | AL080102 | 376 | 80 | hypothetical protein | Homo sapiens |
| 397 | U49436 | 376 | 80 | translation initiation factor 5 | Homo sapiens |
| 398 | AAH03190 | 472 | 94 | BC003190 p75NTR-associated cell | Homo sapiens |
| | | | | death executor; ovarian granulosa | |
| | | | | cell protein (13 kD) | |
| 398 | AF18704_1 | 472 | 94 | AF187064 p75NTR-associated cell | Homo sapiens |
| | | | | death executor; NADE | |
| 398 | M38188 | 472 | 94 | unknown | Homo sapiens |
| 399 | AB037767 | 5427 | 99 | KIAA1346 protein | Homo sapiens |
| 399 | AF207664_1 | 5274 | 100 | AF207664 matrix metalloprotease | Homo sapiens |
| 399 | AP001697 | 5274 | 100 | metalloprotease with | Homo sapiens |
| | | | | thrombospondin type 1 motifs | |
| 400 | U90938 | 213 | 76 | Fc gamma receptor IIc1 | Homo sapiens |
| 400 | X17652 | 213 | 76 | IgG Fc receptor | Homo sapiens |
| 400 | X17652 | 213 | 76 | IgG Fc receptor | Homo sapiens |
| 401 | AAH01768 | 390 | 93 | BC001768 neuronatin | Homo sapiens |
| 401 | AL109614 | 390 | 93 | bA425M5.3.1 (neuronatin (isoform | Homo sapiens |
| | | | | 1)) | |
| 401 | U31767 | 390 | 93 | neuronatin alpha | Homo sapiens |
| 402 | AF151373_1 | 328 | 82 | AF151373 nucleolin-related | Rattus |
| | | | | protein NRP | norvegicus |
| 402 | M15825 | 281 | 73 | nucleolin, C23 | Cricetulus |
| | | | | | griseus |
| 402 | M55022 | 286 | 75 | nucleolin | Rattus |
| | | | | | norvegicus |
| 403 | AAH13428 | 558 | 86 | BC013428 PP1201 protein | Homo sapiens |
| 403 | AF193045_1 | 558 | 86 | AF193045 unknown | Homo sapiens |
| 403 | BC026348 | 558 | 86 | PP1201 protein | Homo sapiens |
| 404 | AF393832_1 | 721 | 94 | AF393832 beta-actin | Morulius |
| | | | | | calbasu |
| 404 | AY039657 | 721 | 94 | beta-actin | Chrysophrys |
| | | | | | auratus |
| 404 | AY148350 | 721 | 94 | actin | Dicentrarchus |
| | | | | | labrax |
| 405 | AK055593 | 370 | 98 | unnamed protein product | Homo sapiens |
| 406 | AAH21233 | 1036 | 100 | BC021233 ATP synthase, H+ | Homo sapiens |
| | | | | transporting, mitochondrial F1 | |
| | | | | complex, O subunit (oligomycin | |
| | | | | sensitivity conferring protein) | |
| 406 | BC022865 | 1036 | 100 | ATP synthase, H+ transporting, | Homo sapiens |
| | | | | mitochondrial F1 complex, O | |
| | | | | subunit (oligomycin sensitivity | |
| | | | | conferring protein) | |
| 406 | X83218 | 1036 | 100 | ATP synthase, oligomycin | Homo sapiens |
| | | | | sensitivity conferring protein | |
| 407 | AAH04368 | 1221 | 99 | BC004368 proteasome (prosome, | Homo sapiens |
| | | | | macropain) activator subunit 2 | |
| | | | | (PA28 beta) | |
| 407 | AAH19885 | 1221 | 99 | BC019885 proteasome (prosome, | Homo sapiens |
| | | | | macropain) activator subunit 2 | |
| | | | | (PA28 beta) | |
| 407 | D45248 | 1226 | 100 | proteasome activator hPA28 suunit | Homo sapiens |
| | | | | beta | |
| 408 | AF090306 | 2306 | 100 | retinoblastoma binding protein | Rattus |
| | | | | | norvegicus |
| 408 | U35143 | 2306 | 100 | retinoblastoma-binding protein | Homo sapiens |
| | | | | RbAp46 | |
| 408 | X72841 | 2306 | 100 | IEF 7442 | Homo sapiens |
| 409 | AAH00413 | 1748 | 100 | BC000413 eukaryotic translation | Homo sapiens |
| | | | | initiation factor 3, subunit 2 | |
| | | | | (beta, 36 kD) | |
| 409 | AAH03140 | 1748 | 100 | BC003140 eukaryotic translation | Homo sapiens |
| | | | | initiation factor 3, subunit 2 | |
| | | | | (beta, 36 kD) | |
| 409 | U39067 | 1748 | 100 | translation initiation factor | Homo sapiens |
| | | | | eIF3 p36 subunit | |
| 410 | AF042166 | 13721 | 100 | beta-filamin | Homo sapiens |
| 410 | AF043045 | 13709 | 99 | actin-binding protein homolog | Homo sapiens |
| | | | | ABP-278 | |
| 410 | AF191633 | 13721 | 100 | filamin | Homo sapiens |
| 411 | AF165515_1 | 1862 | 100 | AF165515 ancient ubiquitous | Homo sapiens |
| | | | | protein 1 precursor | |
| 411 | AK023983 | 1935 | 100 | unnamed protein product | Homo sapiens |
| 411 | BC033646 | 1862 | 100 | ancient ubiquitous protein 1 | Homo sapiens |
| 412 | AB009865 | 1347 | 100 | Angiopoietin-2 | Homo sapiens |
| 412 | AF187858_1 | 1335 | 99 | AF187858 angiopoietin-2 isoform-1 | Homo sapiens |
| 412 | AF218015_1 | 1347 | 100 | AF218015 unknown | Homo sapiens |
| 413 | AF035718 | 914 | 99 | mesoderm-specific basic-helix- | Homo sapiens |
| | | | | loop-helix protein; Pod-1 | |
| 413 | AL356109 | 917 | 100 | bA373A10.1 (transcription factor | Homo sapiens |
| | | | | 21) | |
| 413 | BC025697 | 917 | 100 | transcription factor 21 | Homo sapiens |
| 414 | M38690 | 1200 | 100 | CD9 antigen | Homo sapiens |
| 414 | S60489 | 1200 | 100 | CD9 antigen | Homo sapiens |
| 414 | X60111 | 1200 | 100 | MRP-1 (motility related protein) | Homo sapiens |
| 415 | AAH02368 | 4629 | 99 | BC002368 proteasome (prosome, | Homo sapiens |
| | | | | macropain) 26S subunit, non- | |
| | | | | ATPase, 2 | |
| 415 | AAH02997 | 4629 | 99 | BC002997 proteasome (prosome, | Homo sapiens |
| | | | | macropain) 26S subunit, non- | |
| | | | | ATPase, 2 | |
| 415 | D78151 | 4637 | 100 | human 26S proteasome subunit p97 | Homo sapiens |
| 416 | AAH00182 | 1622 | 100 | BC000182 annexin A4 | Homo sapiens |
| 416 | AAH11659 | 1622 | 100 | BC011659 Similar to annexin A4 | Homo sapiens |
| 416 | D78152 | 1622 | 100 | annexin IV (carbohydrtate-binding | Homo sapiens |
| | | | | protein p33/41) | |
| 417 | AAH03064 | 4016 | 99 | BC003064 disabled (Drosophila) | Homo sapiens |
| | | | | homolog 2 (mitogen-responsive | |
| | | | | phosphoprotein) | |
| 417 | AF205890 | 4028 | 100 | disabled-2 | Homo sapiens |
| 417 | U39050 | 4028 | 100 | DOC-2 | Homo sapiens |
| 418 | AAH07075 | 780 | 100 | BC007075 hemoglobin, beta | Homo sapiens |
| 418 | U01317 | 780 | 100 | beta-globin | Homo sapiens |
| 418 | V00499 | 780 | 100 | beta globin | Homo sapiens |
| 419 | AAH21557 | 4093 | 99 | BC021557 transmembrane protein 8 | Homo sapiens |
| | | | | (five membrane-spanning domains) | |
| 419 | AB045292 | 4100 | 100 | M83 protein | Homo sapiens |
| 419 | AE006463_7 | 4088 | 99 | AE006463 M83 | Homo sapiens |
| 420 | AF193048_1 | 946 | 100 | AF193048 unknown | Homo sapiens |
| 421 | AF151980_1 | 2009 | 100 | AF151980 connexin 43 | Homo sapiens |
| 421 | BC026329 | 2009 | 100 | gap junction protein, alpha 1, | Homo sapiens |
| | | | | 43 kD (connexin 43) | |
| 421 | X52947 | 2009 | 100 | gap junction protein (AA 1-382) | Homo sapiens |
| 422 | AJ313463 | 1258 | 100 | adipsin/complement factor D | Homo sapiens |
| | | | | precursor | |
| 422 | BC034529 | 1249 | 100 | Unknown (protein for | Homo sapiens |
| | | | | IMAGE: 4780594) | |
| 422 | M84526 | 1198 | 98 | adipsin/complement factor D | Homo sapiens |
| 423 | AF258549_1 | 533 | 100 | AF258549 PP1292 | Homo sapiens |
| 424 | AF217963_1 | 4215 | 99 | AF217963 NRAGE | Homo sapiens |
| 424 | AF258554_1 | 4223 | 100 | AF258554 PP2250 | Homo sapiens |
| 424 | BC032473 | 4223 | 100 | melanoma antigen, family D, 1 | Homo sapiens |
| 425 | AAH14635 | 635 | 100 | BC014635 Similar to SH3-domain, | Homo sapiens |
| | | | | GRB2-like, endophilin B2 | |
| 425 | AF257319_1 | 635 | 100 | AF257319 SH3-containing protein | Homo sapiens |
| | | | | SH3GLB2 | |
| 425 | AF258589_1 | 635 | 100 | AF258589 PP578 | Homo sapiens |
| 426 | AAH03390 | 707 | 100 | BC003390 hypothetical protein | Homo sapiens |
| 426 | AAH14334 | 707 | 100 | BC014334 Unknown (protein for | Homo sapiens |
| | | | | MGC: 22874) | |
| 426 | AF275807_1 | 822 | 100 | AF275807 PNAS-110 | Homo sapiens |
| 427 | AAH05238 | 469 | 100 | BC005238 FXYD domain-containing | Homo sapiens |
| | | | | ion transport regulator 3 | |
| 427 | U28249 | 411 | 75 | 11 kD protein | Homo sapiens |
| 427 | X93036 | 469 | 100 | MAT8 protein | Homo sapiens |
| 428 | AF014402 | 1500 | 100 | type-2 phosphatidic acid | Homo sapiens |
| | | | | phosphatase alpha-1 | |
| 428 | BC039847 | 1500 | 100 | Similar to phosphatidic acid | Homo sapiens |
| | | | | phosphatase type 2A | |
| 428 | Y14436 | 1500 | 100 | phosphatidic acid phosphatase | Homo sapiens |
| | | | | type 2 | |
| 429 | AL163249 | 2729 | 99 | T-complex protein 1 theta subunit | Homo sapiens |
| 429 | D13627 | 2730 | 99 | KIAA0002 | Homo sapiens |
| 429 | D42052 | 2734 | 100 | predicted protein of 548 amino | Homo sapiens |
| | | | | acids | |
| 430 | AAH01312 | 2306 | 100 | BC001312 protein disulfide | Homo sapiens |
| | | | | isomerase-related protein | |
| 430 | BC006865 | 2220 | 95 | Similar to protein disulfide | Mus musculus |
| | | | | isomerase-related protein | |
| 430 | D49489 | 2306 | 100 | human P5 | Homo sapiens |
| 431 | AF439513_1 | 7917 | 91 | AF439513 pregnancy-associated | Mus musculus |
| | | | | plasma protein-A | |
| 431 | U28727 | 8980 | 100 | pregnancy-associated plasma | Homo sapiens |
| | | | | protein-A preproform | |
| 431 | X68280 | 8574 | 100 | unnamed protein product | Homo sapiens |
| 432 | AAH01936 | 1357 | 100 | BC001936 Similar to BCL2- | Homo sapiens |
| | | | | associated athanogene | |
| 432 | AAH14774 | 1357 | 100 | BC014774 Unknown (protein for | Homo sapiens |
| | | | | MGC: 17086) | |
| 432 | AF022224 | 1357 | 100 | Bcl-2-binding protein | Homo sapiens |
| 433 | AAH04490 | 1953 | 100 | BC004490 v-fos FBJ murine | Homo sapiens |
| | | | | osteosarcoma viral oncogene | |
| | | | | homolog | |
| 433 | AF111167 | 1953 | 100 | cfos | Homo sapiens |
| 433 | V01512 | 1953 | 100 | c-fos | Homo sapiens |
| 434 | AAH20235 | 3282 | 99 | BC020235 Unknown (protein for | Homo sapiens |
| | | | | MGC: 31939) | |
| 434 | M19645 | 3314 | 100 | GRP78 precursor | Homo sapiens |
| 434 | X87949 | 3314 | 100 | BiP | Homo sapiens |
| 435 | AAH14433 | 2640 | 100 | BC014433 Unknown (protein for | Homo sapiens |
| | | | | MGC: 2159) | |
| 435 | BC036000 | 2640 | 100 | Unknown (protein for | Homo sapiens |
| | | | | IMAGE: 4712175) | |
| 435 | U42068 | 2640 | 100 | P58 | Homo sapiens |
| 436 | BC032722 | 1478 | 100 | tumor necrosis factor (ligand) | Homo sapiens |
| | | | | superfamily, member 10 | |
| 436 | U37518 | 1478 | 100 | TNF-related apoptosis inducing | Homo sapiens |
| | | | | ligand TRAIL | |
| 436 | U57059 | 1478 | 100 | Apo-2 ligand | Homo sapiens |
| 437 | AAH01022 | 1591 | 100 | BC001022 pyrophosphatase | Homo sapiens |
| | | | | (inorganic) | |
| 437 | AF119665_1 | 1591 | 100 | AF119665 inorganic | Homo sapiens |
| | | | | pyrophosphatase | |
| 437 | AF217186_1 | 1591 | 100 | AF217186 inorganic | Homo sapiens |
| | | | | pyrophosphatase 1 | |
| 438 | AAH08743 | 3145 | 100 | BC008743 zyxin | Homo sapiens |
| 438 | AAH09360 | 3145 | 100 | BC009360 zyxin | Homo sapiens |
| 438 | AAH10031 | 3145 | 100 | BC010031 zyxin | Homo sapiens |
| 439 | AAH05901 | 919 | 100 | BC005901 Microfibril-associated | Homo sapiens |
| | | | | glycoprotein-2 | |
| 439 | AF084927 | 919 | 100 | microfibril-associated | Homo sapiens |
| | | | | glycoprotein 2 | |
| 439 | U37283 | 919 | 100 | microfibril-associated | Homo sapiens |
| | | | | glycoprotein-2 MAGP-2 | |
| 440 | AAH00933 | 2015 | 100 | BC000933 isocitrate dehydrogenase | Homo sapiens |
| | | | | 3 (NAD+) gamma | |
| 440 | Z68129 | 2015 | 100 | NAD(H)-specific isocitrate | Homo sapiens |
| | | | | dehydrogenase gamma-subunit | |
| | | | | precursor | |
| 440 | Z68907 | 2015 | 100 | NAD (H)-specific isocitrate | Homo sapiens |
| | | | | dehydrogenase gamma subunit | |
| | | | | precursor | |
| 441 | AAH12265 | 846 | 100 | BC012265 Similar to cofilin 1, | Homo sapiens |
| | | | | non-muscle | |
| 441 | AAH12318 | 846 | 100 | BC012318 Similar to cofilin 1, | Homo sapiens |
| | | | | non-muscle | |
| 441 | AAH18256 | 846 | 100 | BC018256 Similar to cofilin 1, | Homo sapiens |
| | | | | non-muscle | |
| 442 | AB069964 | 861 | 100 | ubiquitin-conjugating enzyme 9 | Gallus |
| | | | | | gallus |
| 442 | AF461016_1 | 861 | 100 | AF461016 ubiquitin-conjugating | Gallus |
| | | | | enzyme | gallus |
| 442 | U88561 | 861 | 100 | E2 ubiquitin conjugating enzyme | Xenopus |
| | | | | | laevis |
| 443 | AAH06249 | 989 | 100 | BC006249 guanylate kinase 1 | Homo sapiens |
| 443 | AAH09914 | 989 | 100 | BC009914 guanylate kinase 1 | Homo sapiens |
| 443 | U66895 | 989 | 100 | guanylate kinase | Homo sapiens |
| 445 | AAH01120 | 1369 | 99 | BC001120 lectin, galactoside- | Homo sapiens |
| | | | | binding, soluble, 3 (galectin 3) | |
| 445 | AF031425 | 1369 | 99 | galectin 3 | Homo sapiens |
| 445 | M35368 | 1377 | 100 | galactose-specific lectin | Homo sapiens |
| 446 | AAH00877 | 615 | 88 | BC000877 hypothetical protein | Homo sapiens |
| | | | | PP5395 | |
| 446 | AF218019_1 | 615 | 88 | AF218019 unknown | Homo sapiens |
| 446 | AF241786_1 | 1125 | 100 | AF241786 NPD013 | Homo sapiens |
| 447 | AAH02503 | 547 | 70 | BC002503 spermidine/spermine N1- | Homo sapiens |
| | | | | acetyltransferase | |
| 447 | AAH08424 | 547 | 70 | BC008424 spermidine/spermine N1- | Homo sapiens |
| | | | | acetyltransferase | |
| 447 | AF251292_1 | 1059 | 100 | AF251292 DC21 | Homo sapiens |
| 448 | AF135157_1 | 745 | 69 | AF135157 complement C1q A chain | Homo sapiens |
| | | | | precursor | |
| 448 | AF260332_1 | 1550 | 100 | AF260332 DC33 | Homo sapiens |
| 448 | BC030153 | 745 | 69 | complement component 1, q | Homo sapiens |
| | | | | subcomponent, alpha polypeptide | |
| 449 | AAH00589 | 770 | 100 | BC000589 CGI-39 protein; cell | Homo sapiens |
| | | | | death-regulatory protein GRIM19 | |
| 449 | AAH09189 | 770 | 100 | BC009189 CGI-39 protein; cell | Homo sapiens |
| | | | | death-regulatory protein GRIM19 | |
| 449 | AF261134_1 | 1196 | 100 | AF261134 CDA016 | Homo sapiens |
| 450 | AAH12296 | 1135 | 99 | BC012296 hypothetical protein | Homo sapiens |
| | | | | FLJ21174 | |
| 450 | AF271783_1 | 1141 | 100 | AF271783 NPD017 | Homo sapiens |
| 450 | AF314542_1 | 1141 | 100 | AF314542 B lymphocyte activation- | Homo sapiens |
| | | | | related protein | |
| 451 | AK090427 | 13940 | 99 | FLJ00343 protein | Homo sapiens |
| 451 | L44140 | 14011 | 100 | filamin | Homo sapiens |
| 451 | X53416 | 14004 | 99 | actin-binding protein | Homo sapiens |
| 452 | AAH12341 | 1492 | 100 | BC012341 Similar to M5-14 protein | Homo sapiens |
| 452 | AL136622 | 1492 | 100 | hypothetical protein | Homo sapiens |
| 452 | AL390090 | 1492 | 100 | c3orf1 hypothetical protein, M5-14 | Homo sapiens |
| | | | | similar to (AE003703)140up | |
| | | | | gene product Drosophila | |
| | | | | melanogaster | |
| 453 | AC005624 | 824 | 100 | MY18_HUMAN | Homo sapiens |
| 453 | AF078077 | 824 | 100 | growth arrest and DNA-damage- | Homo sapiens |
| | | | | inducible protein GADD45beta | |
| 453 | AF087853_1 | 824 | 100 | AF087853 growth arrest and DNA | Homo sapiens |
| | | | | damage inducible protein beta | |
| 454 | AF020185 | 478 | 100 | protein inhibitor of nitric oxide | Mus musculus |
| | | | | synthase | |
| 454 | BC008106 | 478 | 100 | dynein, cytoplasmic, light | Mus musculus |
| | | | | polypeptide | |
| 454 | BC034258 | 478 | 100 | dynein, cytoplasmic, light | Mus musculus |
| | | | | polypeptide | |
| 455 | AAH01539 | 1466 | 100 | BC001539 dickkopf (Xenopus | Homo sapiens |
| | | | | laevis) homolog 1 | |
| 455 | AF177394_1 | 1466 | 100 | AF177394 dickkopf-1 | Homo sapiens |
| 455 | AF261158 | 1466 | 100 | dickkopf homolog 1 | Homo sapiens |
| 456 | AAC33279 | 1396 | 100 | AC005559 basigin | Homo sapiens |
| 456 | AAH09040 | 1396 | 100 | BC009040 basigin (OK blood group) | Homo sapiens |
| 456 | AF042855 | 1396 | 100 | EMMPRIN | Homo sapiens |
| 457 | L47125 | 3057 | 100 | glypican | Homo sapiens |
| 457 | L47176 | 3057 | 100 | GTR2-2 gene product | Homo sapiens |
| 457 | Z37987 | 3057 | 100 | MXR7 | Homo sapiens |
| 458 | D83476 | 4306 | 77 | Xtld protein | Xenopus |
| | | | | | laevis |
| 458 | L24755 | 4948 | 92 | bone morphogenetic protein | Mus musculus |
| 458 | U50330 | 5416 | 100 | procollagen C-proteinase | Homo sapiens |
| 459 | AAH01287 | 669 | 100 | BC001287 histidine triad | Homo sapiens |
| | | | | nucleotide-binding protein | |
| 459 | AAH07090 | 669 | 100 | BC007090 histidine triad | Homo sapiens |
| | | | | nucleotide-binding protein | |
| 459 | U51004 | 669 | 100 | protein kinase C inhibitor | Homo sapiens |
| 460 | AB003306 | 1280 | 94 | PSMB5 | Mus musculus |
| 460 | AF060091_1 | 1280 | 94 | AF060091 proteasome subunit X | Mus musculus |
| 460 | X95586 | 1370 | 100 | proteasome | Homo sapiens |
| 461 | AF102848_1 | 2178 | 100 | AF102848 keratin 23 | Homo sapiens |
| 461 | AK002047 | 2151 | 98 | unnamed protein product | Homo sapiens |
| 461 | BC028356 | 2155 | 99 | type I intermediate filament | Homo sapiens |
| | | | | cytokeratin | |
| 462 | AAH00097 | 3483 | 100 | BC000097 transforming growth | Homo sapiens |
| | | | | factor, beta-induced, 68 kD | |
| 462 | AAH04972 | 3483 | 100 | BC004972 transforming growth | Homo sapiens |
| | | | | factor, beta-induced, 68 kD | |
| 462 | AY149344 | 3483 | 100 | transforming growth factor, beta- | Homo sapiens |
| | | | | induced, 68 kDa | |
| 463 | AF414110_1 | 635 | 100 | AF414110 histone variant H2A.F/Z | Danio rerio |
| 463 | AF414111_1 | 635 | 100 | AF414111 histone variant H2A.F/Z | Danio rerio |
| 463 | V00414 | 635 | 100 | histone H2A | Gallus |
| | | | | | gallus |
| 464 | BC011457 | 957 | 100 | Unknown (protein for MGC: 7976) | Mus musculus |
| 464 | BC019761 | 957 | 100 | putative membrane protein | Mus musculus |
| 464 | BC020098 | 957 | 100 | putative membrane protein | Mus musculus |
| 465 | AAH00140 | 3579 | 100 | BC000140 propionyl Coenzyme A | Homo sapiens |
| | | | | carboxylase, alpha polypeptide | |
| 465 | AF385926_1 | 3579 | 100 | AF385926 propionyl-CoA | Homo sapiens |
| | | | | carboxylase alpha subunit | |
| 465 | AY035808 | 3579 | 100 | propionyl-CoA carboxylase alpha | Homo sapiens |
| | | | | polypeptide precursor | |
| 466 | AF372216_1 | 562 | 99 | AF372216 tropomyosin alpha | Rattus |
| | | | | isoform | norvegicus |
| 466 | M19267 | 565 | 100 | tropomyosin | Homo sapiens |
| 466 | M19715 | 565 | 100 | skeletal muscle tropomyosin | Homo sapiens |
| 467 | AAH00191 | 704 | 100 | BC000191 hypothetical protein | Homo sapiens |
| 467 | AAH14329 | 704 | 100 | BC014329 Unknown (protein for | Homo sapiens |
| | | | | MGC: 22862) | |
| 467 | AF212248_1 | 704 | 100 | AF212248 CDA09 | Homo sapiens |
| 468 | AAH00255 | 783 | 100 | BC000255 Unknown (protein for | Homo sapiens |
| | | | | MGC: 2495) | |
| 468 | AF320778_1 | 783 | 100 | AF320778 cervical cancer oncogene 3 | Homo sapiens |
| 468 | AY032594 | 783 | 100 | hepatitis C virus core-binding | Homo sapiens |
| | | | | protein 6 | |
| 469 | AAH00271 | 799 | 100 | BC000271 Unknown (protein for | Homo sapiens |
| | | | | MGC: 3204) | |
| 469 | AAH01434 | 799 | 100 | BC001434 Unknown (protein for | Homo sapiens |
| | | | | MGC: 2477) | |
| 469 | AK007390 | 449 | 82 | unnamed protein product | Mus musculus |
| 470 | AAH00421 | 1243 | 100 | BC000421 lysosomal-associated | Homo sapiens |
| | | | | protein transmembrane 4 alpha | |
| 470 | AAH03158 | 1240 | 99 | BC003158 lysosomal-associated | Homo sapiens |
| | | | | protein transmembrane 4 alpha | |
| 470 | D14696 | 1243 | 100 | KIAA0108 | Homo sapiens |
| 471 | AAH00461 | 1738 | 100 | BC000461 eukaryotic translation | Homo sapiens |
| | | | | initiation factor 2, subunit 2 | |
| | | | | (beta, 38 kD) | |
| 471 | AAH00934 | 1735 | 99 | BC000934 eukaryotic translation | Homo sapiens |
| | | | | initiation factor 2, subunit 2 | |
| | | | | (beta, 38 kD) | |
| 471 | AL031668 | 1738 | 100 | dJ64K7.2 (eukaryotic translation | Homo sapiens |
| | | | | initiation factor 2, subunit 2 | |
| | | | | (beta, 38 kD)) | |
| 472 | AAH00466 | 1059 | 100 | BC000466 NADH dehydrogenase | Homo sapiens |
| | | | | (ubiquinone) 1 beta subcomplex, 8 | |
| | | | | (19 kD, ASHI) | |
| 472 | AAH19276 | 1059 | 100 | BC019276 NADH dehydrogenase | Homo sapiens |
| | | | | (ubiquinone) 1 beta subcomplex, 8 | |
| | | | | (19 kD, ASHI) | |
| 472 | AF044958 | 1059 | 100 | NADH: ubiquinone oxidoreductase | Homo sapiens |
| | | | | ASHI subunit | |
| 473 | AAH00490 | 1821 | 100 | BC000490 eukaryotic translation | Homo sapiens |
| | | | | initiation factor 3, subunit 5 | |
| | | | | (epsilon, 47 kD) | |
| 473 | AK095574 | 1774 | 98 | unnamed protein product | Homo sapiens |
| 473 | U94855 | 1821 | 100 | translation initiation factor 3 | Homo sapiens |
| | | | | 47 kDa subunit | |
| 474 | AAH00502 | 970 | 100 | BC000502 ribosomal protein L17 | Homo sapiens |
| 474 | AAH17831 | 970 | 100 | BC017831 ribosomal protein L17 | Homo sapiens |
| 474 | X53777 | 970 | 100 | putative ribosomal protein (AA 1-184) | Homo sapiens |
| 475 | AAH00505 | 808 | 100 | BC000505 microsomal glutathione | Homo sapiens |
| | | | | S-transferase 3 | |
| 475 | AAH03034 | 808 | 100 | BC003034 microsomal glutathione | Homo sapiens |
| | | | | S-transferase 3 | |
| 475 | AAH05964 | 808 | 100 | BC005964 microsomal glutathione | Homo sapiens |
| | | | | S-transferase 3 | |
| 476 | AAH00509 | 1425 | 100 | BC000509 proteasome (prosome, | Homo sapiens |
| | | | | macropain) subunit, beta type, 7 | |
| 476 | AAH17116 | 1393 | 100 | BC017116 proteasome (prosome, | Homo sapiens |
| | | | | macropain) subunit, beta type, 7 | |
| 476 | D38048 | 1421 | 99 | proteasome subunit z | Homo sapiens |
| 477 | BC033015 | 4539 | 100 | RAS p21 protein activator (GTPase | Homo sapiens |
| | | | | activating protein) 1 | |
| 477 | M23379 | 4539 | 100 | GTPase-activating protein | Homo sapiens |
| 477 | M23612 | 4555 | 100 | GTPase-activating protein | Homo sapiens |
| 478 | BC003860 | 2254 | 100 | protease (prosome, macropain) 26S | Mus musculus |
| | | | | subunit, ATPase 1 | |
| 478 | D50696 | 2254 | 100 | proteasomal ATPase (S4) | Rattus |
| | | | | | norvegicus |
| 478 | U39302 | 2254 | 100 | P26s4 | Mus musculus |
| 479 | AAH00522 | 2131 | 100 | BC000522 Similar to serine (or | Homo sapiens |
| | | | | cysteine) proteinase inhibitor, | |
| | | | | clade F (alpha-2 antiplasmin, | |
| | | | | pigment epithelium derived | |
| | | | | factor). member 1 | |
| 479 | AF400442_1 | 2125 | 99 | AF400442 pigment epithelium- | Homo sapiens |
| | | | | derived factor | |
| 479 | M76979 | 2119 | 99 | pigment epithelial- | Homo sapiens |
| | | | | differentiating factor | |
| 480 | AAH00529 | 1616 | 100 | BC000529 prostate differentiation | Homo sapiens |
| | | | | factor | |
| 480 | AAH08962 | 1616 | 100 | BC008962 Unknown (protein for | Homo sapiens |
| | | | | MGC: 4145) | |
| 480 | AF003934 | 1613 | 99 | prostate differentiation factor | Homo sapiens |
| 481 | AAH00548 | 806 | 100 | BC000548 receptor (calcitonin) | Homo sapiens |
| | | | | activity modifying protein 1 | |
| 481 | AF181550_1 | 596 | 71 | AF181550 receptor activity | Rattus |
| | | | | modifying protein 1 | norvegicus |
| 481 | AJ001014 | 806 | 100 | RAMP1 | Homo sapiens |
| 482 | AAH00554 | 1409 | 100 | BC000554 Similar to integral | Homo sapiens |
| | | | | membrane protein 2B | |
| 482 | AF136973_1 | 1409 | 100 | AF136973 putative transmembrane | Homo sapiens |
| | | | | protein E3-16 | |
| 482 | AF152462_1 | 1409 | 100 | AF152462 transmembrane protein | Homo sapiens |
| | | | | BRI | |
| 483 | AAH00601 | 479 | 100 | BC000601 DKFZP564K247 protein | Homo sapiens |
| 483 | AAH09583 | 479 | 100 | BC009583 DKFZP564K247 protein | Homo sapiens |
| 483 | AAH09594 | 479 | 100 | BC009594 DKFZP564K247 protein | Homo sapiens |
| 484 | AAH00691 | 906 | 100 | BC000691 brain specific protein | Homo sapiens |
| 484 | AF132972_1 | 902 | 99 | AF132972 CGI-38 protein | Homo sapiens |
| 484 | BC010788 | 888 | 96 | RIKEN cDNA 2700055K07 gene | Mus musculus |
| 485 | AAH00720 | 798 | 100 | BC000720 ubiquitously-expressed | Homo sapiens |
| | | | | transcript | |
| 485 | AAH08890 | 798 | 100 | BC008890 ubiquitously-expressed | Homo sapiens |
| | | | | transcript | |
| 485 | AF092737_1 | 798 | 100 | AF092737 ubiquitously expressed | Homo sapiens |
| | | | | transcript | |
| 486 | AAH01016 | 958 | 100 | BC001016 NADH dehydrogenase | Homo sapiens |
| | | | | (ubiquinone) 1 alpha subcomplex, | |
| | | | | 8 (19 kD, PGIV) | |
| 486 | AF044953_1 | 958 | 100 | AF044953 NADH: ubiquinone | Homo sapiens |
| | | | | oxidoreductase PGIV subunit | |
| 486 | X59697 | 866 | 88 | 19 kDa subunit of NADH: ubiquinone | Bos taurus |
| | | | | oxidoreductase complex (complex | |
| | | | | I) | |
| 487 | AAH01066 | 763 | 100 | BC001066 hypothetical protein | Homo sapiens |
| 487 | AAH21986 | 763 | 100 | BC021986 mitochondrial ribosomal | Homo sapiens |
| | | | | protein L27 | |
| 487 | AB049647 | 763 | 100 | mitochondrial ribosomal protein | Homo sapiens |
| | | | | L27 (L27mt) | |
| 488 | AAH01101 | 2975 | 100 | BC001101 HSPC025 | Homo sapiens |
| 488 | AAH07510 | 2975 | 100 | BC007510 HSPC025 | Homo sapiens |
| 488 | BC029265 | 2975 | 100 | eukaryotic translation initiation | Homo sapiens |
| | | | | factor 3, subunit 6 interacting | |
| | | | | protein | |
| 489 | AAH01150 | 2803 | 100 | BC001150 metalloprotease 1 | Homo sapiens |
| | | | | (pitrilysin family) | |
| 489 | AAH05025 | 2802 | 99 | BC005025 Similar to | Homo sapiens |
| | | | | metalloprotease 1 (pitrilysin | |
| | | | | family) | |
| 489 | AB029027 | 2803 | 100 | KIAA1104 protein | Homo sapiens |
| 490 | AAH01288 | 2064 | 100 | BC001288 Similar to decay | Homo sapiens |
| | | | | accelerating factor for | |
| | | | | complement (CD55, Cromer blood | |
| | | | | group system) | |
| 490 | M30142 | 2064 | 100 | decay-accelerating factor A | Homo sapiens |
| 490 | M31516 | 2064 | 100 | decay-accelerating factor | Homo sapiens |
| 491 | AAH01387 | 833 | 100 | BC001387 similar to rat HREV107 | Homo sapiens |
| 491 | AB030814 | 833 | 100 | H-REV107 protein homolog | Homo sapiens |
| 491 | AF317086 | 833 | 100 | HREV107-3 | Homo sapiens |
| 492 | AAH01420 | 800 | 100 | BC001420 HN1 protein | Homo sapiens |
| 492 | AF177862_1 | 800 | 100 | AF177862 HN1 protein | Homo sapiens |
| 492 | AF348672 | 800 | 100 | hematological and neurological | Homo sapiens |
| | | | | expressed 1 protein | |
| 493 | AAH01426 | 482 | 100 | BC001426 Similar to ubiquinol- | Homo sapiens |
| | | | | cytochrome c reductase hinge | |
| | | | | protein | |
| 493 | AAH01934 | 482 | 100 | BC001934 Similar to ubiquinol- | Homo sapiens |
| | | | | cytochrome c reductase hinge | |
| | | | | protein | |
| 493 | AAH15177 | 482 | 100 | BC015177 Unknown (protein for | Homo sapiens |
| | | | | MGC: 10149) | |
| 494 | AAH21173 | 429 | 100 | BC021173 normal mucosa of | Homo sapiens |
| | | | | esophagus specific 1 | |
| 494 | AB026707 | 429 | 100 | FOAP-11 protein | Homo sapiens |
| 494 | AF228422_1 | 429 | 100 | AF228422 normal mucosa of | Homo sapiens |
| | | | | esophagus specific 1 | |
| 495 | AAH15173 | 608 | 100 | BC015173 ribosomal protein, | Homo sapiens |
| | | | | large, P0 | |
| 495 | AAH15690 | 608 | 100 | BC015690 ribosomal protein, | Homo sapiens |
| | | | | large, P0 | |
| 495 | AF274958_1 | 737 | 100 | AF274958 PNAS-101 | Homo sapiens |
| 496 | AAH14908 | 1453 | 100 | BC014908 stem-loop (histone) | Homo sapiens |
| | | | | binding protein | |
| 496 | AAH15703 | 1453 | 100 | BC015703 stem-loop (histone) | Homo sapiens |
| | | | | binding protein | |
| 496 | Z71188 | 1453 | 100 | histone RNA hairpin-binding | Homo sapiens |
| | | | | protein | |
| 497 | AB000491 | 2046 | 100 | proteasome p45/SUG | Rattus |
| | | | | | norvegicus |
| 497 | D83521 | 2046 | 100 | proteasomal ATPase (rat SUG1) | Rattus |
| | | | | | norvegicus |
| 497 | Z54219 | 2046 | 100 | mSUG1 protein | Mus musculus |
| 498 | AK075215 | 831 | 100 | unnamed protein product | Homo sapiens |
| 499 | AAH02481 | 480 | 100 | BC002481 HSPC162 protein | Homo sapiens |
| 499 | AF132750_1 | 480 | 100 | AF132750 bithoraxoid-like protein | Homo sapiens |
| 499 | AF178431_1 | 480 | 100 | AF178431 BITH | Homo sapiens |
| 500 | AAH02559 | 3087 | 100 | BC002559 high-glucose-regulated | Homo sapiens |
| | | | | protein 8 | |
| 500 | AK083882 | 3077 | 99 | unnamed protein product | Mus musculus |
| 500 | BC014797 | 3077 | 99 | Unknown (protein for MGC: 11691) | Mus musculus |
| 501 | AAH02589 | 2230 | 100 | BC002589 proteasome (prosome, | Homo sapiens |
| | | | | macropain) 26S subunit, ATPase, 2 | |
| 501 | BC005462 | 2226 | 99 | proteasome (prosome, macropain) | Mus musculus |
| | | | | 26S subunit, ATPase 2 | |
| 501 | D11094 | 2230 | 100 | MSS1 protein | Homo sapiens |
| 502 | AAH02634 | 1769 | 100 | BC002634 Unknown (protein for | Homo sapiens |
| | | | | MGC: 4272) | |
| 502 | AK003354 | 1732 | 96 | unnamed protein product | Mus musculus |
| 502 | BC002128 | 1725 | 96 | Unknown (protein for MGC: 6737) | Mus musculus |
| 503 | AAH02803 | 843 | 100 | BC002803 hypothetical protein | Homo sapiens |
| 503 | AF151072_1 | 843 | 100 | AF151072 HSPC238 | Homo sapiens |
| 503 | BC005559 | 711 | 78 | RIKEN cDNA 2500002L14 gene | Mus musculus |
| 504 | AAH02911 | 856 | 100 | BC002911 Unknown (protein for | Homo sapiens |
| | | | | MGC: 11276) | |
| 504 | AK003237 | 722 | 84 | unnamed protein product | Mus musculus |
| 504 | BC031732 | 722 | 84 | DNA segment, Chr 7, Wayne State | Mus musculus |
| | | | | University 86, expressed | |
| 505 | AAH02945 | 2197 | 100 | BC002945 Similar to hypothetical | Homo sapiens |
| | | | | protein FLJ10101 | |
| 505 | AAH21095 | 1290 | 100 | BC021095 Unknown (protein for | Homo sapiens |
| | | | | MGC: 31800) | |
| 505 | AK027586 | 1290 | 100 | unnamed protein product | Homo sapiens |
| 506 | AAH02954 | 2552 | 100 | BC002954 UDP-glucose | Homo sapiens |
| | | | | pyrophosphorylase 2 | |
| 506 | BC023810 | 2524 | 98 | UDP-glucose pyrophosphorylase 2 | Mus musculus |
| 506 | U27460 | 2542 | 99 | uridine diphosphoglucose | Homo sapiens |
| | | | | pyrophosphorylase | |
| 507 | AAH03005 | 886 | 100 | BC003005 unactive progesterone | Homo sapiens |
| | | | | receptor, 23 kD | |
| 507 | BC003708 | 876 | 98 | telomerase binding protein, p23 | Mus musculus |
| 507 | L24804 | 886 | 100 | p23 | Homo sapiens |
| 508 | AAH03056 | 2132 | 100 | BC003056 HSPC028 protein | Homo sapiens |
| 508 | AAH08453 | 2132 | 100 | BC008453 HSPC028 protein | Homo sapiens |
| 508 | AAH09597 | 2132 | 100 | BC009597 HSPC028 protein | Homo sapiens |
| 510 | AAH01773 | 591 | 100 | BC001773 Similar to ribosomal | Homo sapiens |
| | | | | protein L34 | |
| 510 | AB061832 | 591 | 100 | ribosomal protein L34 | Homo sapiens |
| 510 | BC028517 | 587 | 99 | Unknown (protein for MGC: 41239) | Mus musculus |
| 511 | AAH01882 | 533 | 100 | BC001882 Similar to ribosomal | Homo sapiens |
| | | | | protein L5 | |
| 511 | D10737 | 512 | 100 | ribosomal protein L5 | Gallus |
| | | | | | gallus |
| 511 | X57016 | 512 | 100 | ribosomal protein L5 | Gallus |
| | | | | | gallus |
| 512 | AAH01884 | 589 | 100 | BC001884 NADH dehydrogenase | Homo sapiens |
| | | | | (ubiquinone) Fe-S protein 5 | |
| | | | | (15 kD) (NADH-coenzyme Q | |
| | | | | reductase) | |
| 512 | AF020352 | 589 | 100 | NADH: ubiquinone oxidoreductase 15 kDa | Homo sapiens |
| | | | | IP subunit | |
| 512 | AF047434 | 589 | 100 | NADH-ubiquinone oxidoreductase | Homo sapiens |
| | | | | 15 kDa subunit; CI-15 protein | |
| 513 | AAH01926 | 2197 | 100 | BC001926 creatine kinase, | Homo sapiens |
| | | | | mitochondrial 1 (ubiquitous) | |
| 513 | AAH06467 | 2197 | 100 | BC006467 creatine kinase, | Homo sapiens |
| | | | | mitochondrial 1 (ubiquitous) | |
| 513 | J04469 | 2197 | 100 | creatine kinase | Homo sapiens |
| 514 | AAH03373 | 763 | 100 | BC003373 prefoldin 5 | Homo sapiens |
| 514 | AB055803 | 763 | 100 | MM-1 alpha | Homo sapiens |
| 514 | D89667 | 763 | 100 | c-myc binding protein | Homo sapiens |
| 515 | AAH05939 | 998 | 100 | BC005939 prostaglandin D2 | Homo sapiens |
| | | | | synthase (21 kD, brain) | |
| 515 | AY026356 | 998 | 100 | prostaglandin D synthase | Homo sapiens |
| 515 | M98539 | 998 | 100 | prostaglandin D2 synthase | Homo sapiens |
| 516 | AAH00045 | 1388 | 100 | BC000045 TONDU | Homo sapiens |
| 516 | AAH03362 | 1388 | 100 | BC003362 TONDU | Homo sapiens |
| 516 | Z97632 | 1388 | 100 | dJ196E23.1.1 (novel protein) | Homo sapiens |
| | | | | (isoform 1) | |
| 517 | AAH03366 | 796 | 100 | BC003366 calcium-regulated heat- | Homo sapiens |
| | | | | stable protein (24 kD) | |
| 517 | AF115345_1 | 787 | 99 | AF115345 calcium-regulated heat | Homo sapiens |
| | | | | stable protein CRHSP-24 | |
| 517 | AF115346_1 | 785 | 97 | AF115346 calcium-regulated heat | Rattus sp. |
| | | | | stable protein CRHSP-24 | |
| 518 | AAH03369 | 581 | 100 | BC003369 ribosomal protein, | Homo sapiens |
| | | | | large, P1 | |
| 518 | AAH07590 | 581 | 100 | BC007590 ribosomal protein, | Homo sapiens |
| | | | | large, P1 | |
| 518 | AB061836 | 581 | 100 | ribosomal protein P1 | Homo sapiens |
| 519 | AAH03377 | 550 | 100 | BC003377 Similar to thioredoxin | Homo sapiens |
| 519 | AF313911_1 | 550 | 100 | AF313911 thioredoxin | Homo sapiens |
| 519 | AY004872 | 550 | 100 | thioredoxin | Homo sapiens |
| 520 | BC032493 | 1086 | 100 | cysteine and glycine-rich protein 1 | Homo sapiens |
| 520 | M33146 | 1086 | 100 | cysteine-rich protein | Homo sapiens |
| 520 | M76378 | 1086 | 100 | cysteine-rich protein | Homo sapiens |
| 521 | AAH03382 | 2620 | 100 | BC003382 sorting nexin 2 | Homo sapiens |
| 521 | AF065482 | 2612 | 99 | sorting nexin 2 | Homo sapiens |
| 521 | AK075929 | 2564 | 98 | unnamed protein product | Mus musculus |
| 522 | AAH03394 | 1485 | 100 | BC003394 heterogeneous nuclear | Homo sapiens |
| | | | | ribonucleoprotein C (C1/C2) | |
| 522 | AAH08364 | 1478 | 99 | BC008364 heterogeneous nuclear | Homo sapiens |
| | | | | ribonucleoprotein C (C1/C2) | |
| 522 | AAH08423 | 1461 | 95 | BC008423 heterogeneous nuclear | Homo sapiens |
| | | | | ribonucleoprotein C (C1/C2) | |
| 523 | AAH03501 | 2155 | 100 | BC003501 Similar to RIKEN cDNA | Homo sapiens |
| | | | | 2310001A20 gene | |
| 523 | AB033767 | 2155 | 100 | brain-selective and closely | Homo sapiens |
| | | | | mapped on the counter allele of | |
| | | | | CMAP in cystatin cluster | |
| 523 | AL035661 | 2155 | 100 | dJ568C11.2 (chromosome 20 open | Homo sapiens |
| | | | | reading frame 3) | |
| 524 | AAH03512 | 3204 | 100 | BC003512 mesothelin | Homo sapiens |
| 524 | AE006464_21 | 3189 | 99 | AE006464 pre-pro-megakarycyte | Homo sapiens |
| | | | | potentiating factor precursor | |
| 524 | D49441 | 3192 | 99 | pre-pro-megakaryocyte | Homo sapiens |
| | | | | potentiating factor | |
| 525 | AAH03077 | 5288 | 100 | BC003077 Similar to ATPase, Na+K+ | Homo sapiens |
| | | | | transporting, alpha 1 polypeptide | |
| 525 | D00099 | 5288 | 100 | Na, K-ATPase alpha-subunit | Homo sapiens |
| 525 | X04297 | 5288 | 100 | ATPase alpha subunit (aa 1-1023) | Homo sapiens |
| 526 | AAH03079 | 786 | 100 | BC003079 16.7 Kd protein | Homo sapiens |
| 526 | AAH15639 | 786 | 100 | BC015639 16.7 Kd protein | Homo sapiens |
| 526 | AF078845 | 786 | 100 | 16.7 Kd protein | Homo sapiens |
| 527 | AAH00161 | 1827 | 100 | BC000161 secretory carrier | Homo sapiens |
| | | | | membrane protein 3 | |
| 527 | AAH05135 | 1827 | 100 | BC005135 secretory carrier | Homo sapiens |
| | | | | membrane protein 3 | |
| 527 | AF005039 | 1817 | 99 | secretory carrier membrane | Homo sapiens |
| | | | | protein | |
| 528 | AAH08704 | 887 | 100 | BC008704 cytochrome c oxidase | Homo sapiens |
| | | | | subunit IV | |
| 528 | AAH21236 | 887 | 100 | BC021236 cytochrome c oxidase | Homo sapiens |
| | | | | subunit IV isoform 1 | |
| 528 | X54802 | 887 | 100 | cytochrome-c oxidase subunit IV | Homo sapiens |
| 529 | AAH00915 | 1731 | 100 | BC000915 PDZ and LIM domain 1 | Homo sapiens |
| | | | | (elfin) | |
| 529 | AAH18755 | 1731 | 100 | BC018755 PDZ and LIM domain 1 | Homo sapiens |
| | | | | (elfin) | |
| 529 | AJ310549 | 1731 | 100 | CLP-36 protein | Homo sapiens |
| 530 | AF236636 | 1302 | 98 | uridine-cytidine kinase 2 | Mus musculus |
| 530 | AF236637 | 1333 | 100 | uridine-cytidine kinase 2 | Homo sapiens |
| 530 | BC023789 | 1302 | 98 | uridine-cytidine kinase 2 | Mus musculus |
| 531 | AAH00176 | 940 | 100 | BC000176 RAP1B, member of RAS | Homo sapiens |
| | | | | oncogene family | |
| 531 | AF493913_1 | 940 | 100 | AF493913 Ras family small GTP | Homo sapiens |
| | | | | binding protein RAP1B | |
| 531 | BC033382 | 952 | 87 | RAP1B, member of RAS oncogene | Mus musculus |
| | | | | family | |
| 532 | D63519 | 870 | 100 | leptin | Homo sapiens |
| 532 | D63710 | 870 | 100 | ob protein | Homo sapiens |
| 532 | U43653 | 870 | 100 | obese protein | Homo sapiens |
| 533 | BC002088 | 637 | 100 | ribosomal protein S25 | Mus musculus |
| 533 | BC027208 | 637 | 100 | ribosomal protein S25 | Mus musculus |
| 533 | X62482 | 637 | 100 | ribosomal protein S25 | Rattus |
| | | | | | Rattus |
| 534 | AAH03662 | 2092 | 100 | BC003662 KIAA0111 gene product | Homo sapiens |
| 534 | AAH04386 | 2092 | 100 | BC004386 KIAA0111 gene product | Homo sapiens |
| 534 | AAH11151 | 2092 | 100 | BC011151 Similar to KIAA0111 gene | Homo sapiens |
| | | | | product | |
| 535 | AF349038_1 | 1780 | 100 | AF349038 TFIID subunit TAFII55 | Homo sapiens |
| 535 | BC032737 | 1780 | 100 | similar to TAF7 RNA polymerase | Homo sapiens |
| | | | | II, TATA box binding protein | |
| | | | | (TBP)-associated factor, 55 kD | |
| 535 | X97999 | 1780 | 100 | transcription factor IID | Homo sapiens |
| 536 | AAH02601 | 1673 | 100 | BC002601 nuclear factor of kappa | Homo sapiens |
| | | | | light polypeptide gene enhancer | |
| | | | | in B-cells inhibitor, alpha | |
| 536 | AAH04983 | 1673 | 100 | BC004983 nuclear factor of kappa | Homo sapiens |
| | | | | light polypeptide gene enhancer | |
| | | | | in B-cells inhibitor, alpha | |
| 536 | AY033600 | 1673 | 100 | NFKBIA | Homo sapiens |
| 537 | AF211480_1 | 2102 | 100 | AF211480 CD001 | Homo sapiens |
| 537 | AK002102 | 2086 | 100 | unnamed protein product | Homo sapiens |
| 537 | AX191505 | 2086 | 100 | unnamed protein product | Homo sapiens |
| 538 | AAH05110 | 4609 | 100 | BC005110 Unknown (protein for | Homo sapiens |
| | | | | MGC: 13217) | |
| 538 | AK049371 | 4473 | 93 | unnamed protein product | Mus musculus |
| 538 | AY044865 | 4609 | 100 | sorting nexin 14 | Homo sapiens |
| 539 | AAH05118 | 592 | 100 | BC005118 Similar to putative | Homo sapiens |
| | | | | translation initiation factor | |
| 539 | AAH08710 | 592 | 100 | BC008710 putative translation | Homo sapiens |
| | | | | initiation factor | |
| 539 | AF083441_1 | 592 | 100 | AF083441 SUI1 isolog | Homo sapiens |
| 540 | AAH05127 | 2190 | 100 | BC005127 adipose differentiation- | Homo sapiens |
| | | | | related protein | |
| 540 | AF443203_1 | 2190 | 100 | AF443203 adipose differentiation- | Homo sapiens |
| | | | | related protein | |
| 540 | AX025098 | 2181 | 99 | unnamed protein product | Homo sapiens |
| 541 | AAH05143 | 964 | 100 | BC005143 vitamin A responsive; | Homo sapiens |
| | | | | cytoskeleton related | |
| 541 | AAH20797 | 964 | 100 | BC020797 vitamin A responsive; | Homo sapiens |
| | | | | cytoskeleton related | |
| 541 | AY102608 | 964 | 100 | JWA protein | Homo sapiens |
| 542 | AAH05228 | 360 | 100 | BC005228 Unknown (protein for | Homo sapiens |
| | | | | MGC: 12250) | |
| 543 | AF072506 | 2871 | 100 | envelope protein precursor | Homo sapiens |
| 543 | AF208161 | 2868 | 99 | syncytin precursor | Homo sapiens |
| 543 | AF513360_1 | 2868 | 99 | AF513360 enverin | Homo sapiens |
| 544 | AAH05322 | 1866 | 100 | BC005322 decorin | Homo sapiens |
| 544 | AF138300 | 1866 | 100 | decorin variant A | Homo sapiens |
| 544 | AF491944_1 | 1866 | 100 | AF491944 decorin | Homo sapiens |
| 545 | AAH01392 | 827 | 100 | BC001392 ribosomal protein S27a | Homo sapiens |
| 545 | D83209 | 827 | 100 | ubiquitin extention protein | Cavia |
| | | | | | porcellus |
| 545 | M24507 | 827 | 100 | ubiquitin | synthetic |
| | | | | | construct |
| 546 | AAH05330 | 1306 | 100 | BC005330 tissue factor pathway | Homo sapiens |
| | | | | inhibitor 2 | |
| 546 | AF217542 | 1306 | 100 | tissue factor pathway inhibitor 2 | Homo sapiens |
| 546 | D29992 | 1306 | 100 | placental protein 5 (PP5) | Homo sapiens |
| 547 | AAH05361 | 1334 | 100 | BC005361 proteasome (prosome, | Homo sapiens |
| | | | | macropain) subunit, alpha type, 4 | |
| 547 | BC022445 | 1334 | 100 | proteasome (prosome, macropain) | Homo sapiens |
| | | | | subunit, alpha type, 4 | |
| 547 | D00763 | 1334 | 100 | proteasome subunit C9 | Homo sapiens |
| 548 | AAH05366 | 1298 | 100 | BC005366 ATP synthase, H+ | Homo sapiens |
| | | | | transporting, mitochondrial F0 | |
| | | | | complex, subunit b, isoform 1 | |
| 548 | AAH16350 | 1298 | 100 | BC016350 Unknown (protein for | Homo sapiens |
| | | | | MGC: 24431) | |
| 548 | AL390195 | 1298 | 100 | bA552M11.3 (ATP synthase, H+ | Homo sapiens |
| | | | | transporting, mitochondrial F0 | |
| | | | | complex, subunit b, isoform 1) | |
| 549 | AAH05390 | 1993 | 100 | BC005390 Unknown (protein for | Homo sapiens |
| | | | | MGC: 12520) | |
| 549 | AF006305 | 1993 | 100 | 26S proteasome regulatory subunit | Homo sapiens |
| 549 | U36395 | 1993 | 100 | conserved ATPase domain protein | Spermophilus |
| | | | | 44 | tridecemlineatus |
| 550 | AAH10370 | 1800 | 99 | BC010370 Putative prostate cancer | Homo sapiens |
| | | | | tumor suppressor | |
| 550 | U42349 | 1826 | 100 | 39 kDa encoded by N33 | Homo sapiens |
| 550 | U42360 | 1808 | 99 | N33 protein form 1 | Homo sapiens |
| 551 | AAH05839 | 1492 | 100 | BC005839 follistatin-like 3 | Homo sapiens |
| | | | | (secreted glycoprotein) | |
| 551 | BC033119 | 1492 | 100 | follistatin-like 3 (secreted | Homo sapiens |
| | | | | glycoprotein) | |
| 551 | U76702 | 1492 | 100 | follistatin-related protein FLRG | Homo sapiens |
| 552 | AAH05354 | 564 | 100 | BC005354 ribosomal protein, large | Homo sapiens |
| | | | | P2 | |
| 552 | AAH05920 | 564 | 100 | BC005920 ribosomal protein, large | Homo sapiens |
| | | | | P2 | |
| 552 | AAH07573 | 564 | 100 | BC007573 ribosomal protein, large | Homo sapiens |
| | | | | P2 | |
| 553 | AAH17660 | 414 | 100 | BC017660 Unknown (protein for | Homo sapiens |
| | | | | MGC: 14608) | |
| 553 | AJ249731 | 414 | 100 | putative G8.2 protein | Homo sapiens |
| 553 | AJ249732 | 307 | 79 | G8 protein | Homo sapiens |
| 554 | AAH05966 | 647 | 100 | BC005966 ring finger protein 7 | Homo sapiens |
| 554 | AAH08627 | 647 | 100 | BC008627 ring finger protein 7 | Homo sapiens |
| 554 | AF092878_1 | 647 | 100 | AF092878 zinc RING finger protein | Homo sapiens |
| | | | | SAG | |
| 555 | AAH05975 | 1163 | 100 | BC005975 calcyclin binding | Homo sapiens |
| | | | | protein | |
| 555 | AF314752_1 | 1163 | 100 | AF314752 calcyclin binding | Homo sapiens |
| | | | | protein | |
| 555 | BC022352 | 1163 | 100 | Siah-interacting protein | Homo sapiens |
| 556 | AAH06337 | 739 | 100 | BC006337 Unknown (protein for | Homo sapiens |
| | | | | MGC: 12798) | |
| 556 | M37194 | 739 | 100 | clathrin-associated protein 17 | Rattus |
| | | | | | norvegicus |
| 556 | X97074 | 729 | 98 | clathrin-associated protein | Homo sapiens |
| 557 | AAH01928 | 3365 | 100 | BC001928 protein disulfide | Homo sapiens |
| | | | | isomerase related protein | |
| | | | | (calcium-binding protein, | |
| | | | | intestinal-related) | |
| 557 | AAH06344 | 3365 | 100 | BC006344 protein disulfide | Homo sapiens |
| | | | | isomerase related protein | |
| | | | | (calcium-binding protein, | |
| | | | | intestinal-related) | |
| 557 | AAH11754 | 3365 | 100 | BC011754 Similar to protein | Homo sapiens |
| | | | | disulfide isomerase related | |
| | | | | protein (calcium-binding protein, | |
| | | | | intestinal-related) | |
| 558 | AF453478_1 | 1155 | 100 | AF453478 phosphopantetheine | Homo sapiens |
| | | | | adenylyltransferase/ | |
| | | | | dephosphocoenzyme A kinase | |
| 558 | AY094602 | 1155 | 100 | bifunctional phosphopantetheine | Homo sapiens |
| | | | | adenylyl transferase/dephospho | |
| | | | | CoA kinase | |
| 558 | BC020985 | 1155 | 100 | Unknown (protein for MGC: 9724) | Homo sapiens |
| 559 | AAH06393 | 2797 | 100 | BC006393 Similar to | Homo sapiens |
| | | | | carboxypeptidase Z | |
| 559 | AF017638 | 2419 | 86 | carboxypeptidase Z | Rattus |
| | | | | | norvegicus |
| 559 | U83411 | 2787 | 99 | carboxypeptidase Z precursor | Homo sapiens |
| 560 | AF126110_1 | 3913 | 100 | AF126110 fibulin-1 isoform D | Homo sapiens |
| | | | | precursor | |
| 560 | U01244 | 3913 | 100 | fibulin-1D | Homo sapiens |
| 560 | X70854 | 3392 | 84 | BM-90/fibulin | Mus musculus |
| 561 | AAH02343 | 2494 | 100 | BC002343 Similar to nucleolin | Homo sapiens |
| 561 | AAH06494 | 2494 | 100 | BC006494 Unknown (protein for | Homo sapiens |
| | | | | MGC: 1440) | |
| 561 | AAH06516 | 2494 | 100 | BC006516 Unknown (protein for | Homo sapiens |
| | | | | MGC: 3588) | |
| 562 | AAH20515 | 772 | 100 | BC020515 ribosomal protein S14 | Homo sapiens |
| 562 | M11241 | 772 | 100 | ribosomal protein S14 | Cricetulus |
| | | | | | griseus |
| 562 | M35008 | 772 | 100 | ribosomal protein S14 | Cricetulus |
| | | | | | griseus |
| 563 | AAH08926 | 645 | 100 | BC008926 ribosomal protein L29 | Homo sapiens |
| 563 | U10248 | 645 | 100 | ribosomal protein L29 | Homo sapiens |
| 563 | U49083 | 645 | 100 | HIP | Homo sapiens |
| 564 | AAH06791 | 1105 | 100 | BC006791 ribosomal protein L10a | Homo sapiens |
| 564 | AAH11366 | 1105 | 100 | BC011366 Similar to ribosomal | Homo sapiens |
| | | | | protein L10a | |
| 564 | X93352 | 1105 | 100 | ribosomal protein L10a | Rattus |
| | | | | | norvegicus |
| 565 | AAH01418 | 1132 | 100 | BC001418 Similar to RIKEN cDNA | Homo sapiens |
| | | | | 1810017F10 gene | |
| 565 | AAH13953 | 1132 | 100 | BC013953 Unknown (protein for | Homo sapiens |
| | | | | MGC: 2853) | |
| 565 | AY027543 | 1132 | 100 | beta-casein-like protein | Homo sapiens |
| 566 | AAH07038 | 1762 | 100 | BC007038 lumican | Homo sapiens |
| 566 | BC035997 | 1762 | 100 | lumican | Homo sapiens |
| 566 | U21128 | 1762 | 100 | lumican | Homo sapiens |
| 567 | AAH03609 | 1441 | 100 | BC003609 thioredoxin peroxidase | Homo sapiens |
| | | | | (antioxidant enzyme) | |
| 567 | AAH07107 | 1441 | 100 | BC007107 thioredoxin peroxidase | Homo sapiens |
| | | | | (antioxidant enzyme) | |
| 567 | AAH16770 | 1441 | 100 | BC016770 thioredoxin peroxidase | Homo sapiens |
| | | | | (antioxidant enzyme) | |
| 568 | AAH07282 | 952 | 100 | BC007282 Unknown (protein for | Homo sapiens |
| | | | | MGC: 15626) | |
| 568 | AK014338 | 909 | 97 | unnamed protein product | Mus musculus |
| 568 | M83751 | 937 | 98 | arginine-rich protein | Homo sapiens |
| 569 | AAH07402 | 1005 | 100 | BC007402 apolipoprotein D | Homo sapiens |
| 569 | J02611 | 1005 | 100 | apolipoprotein D precursor | Homo sapiens |
| 569 | M16696 | 1005 | 100 | apolipoprotein D precursor | Homo sapiens |
| 570 | AAH01603 | 849 | 100 | BC001603 Similar to ribosomal | Homo sapiens |
| | | | | protein L21 | |
| 570 | AAH07505 | 849 | 100 | BC007505 Unknown (protein for | Homo sapiens |
| | | | | MGC: 4136) | |
| 570 | X89401 | 849 | 100 | ribosomal protein L21 | Homo sapiens |
| 571 | AAH07507 | 605 | 100 | BC007507 ribosomal protein S20 | Homo sapiens |
| 571 | BC011323 | 605 | 100 | Similar to ribosomal protein S20 | Mus musculus |
| 571 | X51537 | 605 | 100 | ribosomal protein S20 (AA 1-119) | Rattus |
| | | | | | Rattus |
| 572 | AAH14459 | 791 | 100 | BC014459 Similar to ribosomal | Homo sapiens |
| | | | | protein L23a | |
| 572 | BC029892 | 791 | 100 | ribosomal protein L23a | Mus musculus |
| 572 | X65228 | 791 | 100 | ribosomal protein L23a | Rattus |
| | | | | | Rattus |
| 573 | AJ420896 | 2114 | 99 | SPPL2a protein | Homo sapiens |
| 573 | AK027446 | 2126 | 100 | unnamed protein product | Homo sapiens |
| 573 | BC025740 | 2114 | 99 | Similar to hypothetical protein | Homo sapiens |
| | | | | FLJ14540 | |
| 574 | AF036548 | 554 | 82 | RGC-32 | Rattus |
| | | | | | norvegicus |
| 574 | AF036549_1 | 569 | 100 | AF036549 RGC32 | Homo sapiens |
| 574 | AL354833 | 607 | 91 | bA157L14.2 (RGC32, a novel gene | Homo sapiens |
| | | | | induced by complement activation | |
| | | | | in oligodendrocytes) | |
| 575 | AAH01024 | 2749 | 99 | BC001024 putative nucleotide | Homo sapiens |
| | | | | binding protein, estradiol- | |
| | | | | induced | |
| 575 | AK027514 | 2756 | 100 | unnamed protein product | Homo sapiens |
| 575 | AK027516 | 2753 | 99 | unnamed protein product | Homo sapiens |
| 576 | AAH07834 | 563 | 100 | BC007834 Unknown (protein for | Homo sapiens |
| | | | | MGC: 14141) | |
| 577 | AAH03061 | 2338 | 99 | BC003061 protease, cysteine, 1 | Homo sapiens |
| | | | | (legumain) | |
| 577 | D55696 | 2335 | 99 | cysteine protease | Homo sapiens |
| 577 | Y09862 | 2339 | 100 | legumain | Homo sapiens |
| 578 | AAH08081 | 1095 | 100 | BC008081 Similar to KDEL (Lys- | Homo sapiens |
| | | | | Asp-Glu-Leu) endoplasmic | |
| | | | | reticulum protein retention | |
| | | | | receptor 2 | |
| 578 | AAH14568 | 1095 | 100 | BC014568 Similar to KDEL (Lys- | Homo sapiens |
| | | | | Asp-Glu-Leu) endoplasmic | |
| | | | | reticulum protein retention | |
| | | | | receptor 2 | |
| 578 | X63745 | 1095 | 100 | KDEL receptor | Homo sapiens |
| 579 | AF004877 | 7574 | 99 | pro-alpha 2(I) collagen | Homo sapiens |
| 579 | J03464 | 7554 | 99 | pre-pro-alpha-2 type I collagen | Homo sapiens |
| 579 | Z74616 | 7596 | 100 | prepro-alpha2(I) collagen | Homo sapiens |
| 580 | AAH08188 | 946 | 100 | BC008188 Unknown (protein for | Homo sapiens |
| | | | | MGC: 5243) | |
| 580 | AF021819 | 946 | 100 | RNA-binding protein regulatory | Homo sapiens |
| | | | | subunit | |
| 580 | AL034417 | 946 | 100 | bK215D11.1 (RNA-binding protein | Homo sapiens |
| | | | | regulatory subunit) | |
| 581 | AAH08283 | 594 | 100 | BC008283 cholecystokinin | Homo sapiens |
| 581 | L00354 | 594 | 100 | cholecystokinin | Homo sapiens |
| 581 | M60458 | 569 | 95 | cholecystokinin | Macaca |
| | | | | | fascicularis |
| 582 | AAH06794 | 693 | 99 | BC006794 Similar to interferon | Homo sapiens |
| | | | | induced transmembrane protein 3 | |
| | | | | (1-8U) | |
| 582 | AAH08417 | 698 | 100 | BC008417 Similar to interferon | Homo sapiens |
| | | | | induced transmembrane protein 3 | |
| | | | | (1-8U) | |
| 582 | BC022439 | 698 | 100 | interferon induced transmembrane | Homo sapiens |
| | | | | protein 3 (1-8U) | |
| 583 | AAH05993 | 1421 | 100 | BC005993 Unknown (protein for | Homo sapiens |
| | | | | MGC: 14796) | |
| 583 | AAH08691 | 1421 | 100 | BC008691 Unknown (protein for | Homo sapiens |
| | | | | MGC: 8886) | |
| 583 | AAH15644 | 1421 | 100 | BC015644 Ras suppressor protein 1 | Homo sapiens |
| 584 | AAH08938 | 1942 | 100 | BC008938 Similar to | Homo sapiens |
| | | | | histocompatibility 13 | |
| 584 | AAH08959 | 1942 | 100 | BC008959 Similar to | Homo sapiens |
| | | | | histocompatibility 13 | |
| 584 | AF483215_1 | 1934 | 99 | AF483215 minor histocompatibility | Homo sapiens |
| | | | | antigen H13 isoform 1 | |
| 585 | AAH16320 | 2150 | 100 | BC016320 cathepsin D (lysosomal | Homo sapiens |
| | | | | aspartyl protease) | |
| 585 | M11233 | 2150 | 100 | preprocathepsin D | Homo sapiens |
| 585 | X05344 | 2150 | 100 | precursor polypeptide (AA −20 to | Homo sapiens |
| | | | | 392) | |
| 586 | AAH08983 | 1364 | 100 | BC008983 complement component 1, | Homo sapiens |
| | | | | q subcomponent, beta polypeptide | |
| 586 | X03084 | 1240 | 100 | C1q B-chain precursor | Homo sapiens |
| 586 | X16874 | 1075 | 79 | precursor polypeptide (AA −25 to | Mus musculus |
| | | | | 228) | |
| 587 | AAH09177 | 1014 | 100 | BC009177 ras homolog gene family, | Homo sapiens |
| | | | | member C | |
| 587 | AF498972_1 | 1014 | 100 | AF498972 small GTP binding | Homo sapiens |
| | | | | protein RhoC | |
| 587 | BC004627 | 1014 | 100 | ras homolog gene family, member C | Mus musculus |
| 588 | AAH09200 | 1068 | 100 | BC009200 Rho GDP dissociation | Homo sapiens |
| | | | | inhibitor (GDI) beta | |
| 588 | AF498927_1 | 1068 | 100 | AF498927 Rho GDP dissociation | Homo sapiens |
| | | | | inhibitor beta | |
| 588 | X69549 | 1068 | 100 | Human rho GDP-dissociation | Homo sapiens |
| | | | | Inhibitor 2(IEF 8120) | |
| 589 | AAH09201 | 1137 | 100 | BC009201 clathrin, light | Homo sapiens |
| | | | | polypeptide (Lca) | |
| 589 | AAH19287 | 1137 | 100 | BC019287 clathrin, light | Homo sapiens |
| | | | | polypeptide (Lca) | |
| 589 | AL158830 | 1137 | 100 | bA421H8.4.2 (clathrin, light | Homo sapiens |
| | | | | polypeptide (LCA)) | |
| 590 | AAH09232 | 596 | 100 | BC009232 Similar to G antigen 8 | Homo sapiens |
| 590 | AJ318880 | 596 | 100 | XAGE-2 protein | Homo sapiens |
| 590 | AJ318891 | 596 | 100 | XAGE-2 protein | Homo sapiens |
| 591 | AAH03378 | 1149 | 100 | BC003378 high-mobility group | Homo sapiens |
| | | | | (nonhistone chromosomal) protein 1 | |
| 591 | BC030981 | 1149 | 100 | high-mobility group (nonhistone | Homo sapiens |
| | | | | chromosomal) protein 1 | |
| 591 | X12597 | 1149 | 100 | HMG-1 protein (AA 1-215) | Homo sapiens |
| 592 | AB002368 | 5586 | 100 | KIAA0370 | Homo sapiens |
| 592 | AY026388 | 5765 | 100 | ran binding protein RanBP20 | Homo sapiens |
| 592 | AY029528 | 5663 | 97 | RANBP20 | Mus musculus |
| 593 | AAH09799 | 1308 | 100 | BC009799 amphiregulin | Homo sapiens |
| | | | | (schwannoma-derived growth | |
| | | | | factor) | |
| 593 | M30703 | 1308 | 100 | amphiregulin | Homo sapiens |
| 593 | M30704 | 1308 | 100 | amphiregulin | Homo sapiens |
| 594 | AAH09869 | 511 | 100 | BC009869 Unknown (protein for | Homo sapiens |
| | | | | MGC: 16406) | |
| 594 | AAH15491 | 511 | 100 | BC015491 Unknown (protein for | Homo sapiens |
| | | | | MGC: 8965) | |
| 594 | BC022326 | 511 | 100 | Unknown (protein for MGC: 22741) | Homo sapiens |
| 595 | AAH09898 | 1921 | 100 | BC009898 spermine synthase | Homo sapiens |
| 595 | AD001528 | 1921 | 100 | spermidine aminopropyltransferase | Homo sapiens |
| 595 | Z49099 | 1916 | 100 | spermine synthase | Homo sapiens |
| 596 | AL365410 | 1055 | 100 | hypothetical protein | Homo sapiens |
| 596 | L32162 | 294 | 70 | transcription factor | Homo sapiens |
| 597 | AAH10016 | 1542 | 100 | BC010016 Similar to CD47 antigen | Homo sapiens |
| | | | | (Rh-related antigen, integrin- | |
| | | | | associated signal transducer) | |
| 597 | AAH12884 | 1542 | 100 | BC012884 Unknown (protein for | Homo sapiens |
| | | | | MGC: 9240) | |
| 597 | Z25521 | 1542 | 100 | integrin associated protein | Homo sapiens |
| 598 | AAH10055 | 784 | 100 | BC010055 hypothetical protein | Homo sapiens |
| | | | | PRO2605 | |
| 598 | AF116721_109 | 642 | 100 | AF116709 PRO2605 | Homo sapiens |
| 599 | AAH04976 | 634 | 100 | BC004976 Unknown (protein for | Homo sapiens |
| | | | | IMAGE: 2958115) | |
| 599 | AAH10076 | 634 | 100 | BC010076 Unknown (protein for | Homo sapiens |
| | | | | MGC: 19576) | |
| 599 | AY061855 | 634 | 100 | mitochondrial ribosomal protein | Homo sapiens |
| | | | | S6 | |
| 600 | AAH10129 | 907 | 100 | BC010129 Similar to hypothetical | Homo sapiens |
| | | | | protein R33729_1 | |
| 600 | AAH14655 | 907 | 100 | BC014655 Unknown (protein for | Homo sapiens |
| | | | | MGC: 20383) | |
| 600 | AL365374 | 894 | 100 | R33729_1 hypothetical protein | Homo sapiens |
| 601 | AB028894 | 824 | 100 | ribosomal protein S11 | Mus musculus |
| 601 | BC012641 | 824 | 100 | ribosomal protein S11 | Mus musculus |
| 601 | U93864 | 824 | 100 | ribosomal protein S11 | Mus musculus |
| 602 | BC002077 | 1058 | 100 | RAB1, member RAS oncogene family | Mus musculus |
| 602 | X15744 | 1058 | 100 | GTP-binding protein | Mus musculus |
| 602 | Y00094 | 1058 | 100 | Ypt1 protein (AA 1-205) | Mus musculus |
| 603 | AAH02947 | 1482 | 100 | BC002947 folate receptor 1 | Homo sapiens |
| | | | | (adult) | |
| 603 | U20391 | 1482 | 100 | folate receptor | Homo sapiens |
| 603 | X62753 | 1482 | 100 | adult folate binding protein | Homo sapiens |
| 604 | U65932 | 3016 | 100 | extracellular matrix protein 1 | Homo sapiens |
| 604 | U65938 | 3016 | 100 | extracellular matrix protein 1 | Homo sapiens |
| 604 | U68186 | 3016 | 100 | extracellular matrix protein 1 | Homo sapiens |
| 605 | AAH10897 | 541 | 100 | BC010897 Similar to JM27 protein | Homo sapiens |
| 605 | AF275258_1 | 541 | 100 | AF275258 PAGE-4 | Homo sapiens |
| 605 | AJ005894 | 541 | 100 | JM27 | Homo sapiens |
| 606 | AAH11171 | 2528 | 100 | BC011171 serine (or cysteine) | Homo sapiens |
| | | | | proteinase inhibitor, clade G (C1 | |
| | | | | inhibitor), member 1 | |
| 606 | AF435921_1 | 2524 | 99 | AF435921 C1 esterase inhibitor | Homo sapiens |
| 606 | X07427 | 2524 | 99 | C1 inhibitor | Homo sapiens |
| 607 | D38112 | 1781 | 93 | cytochrome b | Homo sapiens |
| 607 | U09500 | 1780 | 93 | cytochrome b | Homo sapiens |
| 607 | V00662 | 1785 | 93 | cytochrome B | Homo sapiens |
| 608 | AAH11514 | 696 | 100 | BC011514 Similar to ribosomal | Homo sapiens |
| | | | | protein L32 | |
| 608 | K02060 | 696 | 100 | ribosomal protein L32-3A | Mus musculus |
| 608 | X06483 | 696 | 100 | ribosomal protein L32 | Rattus |
| | | | | | norvegicus |
| 609 | AAH11786 | 645 | 100 | BC011786 Unknown (protein for | Homo sapiens |
| | | | | MGC: 19839) | |
| 609 | AF318382_1 | 645 | 100 | AF318382 unknown | Homo sapiens |
| 609 | X07868 | 456 | 100 | 1.8 kb mRNA (AA 1-84) | Homo sapiens |
| 610 | AAH11792 | 1649 | 100 | BC011792 Unknown (protein for | Homo sapiens |
| | | | | MGC: 19561) | |
| 610 | AAH17408 | 1643 | 99 | BC017408 Unknown (protein for | Homo sapiens |
| | | | | MGC: 27221) | |
| 610 | U16660 | 1603 | 97 | peroxisomal enoyl-CoA hydratase- | Homo sapiens |
| | | | | like protein | |
| 611 | AAH00159 | 2163 | 100 | BC000159 keratin 17 | Homo sapiens |
| 611 | AAH11901 | 2163 | 100 | BC011901 Similar to keratin 17 | Homo sapiens |
| 611 | X62571 | 2163 | 100 | keratin related product | Homo sapiens |
| 612 | AAH12132 | 3933 | 100 | BC012132 Similar to DEAD/H (Asp- | Homo sapiens |
| | | | | Glu-Ala-Asp/His) box polypeptide 1 | |
| 612 | BC010624 | 3872 | 97 | Unknown (protein for MGC: 11570) | Mus musculus |
| 612 | X70649 | 3933 | 100 | member of DEAD box protein family | Homo sapiens |
| 613 | AF157623_1 | 2466 | 100 | AF157623 HTRA serine protease | Homo sapiens |
| 613 | D87258 | 2466 | 100 | serin protease with IGF-binding | Homo sapiens |
| | | | | motif | |
| 613 | Y07921 | 2466 | 100 | novel serine protease, PRSS11 | Homo sapiens |
| 614 | AF242550_1 | 1030 | 100 | AF242550 cellular nucleic acid | Rattus |
| | | | | binding protein | norvegicus |
| 614 | AF389887 | 1030 | 100 | zinc finger protein 9 | Homo sapiens |
| 614 | D45254 | 1030 | 100 | Cellular Nucleic Acid Binding | Rattus |
| | | | | Protein | norvegicus |
| 615 | AAH14277 | 1191 | 100 | BC014277 Similar to tissue | Homo sapiens |
| | | | | inhibitor of metalloproteinase 3 | |
| | | | | (Sorsby fundus dystrophy, | |
| | | | | pseudoinflammatory) | |
| 615 | U33114 | 1191 | 100 | tissue inhibitor of | Homo sapiens |
| | | | | metalloproteinases-3 | |
| 615 | X76227 | 1191 | 100 | tissue inhibitor of | Homo sapiens |
| | | | | metalloproteinases-3 | |
| 616 | AAH12384 | 1017 | 100 | BC012384 Similar to programmed | Homo sapiens |
| | | | | cell death 6 | |
| 616 | AF035606 | 1017 | 100 | calcium binding protein | Homo sapiens |
| 616 | U58773_1 | 1017 | 100 | U58773 calcium binding protein | Homo sapiens |
| 617 | AAH12464 | 755 | 100 | BC012464 prefoldin 2 | Homo sapiens |
| 617 | AF117237_1 | 755 | 100 | AF117237 prefoldin subunit 2 | Homo sapiens |
| 617 | BC026839 | 729 | 96 | Similar to prefoldin 2 | Mus musculus |
| 618 | AAH08230 | 849 | 100 | BC008230 ribosomal protein L12 | Homo sapiens |
| 618 | BC018321 | 848 | 99 | ribosomal protein L12 | Mus musculus |
| 618 | L06505 | 849 | 100 | ribosomal protein L12 | Homo sapiens |
| 619 | AAH12606 | 1665 | 100 | BC012606 Similar to proteasome | Homo sapiens |
| | | | | (prosome, macropain) 26S subunit, | |
| | | | | non-ATPase, 7 (Mov34 homolog) | |
| 619 | D50063 | 1637 | 98 | proteasome subunit p40/Mov34 | Homo sapiens |
| | | | | protein | |
| 619 | M64640 | 1597 | 96 | 36 kD protein | Mus musculus |
| 620 | AAH118345 | 1485 | 100 | BC011835 Similar to ATPase, | Homo sapiens |
| | | | | Na+/K+ transporting, beta 3 | |
| | | | | polypeptide | |
| 620 | AF005896 | 1485 | 100 | Na K-ATPase beta-3 subunit | Homo sapiens |
| 620 | U51478 | 1485 | 100 | sodium/potassium-transporting | Homo sapiens |
| | | | | ATPase beta-3 subunit | |
| 621 | AAH13041 | 5526 | 100 | BC013041 Unknown (protein for | Homo sapiens |
| | | | | MGC: 4781) | |
| 621 | M58028 | 5526 | 100 | ubiquitin-activating enzyme E1 | Homo sapiens |
| 621 | X56976 | 5516 | 99 | ubiquitin activating enzyme E1 | Homo sapiens |
| 622 | AAH13162 | 491 | 100 | BC013162 Similar to heat shock | Homo sapiens |
| | | | | protein, 30 kDa | |
| 622 | AF085359 | 491 | 100 | HSPC030 | Homo sapiens |
| 622 | AF537132 | 491 | 100 | selenoprotein K | Homo sapiens |
| 623 | AAH13175 | 992 | 100 | BC013175 Similar to novel RGD- | Homo sapiens |
| | | | | containing protein | |
| 623 | BC029249 | 958 | 96 | dynactin 6 | Mus musculus |
| 623 | D84145 | 992 | 100 | WS-3 | Homo sapiens |
| 624 | BC003825 | 2344 | 100 | tubulin, beta 5 | Mus musculus |
| 624 | X04663 | 2344 | 100 | beta-tubulin AA 1-444 (79 is 1st | Mus musculus |
| | | | | base in codon) | |
| 624 | X07011 | 2344 | 100 | c(beta)7 tubulin (AA 1-444) | Gallus |
| | | | | | gallus |
| 625 | A47413 | 3336 | 96 | CALPASTATINE HUMAINE | Homo sapiens |
| 625 | AAH13579 | 3420 | 100 | BC013579 Similar to calpastatin | Homo sapiens |
| 625 | D16217 | 3340 | 93 | calpastatin | Homo sapiens |
| 626 | BC024378 | 567 | 100 | defender against cell death 1 | Mus musculus |
| 626 | Y13335 | 567 | 100 | DAD-1 | Mus musculus |
| 626 | Y13336 | 567 | 100 | DAD-1 | Rattus |
| | | | | | norvegicus |
| 627 | AAH13975 | 3963 | 100 | BC013975 Similar to sema domain, | Homo sapiens |
| | | | | immunoglobulin domain (Ig), short | |
| | | | | basic domain, secreted, | |
| | | | | (semaphorin) 3B | |
| 627 | BC024220 | 3963 | 100 | Unknown (protein for MGC: 1483) | Homo sapiens |
| 627 | U28369 | 3951 | 99 | semaphorin V | Homo sapiens |
| 628 | AAH14142 | 3503 | 100 | BC014142 Similar to | Homo sapiens |
| | | | | glucuronidase, beta | |
| 628 | AX147652 | 3496 | 99 | unnamed protein product | Homo sapiens |
| 628 | M15182 | 3496 | 99 | beta-glucuronidase precursor (EC | Homo sapiens |
| | | | | 3.2.1.31) | |
| 629 | AB022163 | 2024 | 92 | mouse ortholog of the zebrafish | Mus musculus |
| | | | | hagoromo gene | |
| 629 | AF281859 | 2217 | 100 | dactylin | Homo sapiens |
| 629 | BC027031 | 2024 | 92 | f-box and WD-40 domain protein 4 | Mus musculus |
| 630 | AAH01377 | 1114 | 100 | BC001377 DKFZP586G1722 protein | Homo sapiens |
| 630 | AAH06514 | 1114 | 100 | BC006514 DKFZP586G1722 protein | Homo sapiens |
| 630 | AAH14391 | 1114 | 100 | BC014391 DKFZP586G1722 protein | Homo sapiens |
| 631 | AF159256_1 | 1147 | 100 | AF159256 Lps/Ran GTPase | Mus musculus |
| 631 | AF306457_1 | 1147 | 100 | AF306457 GTPase | Rattus |
| | | | | | norvegicus |
| 631 | BC014829 | 1147 | 100 | RAN, member RAS oncogene family | Mus musculus |
| 632 | AAH15000 | 1347 | 100 | BC015000 Similar to major | Homo sapiens |
| | | | | histocompatibility complex, class | |
| | | | | II, DP beta 1 | |
| 632 | M57466 | 1306 | 96 | light chain | Homo sapiens |
| 632 | X01426 | 1301 | 96 | SB-2-beta precursor polypeptide | Homo sapiens |
| | | | | (aa −29 to 229) | |
| 633 | AAH15039 | 1006 | 100 | BC015039 microfibrillar- | Homo sapiens |
| | | | | associated protein 2 | |
| 633 | AL049569 | 1006 | 100 | dJ37C10.4 (microfibrillar- | Homo sapiens |
| | | | | associated protein 2 | |
| | | | | (microfibril-associated | |
| | | | | glycoprotein precursor, MGAP1)) | |
| 633 | U19718 | 1006 | 100 | microfibril-associated | Homo sapiens |
| | | | | glycoprotein | |
| 634 | AF117383_1 | 746 | 100 | AF117383 placental protein 13; | Homo sapiens |
| | | | | PP13 | |
| 634 | AY055826 | 746 | 100 | placenta protein 13 | Homo sapiens |
| 634 | BC022257 | 510 | 69 | Similar to placental protein 13- | Homo sapiens |
| | | | | like protein | |
| 635 | AAH02387 | 2063 | 100 | BC002387 nucleosome assembly | Homo sapiens |
| | | | | protein 1-like 1 | |
| 635 | AAH15599 | 2063 | 100 | BC015599 nucleosome assembly | Homo sapiens |
| | | | | protein 1-like 1 | |
| 635 | AL162068 | 2063 | 100 | hypothetical protein | Homo sapiens |
| 636 | A03911 | 2017 | 99 | glia-derived neurite-promoting | Homo sapiens |
| | | | | factor (GdNPF) | |
| 636 | AAH15663 | 2040 | 100 | BC015663 Similar to serine (or | Homo sapiens |
| | | | | cysteine) proteinase inhibitor, | |
| | | | | clade E (nexin, plasminogen | |
| | | | | activator inhibitor type 1), | |
| | | | | member 2 | |
| 636 | M17783 | 2016 | 99 | glia-derived nexin precursor | Homo sapiens |
| 637 | AAH02403 | 3107 | 100 | BC002403 lectin, galactoside- | Homo sapiens |
| | | | | binding, soluble, 3 binding | |
| | | | | protein (galectin 6 binding | |
| | | | | protein) | |
| 637 | AAH02998 | 3107 | 100 | BC002998 lectin, galactoside- | Homo sapiens |
| | | | | binding, soluble, 3 binding | |
| | | | | protein (galectin 6 binding | |
| | | | | protein) | |
| 637 | AAH15761 | 3107 | 100 | BC015761 lectin, galactoside- | Homo sapiens |
| | | | | binding, soluble, 3 binding | |
| | | | | protein | |
| 638 | AAH15032 | 2122 | 100 | BC015032 ribosomal protein L3 | Homo sapiens |
| 638 | AAH15767 | 2122 | 100 | BC015767 ribosomal protein L3 | Homo sapiens |
| 638 | BC008003 | 2122 | 100 | ribosomal protein L3 | Homo sapiens |
| 639 | AF052694 | 2391 | 100 | alpha-tubulin | Meriones |
| | | | | | unguiculatus |
| 639 | BC002219 | 2391 | 100 | Similar to tubulin alpha 1 | Mus musculus |
| 639 | BC008117 | 2391 | 100 | tubulin alpha 1 | Mus musculus |
| 640 | AK054840 | 169 | 67 | unnamed protein product | Homo sapiens |
| 640 | AK097965 | 163 | 64 | unnamed protein product | Homo sapiens |
| 640 | AX400008 | 150 | 58 | unnamed protein product | Homo sapiens |
| 641 | AAH02449 | 1196 | 99 | BC002449 Similar to CG10641 gene | Homo sapiens |
| | | | | product | |
| 641 | AAH04128 | 1331 | 99 | BC004128 Unknown (protein for | Homo sapiens |
| | | | | IMAGE: 3940060) | |
| 641 | AK023674 | 1199 | 100 | unnamed protein product | Homo sapiens |
| 642 | AAH01537 | 2971 | 100 | BC001537 Unknown (protein for | Homo sapiens |
| | | | | MGC: 786) | |
| 642 | AB021743 | 2968 | 99 | PR65 | Mus musculus |
| 642 | BC006606 | 2968 | 99 | protein phosphatase 2 (formerly | Mus musculus |
| | | | | 2A), regulatory subunit A (PR | |
| | | | | 65), alpha isoform | |
| 643 | AAH09642 | 939 | 100 | BC009642 FXYD domain-containing | Homo sapiens |
| | | | | ion transport regulator 5 | |
| 643 | AB072911 | 939 | 100 | dysadherin | Homo sapiens |
| 643 | AF161462_1 | 923 | 98 | AF161462 HSPC113 | Homo sapiens |
| 644 | AAH09687 | 869 | 100 | BC009687 epithelial membrane | Homo sapiens |
| | | | | protein 2 | |
| 644 | AY057060 | 869 | 100 | epithelial membrane protein 2 | Homo sapiens |
| 644 | U52100 | 869 | 100 | XMP | Homo sapiens |
| 645 | AB012214 | 6727 | 78 | DNA cytosine 5 methyltransferase | Rattus |
| | | | | | Rattus |
| 645 | AF180682 | 6869 | 100 | DNA (cytosine-5)- | Homo sapiens |
| | | | | methyltransferase | |
| 645 | X63692 | 8587 | 100 | DNA (cytosine-5-)- | Homo sapiens |
| | | | | methyltransferase | |
| 646 | AAH15961 | 961 | 100 | BC015961 adrenomedullin | Homo sapiens |
| 646 | D14874 | 961 | 100 | adrenomedullin precursor | Homo sapiens |
| 646 | S73906 | 961 | 100 | adrenomedullin; AM | Homo sapiens |
| 647 | AAH15973 | 514 | 100 | BC015973 S100 calcium-binding | Homo sapiens |
| | | | | protein A10 (annexin II ligand, | |
| | | | | calpactin I, light polypeptide | |
| | | | | (p11)) | |
| 647 | M38591 | 514 | 100 | cellular ligand of annexin II | Homo sapiens |
| 647 | M81457 | 514 | 100 | calpactin I light chain | Homo sapiens |
| 648 | AAH16056 | 1137 | 100 | BC016056 claudin 3 | Homo sapiens |
| 648 | AB000714 | 1137 | 100 | RVP1 | Homo sapiens |
| 648 | AF007189 | 1137 | 100 | claudin 3 | Homo sapiens |
| 649 | AAH16142 | 1432 | 100 | BC016142 Similar to RIKEN cDNA | Homo sapiens |
| | | | | 2310032N20 gene | |
| 649 | AAH20773 | 1432 | 100 | BC020773 Unknown (protein for | Homo sapiens |
| | | | | MGC: 22685) | |
| 649 | AX405824 | 1432 | 100 | unnamed protein product | Homo sapiens |
| 650 | AF315378_1 | 1955 | 98 | AF315378 suppressor of | Rattus |
| | | | | profilin/p41 of actin-related | norvegicus |
| | | | | complex 2/3 | |
| 650 | BC039594 | 1964 | 99 | actin related protein 2/3 | Homo sapiens |
| | | | | complex, subunit 1A, 41 kDa | |
| 650 | Y08999 | 1980 | 100 | Sop2p-like protein | Homo sapiens |
| 651 | AF492677_1 | 383 | 100 | AF492677 odd homeobox 1 protein | Homo sapiens |
| | | | | isoform A | |
| 651 | AF492680_1 | 383 | 100 | AF492680 odd homeobox 1 protein | Homo sapiens |
| | | | | isoform A | |
| 651 | AF492681_1 | 383 | 100 | AF492681 odd homeobox 1 protein | Homo sapiens |
| | | | | isoform A | |
| 652 | AK056992 | 2163 | 100 | unnamed protein product | Homo sapiens |
| 652 | AX392121 | 2155 | 99 | unnamed protein product | Homo sapiens |
| 652 | AY033237 | 2155 | 99 | alcohol dehydrogenase 8 | Homo sapiens |
| 653 | AAH16748 | 485 | 100 | BC016748 ribosomal protein L37a | Homo sapiens |
| 653 | X14069 | 485 | 100 | ribosomal protein L37a (AA 1-92) | Rattus |
| | | | | | Rattus |
| 653 | X73331 | 485 | 100 | ribosomal protein L37a | Mus musculus |
| 654 | AAH12807 | 3702 | 100 | BC012807 Unknown (protein for | Homo sapiens |
| | | | | MGC: 3483) | |
| 654 | AAH14485 | 3702 | 100 | BC014485 Unknown (protein for | Homo sapiens |
| | | | | MGC: 23206) | |
| 654 | AAH16753 | 3702 | 100 | BC016753 Unknown (protein for | Homo sapiens |
| | | | | MGC: 1138) | |
| 655 | AAH15834 | 1724 | 100 | BC015834 annexin A2 | Homo sapiens |
| 655 | AAH16774 | 1724 | 100 | BC016774 annexin A2 | Homo sapiens |
| 655 | AAH21114 | 1724 | 100 | BC021114 annexin A2 | Homo sapiens |
| 656 | AAH17343 | 644 | 100 | BC017343 ribosomal protein L31 | Homo sapiens |
| 656 | BC008223 | 644 | 100 | ribosomal protein L31 | Mus musculus |
| 656 | X04809 | 644 | 100 | ribosomal protein L31 (AA 1-125) | Rattus |
| | | | | | norvegicus |
| 657 | AAH17378 | 2955 | 100 | BC017378 hexosaminidase B (beta | Homo sapiens |
| | | | | polypeptide) | |
| 657 | AF378118_1 | 2955 | 100 | AF378118 cervical cancer proto- | Homo sapiens |
| | | | | oncogene 7 | |
| 657 | M23294 | 2955 | 100 | beta-hexosaminidase beta-subunit | Homo sapiens |
| 658 | AAH12168 | 1373 | 100 | BC012168 Similar to proteasome | Homo sapiens |
| | | | | (prosome, macropain) subunit, | |
| | | | | beta type, 4 | |
| 658 | AAH17451 | 1373 | 100 | BC017451 proteasome (prosome, | Homo sapiens |
| | | | | macropain) subunit, beta type, 4 | |
| 658 | AAH17486 | 1373 | 100 | BC017486 proteasome (prosome, | Homo sapiens |
| | | | | macropain) subunit, beta type, 4 | |
| 659 | AAH06124 | 2618 | 100 | BC006124 IMP (inosine | Homo sapiens |
| | | | | monophosphate) dehydrogenase 2 | |
| 659 | AAH12840 | 2618 | 100 | BC012840 IMP (inosine | Homo sapiens |
| | | | | monophosphate) dehydrogenase 2 | |
| 659 | AAH15567 | 2618 | 100 | BC015567 IMP (inosine | Homo sapiens |
| | | | | monophosphate) dehydrogenase 2 | |
| 660 | AAH07457 | 1103 | 100 | BC007457 hypothetical protein | Homo sapiens |
| 660 | AAH20796 | 1103 | 100 | BC020796 hypothetical protein | Homo sapiens |
| | | | | HSPC177 | |
| 660 | AAH21168 | 1103 | 100 | BC021168 hypothetical protein | Homo sapiens |
| | | | | HSPC177 | |
| 661 | AAH04904 | 2894 | 99 | BC004904 nuclear RNA export | Homo sapiens |
| | | | | factor 1 | |
| 661 | BC028041 | 2894 | 99 | nuclear RNA export factor 1 | Homo sapiens |
| 661 | U80073 | 2905 | 100 | tip associating protein | Homo sapiens |
| 662 | AF064238_1 | 4503 | 97 | AF064238 smoothelin large isoform | Homo sapiens |
| | | | | L2 | |
| 662 | AY061971 | 4653 | 100 | smoothelin-B2 | Homo sapiens |
| 662 | AY061972 | 4533 | 96 | smoothelin-B3 | Homo sapiens |
| 663 | AAH17773 | 1214 | 100 | BC017773 triggering receptor | Homo sapiens |
| | | | | expressed on myeloid cells 1 | |
| 663 | AF196329_1 | 1214 | 100 | AF196329 triggering receptor | Homo sapiens |
| | | | | expressed on monocytes 1 | |
| 663 | AF287008_1 | 1214 | 100 | AF287008 triggering receptor | Homo sapiens |
| | | | | expressed on monocytes 1 | |
| 664 | AAH17891 | 579 | 100 | BC017891 vesicle-associated | Homo sapiens |
| | | | | membrane protein 5 (myobrevin) | |
| 664 | AF054825 | 579 | 100 | VAMP5 | Homo sapiens |
| 664 | AF077197 | 579 | 100 | VAMP5-like protein | Homo sapiens |
| 665 | AAH17931 | 819 | 100 | BC017931 Similar to RIKEN cDNA | Homo sapiens |
| | | | | 1110055A02 gene | |
| 665 | AF400652_1 | 819 | 100 | AF400652 thyroid hormone receptor | Homo sapiens |
| | | | | interacting protein 3 | |
| 665 | L40410 | 806 | 100 | thyroid receptor interactor | Homo sapiens |
| 666 | AAH18732 | 1606 | 100 | BC018732 Unknown (protein for | Homo sapiens |
| | | | | MGC: 31847) | |
| 666 | AF125533_1 | 1606 | 100 | AF125533 NADH-cytochrome b5 | Homo sapiens |
| | | | | reductase isoform | |
| 666 | AX083421 | 1606 | 100 | unnamed protein product | Homo sapiens |
| 667 | AAH02453 | 3263 | 100 | BC002453 heat shock 70 kD protein | Homo sapiens |
| | | | | 1A | |
| 667 | AAH09322 | 3263 | 100 | BC009322 heat shock 70 kD protein | Homo sapiens |
| | | | | 1A | |
| 667 | AAH18740 | 3263 | 100 | BC018740 heat shock 70 kD protein | Homo sapiens |
| | | | | 1A | |
| 668 | 1680052_1 | 2856 | 100 | S62076 lysosomal enzyme beta-N- | Homo sapiens |
| | | | | acetylhexosaminidase A | |
| 668 | AAH18927 | 2856 | 100 | BC018927 hexosaminidase A (alpha | Homo sapiens |
| | | | | polypeptide) | |
| 668 | M16424 | 2856 | 100 | beta-hexosaminidase alpha chain | Homo sapiens |
| 669 | AAH12992 | 2115 | 99 | BC012992 Similar to RNA binding | Homo sapiens |
| | | | | motif, single stranded | |
| | | | | interacting protein 1 | |
| 669 | AAH12993 | 2115 | 99 | BC012993 Similar to RNA binding | Homo sapiens |
| | | | | motif, single stranded | |
| | | | | interacting protein 1 | |
| 669 | AAH18951 | 2142 | 100 | BC018951 RNA binding motif, | Homo sapiens |
| | | | | single stranded interacting | |
| | | | | protein 1 | |
| 670 | AAH16346 | 908 | 100 | BC016346 Unknown (protein for | Homo sapiens |
| | | | | MGC: 24392) | |
| 670 | AAH16354 | 908 | 100 | BC016354 Unknown (protein for | Homo sapiens |
| | | | | MGC: 24480) | |
| 670 | AAH18990 | 908 | 100 | BC018990 Unknown (protein for | Homo sapiens |
| | | | | MGC: 20176) | |
| 671 | AAH01206 | 2235 | 99 | BC001206 Unknown (protein for | Homo sapiens |
| | | | | MGC: 3208) | |
| 671 | AK025822 | 3505 | 99 | unnamed protein product | Homo sapiens |
| 671 | AL833865 | 3414 | 100 | hypothetical protein | Homo sapiens |
| 672 | AAH06772 | 769 | 100 | BC006772 ribosomal protein S13 | Homo sapiens |
| 672 | BC029732 | 769 | 100 | ribosomal protein S13 | Homo sapiens |
| 672 | X53378 | 769 | 100 | ribosomal protein S13 | Rattus |
| | | | | | Rattus |
| 673 | J05192 | 1982 | 100 | alpha-actin | Homo sapiens |
| 673 | X06801 | 1968 | 99 | alpha-actin (AA 1-377) | Rattus |
| | | | | | Rattus |
| 673 | X13297 | 1968 | 99 | alpha-actin (AA 1-377) | Mus musculus |
| 674 | AAH00260 | 1675 | 99 | BC000260 aldo-keto reductase | Homo sapiens |
| | | | | family 1, member B1 (aldose | |
| | | | | reductase) | |
| 674 | AAH10391 | 1675 | 99 | BC010391 aldo-keto reductase | Homo sapiens |
| | | | | family 1, member B1 (aldose | |
| | | | | reductase) | |
| 674 | J05017 | 1677 | 100 | aldose reductase | Homo sapiens |
| 675 | M22246 | 2623 | 100 | aromatase precursor (EC | Homo sapiens |
| | | | | 1.14.14.1) | |
| 675 | X13589 | 2623 | 100 | aromatase (AA 1-503) | Homo sapiens |
| 675 | Y07508 | 2620 | 99 | aromatase (AA 1-503) | Homo sapiens |
| 676 | M59916 | 3466 | 100 | acid sphingomyelinase | Homo sapiens |
| 676 | M81780 | 3450 | 99 | acid sphingomyelinase | Homo sapiens |
| 676 | X63600 | 3461 | 99 | acid sphingomyelinase | Homo sapiens |
| 677 | AAH21993 | 1707 | 100 | BC021993 guanine nucleotide | Homo sapiens |
| | | | | binding protein (G protein), beta | |
| | | | | polypeptide 2-like 1 | |
| 677 | M24193 | 1707 | 100 | MHC B complex protein 12.3 | Gallus |
| | | | | | gallus |
| 677 | X75313 | 1707 | 100 | B complex protein mRNA 12-3 | Mus musculus |
| 678 | AAH05358 | 642 | 100 | BC005358 non-histone chromosome | Homo sapiens |
| | | | | protein 2 (S. cerevisiae)-like 1 | |
| 678 | AAH19282 | 642 | 100 | BC019282 non-histone chromosome | Homo sapiens |
| | | | | protein 2 (S. cerevisiae)-like 1 | |
| 678 | BC026755 | 642 | 100 | Similar to sperm specific antigen 1 | Mus musculus |
| 679 | AAH19296 | 2747 | 100 | BC019296 chaperonin containing | Homo sapiens |
| | | | | TCP1, subunit 7 (eta) | |
| 679 | AF026292 | 2747 | 100 | chaperonin containing t-complex | Homo sapiens |
| | | | | polypeptide 1, eta subunit; CCT- | |
| | | | | eta | |
| 679 | BC008255 | 2628 | 95 | chaperonin subunit 7 (eta) | Mus musculus |
| 680 | BC035220 | 3879 | 99 | similar to complement component | Homo sapiens |
| 680 | M14058 | 3885 | 100 | human complement C1r | Homo sapiens |
| 680 | X04701 | 3879 | 99 | precursor of C1r (AA −17 to 688) | Homo sapiens |
| 681 | J04080 | 3789 | 100 | complement component C1s | Homo sapiens |
| 681 | M18767 | 3789 | 100 | complement subcomponent C1s | Homo sapiens |
| | | | | precursor | |
| 681 | X06596 | 3789 | 100 | complement protein C1s precursor | Homo sapiens |
| 682 | AAH03175 | 2072 | 100 | BC003175 N-myc downstream | Homo sapiens |
| | | | | regulated | |
| 682 | AF004162 | 2072 | 100 | nickel-specific induction protein | Homo sapiens |
| 682 | D87953 | 2072 | 100 | RTP | Homo sapiens |
| 683 | AF085250 | 759 | 100 | calmodulin | Perca |
| | | | | | flavescens |
| 683 | D83350 | 759 | 100 | calmodulin | Anas |
| | | | | | platyrhynchos |
| 683 | K01945 | 759 | 100 | calmodulin (cDNA clone 71) | Xenopus |
| | | | | | laevis |
| 684 | AAH07911 | 2282 | 100 | BC007911 calreticulin | Homo sapiens |
| 684 | AAH20493 | 2282 | 100 | BC020493 calreticulin | Homo sapiens |
| 684 | AY047586 | 2282 | 100 | calreticulin | Homo sapiens |
| 685 | AAH16300 | 533 | 100 | BC016300 S100 calcium-binding | Homo sapiens |
| | | | | protein A4 (calcium protein, | |
| | | | | calvasculin, metastasin, murine | |
| | | | | placental homolog) | |
| 685 | Z18950 | 533 | 100 | CAPL | Homo sapiens |
| 685 | Z33457 | 533 | 100 | mts1 | Homo sapiens |
| 686 | AAH01506 | 710 | 100 | BC001506 CD59 antigen p18-20 | Homo sapiens |
| | | | | (antigen identified by monoclonal | |
| | | | | antibodies 16.3A5, EJ16, EJ30, | |
| | | | | EL32 and G344) | |
| 686 | X16447 | 710 | 100 | precursor polypeptide (AA −25 to | Homo sapiens |
| | | | | 103) | |
| 686 | X17198 | 710 | 100 | CD59 antigen precursor | Homo sapiens |
| 687 | AAH06290 | 898 | 100 | BC006290 chorionic gonadotropin, | Homo sapiens |
| | | | | beta polypeptide | |
| 687 | BC022796 | 898 | 100 | Unknown (protein for MGC: 39080) | Homo sapiens |
| 687 | BC030994 | 898 | 100 | chorionic gonadotropin, beta | Homo sapiens |
| | | | | polypeptide | |
| 688 | J03225 | 1674 | 100 | lipoprotein-associated | Homo sapiens |
| | | | | coagulation inhibitor precursor | |
| 688 | M58650 | 1674 | 100 | lipoprotein associated | Homo sapiens |
| | | | | coagulation inhibitor | |
| 688 | M59499 | 1674 | 100 | lipoprotein-associated | Homo sapiens |
| | | | | coagulation inhibitor | |
| 689 | AAH14167 | 1072 | 100 | BC014167 Unknown (protein for | Homo sapiens |
| | | | | MGC: 20892) | |
| 689 | AAH20804 | 1072 | 100 | BC020804 ribosomal protein L13 | Homo sapiens |
| 689 | BC027463 | 1072 | 100 | ribosomal protein L13 | Homo sapiens |
| 690 | AAH21136 | 1333 | 100 | BC021136 Unknown (protein for | Homo sapiens |
| | | | | MGC: 32056) | |
| 690 | AF097362_1 | 1333 | 100 | AF097362 gamma-interferon | Homo sapiens |
| | | | | inducible lysosomal thiol | |
| | | | | reductase | |
| 690 | BC031020 | 1329 | 99 | interferon, gamma-inducible | Homo sapiens |
| | | | | protein 30 | |
| 691 | AAH07008 | 929 | 100 | BC007008 crystallin, alpha B | Homo sapiens |
| 691 | M28638 | 929 | 100 | alpha-B2-crystallin | Homo sapiens |
| 691 | S45630 | 929 | 100 | alpha B-crystallin | Homo sapiens |
| 692 | BC003775 | 1169 | 99 | casein kinase II, beta subunit | Mus musculus |
| 692 | M30448 | 1174 | 100 | casein kinase II beta subunit | Homo sapiens |
| 692 | M59458 | 1169 | 99 | casein kinase II beta subunit | Gallus |
| | | | | | gallus |
| 693 | M77820 | 6209 | 50 | fibronectin | Xenopus |
| | | | | | laevis |
| 693 | X02761 | 12570 | 99 | fibronectin precursor | Homo sapiens |
| 693 | X15906 | 7305 | 65 | precursor polypeptide (AA −32 to | Rattus |
| | | | | 2445) | norvegicus |
| 694 | BC032329 | 2740 | 99 | cytochrome P450, subfamily XIA | Homo sapiens |
| | | | | (cholesterol side chain cleavage) | |
| 694 | M14565 | 2753 | 100 | cholesterol side-chain cleavage | Homo sapiens |
| | | | | enzyme P450scc (EC 1.14.15.67) | |
| 694 | X05367 | 2734 | 99 | desmolase | Homo sapiens |
| 695 | AF318372_1 | 592 | 99 | AF318372 unknown | Homo sapiens |
| 695 | AJ318881 | 601 | 100 | XAGE-3 protein | Homo sapiens |
| 695 | AJ318893 | 601 | 100 | XAGE-3 protein | Homo sapiens |
| 696 | AAH18641 | 2406 | 100 | BC018641 eukaryotic translation | Homo sapiens |
| | | | | elongation factor 1 alpha 1 | |
| 696 | AAH21686 | 2406 | 100 | BC021686 eukaryotic translation | Homo sapiens |
| | | | | elongation factor 1 alpha 1 | |
| 696 | BC028674 | 2406 | 100 | eukaryotic translation elongation | Homo sapiens |
| | | | | factor 1 alpha 1 | |
| 697 | AAH07044 | 2377 | 100 | BC007044 fibrinogen, gamma | Homo sapiens |
| | | | | polypeptide | |
| 697 | AAH21674 | 2377 | 100 | BC021674 fibrinogen, gamma | Homo sapiens |
| | | | | polypeptide | |
| 697 | AF350254_1 | 2377 | 100 | AF350254 fibrinogen gamma chain, | Homo sapiens |
| | | | | isoform gamma-A precursor | |
| 698 | AAH07785 | 2357 | 100 | BC007785 Unknown (protein for | Homo sapiens |
| | | | | IMAGE: 2819608) | |
| 698 | AAH21565 | 2387 | 100 | BC021565 Unknown (protein for | Homo sapiens |
| | | | | MGC: 31904) | |
| 698 | AF121858_1 | 2387 | 100 | AF121858 sorting nexin 8 | Homo sapiens |
| 699 | AAH05929 | 1222 | 100 | BC005929 proteoglycan 2, bone | Homo sapiens |
| | | | | marrow (natural killer cell | |
| | | | | activator, eosinophil granule | |
| | | | | major basic protein) | |
| 699 | X14088 | 1222 | 100 | major basic protein precusor (AA | Homo sapiens |
| | | | | 1-222) | |
| 699 | Y00809 | 1222 | 100 | major basic preproprotein (AA −15 | Homo sapiens |
| | | | | to 207) | |
| 700 | AL050169 | 951 | 100 | hypothetical protein | Homo sapiens |
| 700 | M34046 | 951 | 100 | placental protein 14 precursor | Homo sapiens |
| | | | | (PP14) | |
| 700 | M61886 | 951 | 100 | pregnancy-associated endometrial | Homo sapiens |
| | | | | alpha2-globulin | |
| 701 | AAH15641 | 2224 | 100 | BC015641 enolase 1, (alpha) | Homo sapiens |
| 701 | BC022545 | 2224 | 100 | enolase 1, (alpha) | Homo sapiens |
| 701 | BC027725 | 2224 | 100 | enolase 1, (alpha) | Homo sapiens |
| 702 | AF272142 | 2649 | 100 | cytochrome P450 | Homo sapiens |
| 702 | BC032594 | 2649 | 100 | cytochrome P450, subfamily IIJ | Homo sapiens |
| | | | | (arachidonic acid epoxygenase) | |
| | | | | polypeptide 2 | |
| 702 | U37143 | 2649 | 100 | cytochrome P450 monooxygenase | Homo sapiens |
| | | | | CYP2J2 | |
| 703 | AAH17123 | 1367 | 100 | BC017123 ribosomal protein S3A | Homo sapiens |
| 703 | AAH19072 | 1367 | 100 | BC019072 ribosomal protein S3A | Homo sapiens |
| 703 | BC030161 | 1367 | 100 | ribosomal protein S3A | Homo sapiens |
| 704 | AB042200 | 2004 | 88 | low-density lipoprotein receptor- | Mus musculus |
| | | | | related protein 9 | |
| 704 | AL834518 | 2154 | 99 | hypothetical protein | Homo sapiens |
| 704 | AX359701 | 2268 | 99 | unnamed protein product | Homo sapiens |
| 705 | BC040431 | 5104 | 99 | glucosidase, alpha; acid (Pompe | Homo sapiens |
| | | | | disease, glycogen storage disease | |
| | | | | type II) | |
| 705 | M34424 | 5105 | 100 | acid alpha-glucosidase | Homo sapiens |
| 705 | X55080 | 5105 | 100 | acid alpha-glucosidase | Homo sapiens |
| 706 | AAH10914 | 768 | 100 | BC010914 Similar to hemoglobin, | Homo sapiens |
| | | | | gamma G | |
| 706 | BC029387 | 768 | 100 | hemoglobin, gamma G | Homo sapiens |
| 706 | M91037 | 768 | 100 | G-gamma globin | Homo sapiens |
| 707 | AY148100 | 4568 | 100 | colony stimulating factor 3 | Homo sapiens |
| | | | | receptor (granulocyte) | |
| 707 | M59818 | 4568 | 100 | granulocyte colony-stimulating | Homo sapiens |
| | | | | factor receptor | |
| 707 | X55721 | 4568 | 100 | granulocyte colony stimulating | Homo sapiens |
| | | | | factor receptor 25-1 | |
| 708 | AAH00013 | 1579 | 100 | BC000013 insulin-like growth | Homo sapiens |
| | | | | factor binding protein 3 | |
| 708 | AAH18962 | 1579 | 100 | BC018962 insulin-like growth | Homo sapiens |
| | | | | factor binding protein 3 | |
| 708 | M35878 | 1579 | 100 | growth factor-binding protein-3 | Homo sapiens |
| | | | | precursor | |
| 709 | M23595 | 1413 | 100 | insulin-like growth factor | Homo sapiens |
| | | | | binding protein 1 | |
| 709 | M59316 | 1413 | 100 | insulin-like growth factor | Homo sapiens |
| | | | | binding protein-1 | |
| 709 | X12385 | 1413 | 100 | PP12 precorsor (AA −25 to 234) | Homo sapiens |
| 710 | BC041218 | 676 | 100 | H3 histone, family 3B | Xenopus |
| | | | | | laevis |
| 710 | M11393 | 676 | 100 | histone 3.3 | Gallus |
| | | | | | gallus |
| 710 | Y00392 | 676 | 100 | histone H3.3B (AA 1-136) | Gallus |
| | | | | | gallus |
| 711 | AF523281 | 1916 | 99 | MHC class Ib antigen | Homo sapiens |
| 711 | AF523283 | 1916 | 99 | MHC class Ib antigen | Homo sapiens |
| 711 | M20022 | 1922 | 100 | HLA-E class I protein precursor | Homo sapiens |
| 712 | AAH03569 | 1980 | 100 | BC003569 E74-like factor 3 (ets | Homo sapiens |
| | | | | domain transcription factor, | |
| | | | | epithelial-specific) | |
| 712 | AF017307 | 1980 | 100 | Ets-related transcription factor | Homo sapiens |
| 712 | AF110184_1 | 1980 | 100 | AF110184 epithelium-restricted | Homo sapiens |
| | | | | Ets protein ESX | |
| 713 | AF523305 | 1810 | 100 | MHC class Ib antigen | Homo sapiens |
| 713 | AF523306 | 1810 | 100 | MHC class Ib antigen | Homo sapiens |
| 713 | AF523309 | 1810 | 100 | MHC class Ib antigen | Homo sapiens |
| 714 | AAH09507 | 836 | 99 | BC009507 Unknown (protein for | Homo sapiens |
| | | | | MGC: 3945) | |
| 714 | AY168648 | 836 | 99 | ubiquitin-like protein ISG15 | Homo sapiens |
| 714 | M13755 | 839 | 100 | 17-kDa protein | Homo sapiens |
| 715 | AB033054 | 2549 | 95 | KIAA1228 protein | Homo sapiens |
| 715 | AF099138 | 1351 | 51 | GLUT4 vesicle protein | Rattus |
| | | | | | norvegicus |
| 715 | BC011482 | 1358 | 50 | Similar to membrane bound C2 | Mus musculus |
| | | | | domain containing protein | |
| 716 | AAH10853 | 1129 | 100 | BC010853 Similar to integral type | Homo sapiens |
| | | | | I protein | |
| 716 | AAH17495 | 1129 | 100 | BC017495 integral type I protein | Homo sapiens |
| 716 | BC022232 | 1129 | 100 | integral type I protein | Homo sapiens |
| 717 | AF357203_1 | 1832 | 97 | AF357203 MAP kinase phosphatase-1 | Rattus |
| | | | | | norvegicus |
| 717 | BC022463 | 1886 | 100 | dual specificity phosphatase 1 | Homo sapiens |
| 717 | X68277 | 1886 | 100 | protein-tyrosine phosphatase | Homo sapiens |
| 718 | AAH09407 | 687 | 100 | BC009407 ribosomal protein S17 | Homo sapiens |
| 718 | AAH19899 | 687 | 100 | BC019899 ribosomal protein S17 | Homo sapiens |
| 718 | BC022370 | 687 | 100 | ribosomal protein S17 | Homo sapiens |
| 719 | AAH15105 | 1370 | 100 | BC015105 proteasome (prosome, | Homo sapiens |
| | | | | macropain) subunit, alpha type, 1 | |
| 719 | AAH15356 | 1370 | 100 | BC015356 proteasome (prosome, | Homo sapiens |
| | | | | macropain) subunit, alpha type, 1 | |
| 719 | BC022372 | 1370 | 100 | proteasome (prosome, macropain) | Homo sapiens |
| | | | | subunit, alpha type, 1 | |
| 720 | AAH03352 | 723 | 100 | BC003352 tumor protein, | Homo sapiens |
| | | | | translationally-controlled 1 | |
| 720 | BC022436 | 723 | 100 | Similar to tumor protein, | Homo sapiens |
| | | | | translationally-controlled 1 | |
| 720 | X16064 | 723 | 100 | tumor protein (AA 1-172) | Homo sapiens |
| 721 | BC023006 | 3271 | 100 | Unknown (protein for MGC: 30059) | Homo sapiens |
| 721 | M27024 | 3271 | 100 | heat shock protein | Homo sapiens |
| 721 | X15183 | 3271 | 100 | 90 kDa heat-shock protein (AA 1-732) | Homo sapiens |
| 722 | AAH08064 | 2806 | 100 | BC008064 monoamine oxidase A | Homo sapiens |
| 722 | M68857 | 2806 | 100 | monoamine oxidase A | Homo sapiens |
| 722 | M69226 | 2806 | 100 | monoamine oxidase A | Homo sapiens |
| 723 | M84378 | 1952 | 100 | lymphocyte antigen | Homo sapiens |
| 723 | M84379 | 1945 | 99 | MHC class I lymphocyte antigen | Homo sapiens |
| 723 | Z27120 | 1946 | 99 | HLA-A2 SLU | Homo sapiens |
| 724 | BC032350 | 1338 | 100 | major histocompatibility complex, | Homo sapiens |
| | | | | class II, DR alpha | |
| 724 | M60334 | 1338 | 100 | cell surface glycoprotein | Homo sapiens |
| 724 | Z84814 | 1338 | 100 | dJ172K2.4.1 (major | Homo sapiens |
| | | | | histocompatibility complex, class | |
| | | | | II, DR alpha, isoform 1) | |
| 725 | AAH02476 | 803 | 100 | BC002476 non-metastatic cells 2, | Homo sapiens |
| | | | | protein (NM23B) expressed in | |
| 725 | L16785 | 803 | 100 | c-myc transcription factor | Homo sapiens |
| 725 | X58965 | 803 | 100 | NM23-H2 protein | Homo sapiens |
| 726 | AAH11645 | 1585 | 100 | BC011645 Similar to Ras-related | Homo sapiens |
| | | | | associated with diabetes | |
| 726 | L24564 | 1585 | 100 | Rad | Homo sapiens |
| 726 | U46165 | 1565 | 99 | Rad GTPase | Homo sapiens |
| 727 | AAH03358 | 1151 | 100 | BC003358 ribosomal protein L10 | Homo sapiens |
| 727 | BC026276 | 1151 | 100 | ribosomal protein L10 | Homo sapiens |
| 727 | L44140 | 1151 | 100 | QM | Homo sapiens |
| 728 | A84527 | 2912 | 100 | unnamed protein product | unidentified |
| 728 | AX024042 | 2912 | 100 | fusion between Aequorea victoria | synthetic |
| | | | | and human | construct |
| 728 | M62399 | 2912 | 100 | NF-kappa-B transcription factor | Homo sapiens |
| 729 | AAH10860 | 2071 | 100 | BC010860 serine (or cysteine) | Homo sapiens |
| | | | | proteinase inhibitor, clade E | |
| | | | | (nexin, plasminogen activator | |
| | | | | inhibitor type 1), member 1 | |
| 729 | AF386492_1 | 2071 | 100 | AF386492 serine-cysteine | Homo sapiens |
| | | | | proteinase inhibitor clade E | |
| | | | | member 1 | |
| 729 | X04429 | 2071 | 100 | precursor polypeptide | Homo sapiens |
| 730 | AAH00491 | 1316 | 100 | BC000491 proliferating cell | Homo sapiens |
| | | | | nuclear antigen | |
| 730 | AF347680_1 | 1316 | 100 | AF347680 proliferating cell | Macaca |
| | | | | nuclear antigen | fascicularis |
| 730 | AL121924 | 1316 | 100 | dJ746J20.2 (proliferating cell | Homo sapiens |
| | | | | nuclear antigen) | |
| 731 | AC007165 | 2130 | 100 | interleukin-1 receptor type II | Homo sapiens |
| 731 | AY124010 | 2130 | 100 | interleukin 1 receptor, type II | Homo sapiens |
| 731 | X59770 | 2130 | 100 | type II interleukin-1 receptor | Homo sapiens |
| 732 | BC041071 | 2366 | 100 | protein phosphatase 2 (formerly | Homo sapiens |
| | | | | 2A), regulatory subunit B (PR | |
| | | | | 52), alpha isoform | |
| 732 | M64929 | 2366 | 100 | protein phosphatase-2A subunit- | Homo sapiens |
| | | | | alpha | |
| 732 | U09356 | 2366 | 100 | protein phosphatase 2A1 B alpha | Oryctolagus |
| | | | | subunit | cuniculus |
| 733 | M34421 | 2279 | 99 | pregnancy-specific beta-1 | Homo sapiens |
| | | | | glycoprotein precursor | |
| 733 | M34481 | 2279 | 99 | pregnancy-specific beta-1- | Homo sapiens |
| | | | | glycoprotein 11 | |
| 733 | M58591 | 2291 | 100 | PSG11 | Homo sapiens |
| 734 | BC018254 | 703 | 97 | retinol binding protein 1, | Mus musculus |
| | | | | cellular | |
| 734 | M11433 | 724 | 100 | retinol-binding protein | Homo sapiens |
| 734 | X07437 | 724 | 100 | cellular retinol binding protein | Homo sapiens |
| 735 | J03149 | 4237 | 83 | M-CSF receptor | Felis catus |
| 735 | U63963 | 5158 | 100 | CSF-1 receptor | Homo sapiens |
| 735 | X03663 | 5150 | 99 | put. c-fms precursor | Homo sapiens |
| 736 | BC005580 | 902 | 100 | polymerase (RNA) II (DNA | Mus musculus |
| | | | | directed) polypeptide G | |
| 736 | U52427 | 902 | 100 | RNA polymerase II seventh subunit | Homo sapiens |
| 736 | Z71925 | 902 | 100 | RNA polymerase II RPB7 subunit- | Rattus |
| | | | | like protein | norvegicus |
| 737 | AAH11601 | 658 | 100 | BC011601 interferon, alpha- | Homo sapiens |
| | | | | inducible protein (clone IFI-6- | |
| | | | | 16) | |
| 737 | AAH15603 | 658 | 100 | BC015603 interferon, alpha- | Homo sapiens |
| | | | | inducible protein (clone IFI-6- | |
| | | | | 16) | |
| 737 | D11384 | 652 | 98 | ORF | Pan |
| | | | | | troglodytes |
| 738 | AF147083 | 1683 | 100 | gamma-glutamyl hydrolase | Homo sapiens |
| 738 | BC025025 | 1683 | 100 | gamma-glutamyl hydrolase | Homo sapiens |
| | | | | (conjugase, | |
| | | | | folylpolygammaglutamyl hydrolase) | |
| 738 | U55206 | 1683 | 100 | human gamma-glutamyl hydrolase | Homo sapiens |
| 739 | AAH10418 | 1552 | 100 | BC010418 laminin receptor 1 | Homo sapiens |
| | | | | (67 kD, ribosomal protein SA) | |
| 739 | AAH13827 | 1552 | 100 | BC013827 laminin receptor 1 | Homo sapiens |
| | | | | (67 kD, ribosomal protein SA) | |
| 739 | U43901 | 1552 | 100 | 37 kD laminin receptor | Homo sapiens |
| | | | | precursor/p40 ribosome associated | |
| | | | | protein | |
| 740 | BC026033 | 4101 | 100 | gelsolin (amyloidosis, Finnish | Homo sapiens |
| | | | | type) | |
| 740 | X04412 | 4101 | 100 | plasma gelsolin | Homo sapiens |
| 740 | X13871 | 3849 | 94 | gelsolin | Sus scrofa |
| 741 | AF304463_1 | 2813 | 100 | AF304463 calcium transport | Homo sapiens |
| | | | | protein CaT1 | |
| 741 | AF365927_1 | 2813 | 100 | AF365927 calcium transport | Homo sapiens |
| | | | | protein CaT1 | |
| 741 | AF365928_1 | 2946 | 100 | AF365928 calcium transport | Homo sapiens |
| | | | | protein CaT1 | |
| 742 | AY040542 | 2353 | 100 | sialic acid binding | Homo sapiens |
| | | | | immunoglobulin-like lectin 6 | |
| 742 | D86358 | 2353 | 100 | CD33L1 | Homo sapiens |
| 742 | U71382 | 2246 | 97 | OB binding protein-1 | Homo sapiens |
| 743 | AF286534_1 | 1115 | 100 | AF286534 GTP-binding protein | Rattus |
| | | | | RAB11B | norvegicus |
| 743 | AF498947_1 | 1115 | 100 | AF498947 small GTP binding | Homo sapiens |
| | | | | protein RAB11B | |
| 743 | X79780 | 1110 | 99 | YPT3 | Homo sapiens |
| 744 | BC010604 | 1253 | 99 | ribosomal protein S6 | Mus musculus |
| 744 | BC027620 | 1256 | 100 | ribosomal protein S6 | Homo sapiens |
| 744 | Z54209 | 1253 | 99 | rpS6 | Mus musculus |
| 745 | AJ005654 | 703 | 100 | secondary lymphoid tissue | Homo sapiens |
| | | | | chemokine | |
| 745 | BC027918 | 703 | 100 | small inducible cytokine | Homo sapiens |
| | | | | subfamily A (Cys—Cys), member 21 | |
| 745 | U88320 | 703 | 100 | beta chemokine Exodus-2 | Homo sapiens |
| 746 | AF148856_2 | 6613 | 98 | AF148856 unknown | Homo sapiens |
| 746 | AF149422_2 | 6615 | 98 | AF149422 unknown | Homo sapiens |
| 746 | U93564 | 6714 | 100 | putative p150 | Homo sapiens |
| 747 | AK012013 | 1608 | 100 | unnamed protein product | Mus musculus |
| 747 | BC003742 | 1608 | 100 | 26S proteasome-associated pad1 | Mus musculus |
| | | | | homolog | |
| 747 | U86782 | 1608 | 100 | 26S proteasome-associated pad1 | Homo sapiens |
| | | | | homolog | |
| 748 | AK011431 | 484 | 100 | unnamed protein product | Mus musculus |
| 748 | BC041218 | 676 | 100 | H3 histone, family 3B | Xenopus |
| | | | | | laevis |
| 748 | Y00392 | 676 | 100 | histone H3.3B (AA 1-136) | Gallus |
| | | | | | gallus |
| 749 | AAH11262 | 2716 | 99 | BC011262 Unknown (protein for | Homo sapiens |
| | | | | MGC: 18226) | |
| 749 | AF006043 | 2719 | 100 | 3-phosphoglycerate dehydrogenase | Homo sapiens |
| 749 | AF171237_1 | 2719 | 100 | AF171237 3-phosphoglycerate | Homo sapiens |
| | | | | dehydrogenase | |
| 750 | AF109197_1 | 1254 | 100 | AF109197 nuclear chloride channel | Homo sapiens |
| 750 | AJ012008 | 1251 | 99 | RNCC protein | Homo sapiens |
| 750 | U93205 | 1254 | 100 | nuclear chloride ion channel | Homo sapiens |
| | | | | protein | |
| 751 | BC029402 | 1311 | 100 | proteasome (prosome, macropain) | Homo sapiens |
| | | | | subunit, alpha type, 3 | |
| 751 | BC038990 | 1307 | 99 | Similar to proteasome (prosome, | Homo sapiens |
| | | | | macropain) subunit, alpha type, 3 | |
| 751 | D00762 | 1307 | 99 | proteasome subunit C8 | Homo sapiens |
| 752 | AB062400 | 671 | 100 | Similar to ribosomal protein S15a | Homo sapiens |
| 752 | BC030569 | 671 | 100 | ribosomal protein S15a | Homo sapiens |
| 752 | X77953 | 671 | 100 | ribosomal protein S15a | Rattus |
| | | | | | norvegicus |
| 753 | AB062438 | 1926 | 100 | OK/SW-CL.30 | Homo sapiens |
| 753 | BC025832 | 1581 | 90 | Unknown (protein for MGC: 37936) | Mus musculus |
| 753 | BC036872 | 1912 | 99 | Unknown (protein for | Homo sapiens |
| | | | | IMAGE: 5225889) | |
| 754 | AAH16706 | 2319 | 100 | BC016706 eukaryotic translation | Homo sapiens |
| | | | | initiation factor 3, subunit 6 | |
| | | | | (48 kD) | |
| 754 | AAH21679 | 2319 | 100 | BC021679 eukaryotic translation | Homo sapiens |
| | | | | initiation factor 3, subunit 6 | |
| | | | | (48 kD) | |
| 754 | BC029177 | 2319 | 100 | eukaryotic translation initiation | Mus musculus |
| | | | | factor 3, subunit 6 (48 kD) | |
| 755 | AAH04138 | 1465 | 99 | BC004138 ribosomal protein L6 | Homo sapiens |
| 755 | BC031009 | 1475 | 100 | ribosomal protein L6 | Homo sapiens |
| 755 | BC032299 | 1465 | 99 | ribosomal protein L6 | Homo sapiens |
| 756 | AAH15813 | 2331 | 100 | BC015813 eukaryotic translation | Homo sapiens |
| | | | | elongation factor 1 gamma | |
| 756 | BC028179 | 2331 | 100 | eukaryotic translation elongation | Homo sapiens |
| | | | | factor 1 gamma | |
| 756 | BC031012 | 2331 | 100 | eukaryotic translation elongation | Homo sapiens |
| | | | | factor 1 gamma | |
| 757 | AAH04927 | 1051 | 100 | BC004927 Unknown (protein for | Homo sapiens |
| | | | | MGC: 10432) | |
| 757 | AF013711 | 1051 | 100 | 22 kDa actin-binding protein | Homo sapiens |
| 757 | D84342 | 1051 | 100 | SM22 alpha | Homo sapiens |
| 758 | AB007510 | 12543 | 100 | PRP8 protein | Homo sapiens |
| 758 | AB047391 | 12461 | 99 | pre-mRNA processing 8 protein | Mus musculus |
| 758 | AF092565 | 12477 | 99 | splicing factor Prp8 | Homo sapiens |
| 759 | AAH10034 | 3127 | 100 | BC010034 thyroid autoantigen 70 kD | Homo sapiens |
| | | | | (Ku antigen) | |
| 759 | AAH12154 | 3127 | 100 | BC012154 Similar to thyroid | Homo sapiens |
| | | | | autoantigen 70 kD (Ku antigen) | |
| 759 | AAH18259 | 3127 | 100 | BC018259 thyroid autoantigen 70 kD | Homo sapiens |
| | | | | (Ku antigen) | |
| 760 | AL050369 | 2492 | 99 | hypothetical protein | Homo sapiens |
| 760 | AY040822 | 2500 | 100 | U4/U6 snRNP-associated 61 kDa | Homo sapiens |
| | | | | protein | |
| 760 | BC018376 | 2479 | 98 | Unknown (protein for MGC: 19247) | Mus musculus |
| 761 | AF343440_1 | 454 | 98 | AF343440 lysosomal H+ | Canis |
| | | | | transporting-ATPase subunit M9.2 | familiaris |
| 761 | AX400012 | 459 | 100 | unnamed protein product | Homo sapiens |
| 761 | Y15286 | 459 | 100 | vacuolar proton-ATPase subunit | Homo sapiens |
| | | | | M9.2 | |
| 762 | AAH01273 | 1831 | 99 | BC001273 galactose-4-epimerase, | Homo sapiens |
| | | | | UDP- | |
| 762 | AF022382 | 1835 | 100 | UDP-galactose 4′ epimerase | Homo sapiens |
| 762 | L41668 | 1835 | 100 | UDP-galactose-4-epimerase | Homo sapiens |
| 763 | AAH05270 | 900 | 99 | BC005270 NADH dehydrogenase | Homo sapiens |
| | | | | (ubiquinone) Fe-S protein 4 | |
| | | | | (18 kD) (NADH-coenzyme Q | |
| | | | | reductase) | |
| 763 | AF020351 | 904 | 100 | NADH: ubiquinone oxidoreductase 18 kDa | Homo sapiens |
| | | | | IP subunit | |
| 763 | X63215 | 839 | 90 | NADH dehydrogenase | Bos taurus |
| 764 | AAH04963 | 674 | 100 | BC004963 ATP synthase, H+ | Homo sapiens |
| | | | | transporting, mitochondrial F0 | |
| | | | | complex, subunit c (subunit 9), | |
| | | | | isoform 1 | |
| 764 | AL080089 | 674 | 100 | hypothetical protein | Homo sapiens |
| 764 | X69907 | 674 | 100 | P1 gene for c subunit of human | Homo sapiens |
| | | | | mitochondrial ATP synthase | |
| 765 | AF100620_1 | 1492 | 100 | AF100620 transcription factor- | Homo sapiens |
| | | | | like protein MRGX | |
| 765 | AF167174_1 | 1492 | 100 | AF167174 MSL3-2 protein | Homo sapiens |
| 765 | AL049610 | 1492 | 100 | dJ1055C14.2 (KIAA0026 | Homo sapiens |
| | | | | (transcription factor-like | |
| | | | | protein MRGX)) | |
| 766 | AAH15557 | 1854 | 99 | BC015557 Unknown (protein for | Homo sapiens |
| | | | | MGC: 1567) | |
| 766 | BC021637 | 1140 | 66 | CD68 antigen | Mus musculus |
| 766 | S57235 | 1858 | 100 | CD68 | Homo sapiens |
| 767 | L27631 | 4010 | 100 | amyloid precursor-like protein 2 | Homo sapiens |
| 767 | S60099 | 4010 | 100 | APPH | Homo sapiens |
| 767 | Z22572 | 4010 | 100 | CDEI binding protein | Homo sapiens |
| 768 | AAH08850 | 1273 | 99 | BC008850 Unknown (protein for | Homo sapiens |
| | | | | MGC: 14308) | |
| 768 | AAH09599 | 1273 | 99 | BC009599 Unknown (protein for | Homo sapiens |
| | | | | MGC: 14690) | |
| 768 | L16558 | 1276 | 100 | ribosomal protein L7 | Homo sapiens |
| 769 | AF062482 | 845 | 99 | SDP3 | Mus musculus |
| 769 | AF062483 | 852 | 100 | SDP3 | Homo sapiens |
| 769 | AF520420 | 838 | 98 | sorting nexin 3 | Mus musculus |
| 770 | AF063657 | 6995 | 100 | vascular endothelial growth | Homo sapiens |
| | | | | factor receptor | |
| 770 | D28498 | 5882 | 82 | Fit-1 tyrosine kinase receptor | Rattus |
| | | | | | norvegicus |
| 770 | X51602 | 6989 | 99 | flt gene product (AA 1-1338) | Homo sapiens |
| 771 | AF081112 | 239 | 34 | ORF2 | Mus musculus |
| | | | | | domesticus |
| 771 | U83119 | 244 | 34 | ORF2 consensus sequence encoding | Rattus |
| | | | | endonuclease and reverse | norvegicus |
| | | | | transcriptase minus RNaseH | |
| 771 | U93572 | 336 | 42 | putative p150 | Homo sapiens |
| 772 | AF029729 | 3066 | 100 | neuralized | Homo sapiens |
| 772 | BC026336 | 3041 | 99 | neuralized-like (Drosophila) | Homo sapiens |
| 772 | U87864 | 3066 | 100 | neuralized homolog | Homo sapiens |
| 773 | AAH20782 | 643 | 100 | BC020782 glycoprotein hormones, | Homo sapiens |
| | | | | alpha polypeptide | |
| 773 | J00152 | 643 | 100 | glycoprotein alpha subunit | Homo sapiens |
| 773 | V00518 | 643 | 100 | chorionic gonadotropin | Homo sapiens |
| 774 | AAH02722 | 2070 | 100 | BC002722 guanine nucleotide | Homo sapiens |
| | | | | binding protein (G protein), | |
| | | | | alpha stimulating activity | |
| | | | | polypeptide 1 | |
| 774 | AF493897_1 | 2070 | 100 | AF493897 guanine nucleotide | Homo sapiens |
| | | | | binding protein alpha s long | |
| 774 | X04408 | 2070 | 100 | alpha-S2 (aa 1-394) | Homo sapiens |
| 775 | BC033714 | 1724 | 100 | heterogeneous nuclear | Homo sapiens |
| | | | | ribonucleoprotein A1 | |
| 775 | D86729 | 1724 | 100 | TIS | Mus musculus |
| 775 | M99167 | 1724 | 100 | RNA binding protein | Mus musculus |
| 776 | AF072836 | 1827 | 100 | Sox-like transcriptional factor | Homo sapiens |
| 776 | AF146223_1 | 620 | 100 | AF146223 HMG domain protein HMGX2 | Homo sapiens |
| 776 | AF288679 | 620 | 100 | smarcel-related protein | Homo sapiens |
| 777 | AAH21979 | 1360 | 100 | BC021979 ribosomal protein L7a | Homo sapiens |
| 777 | BC032533 | 1360 | 100 | ribosomal protein L7a | Homo sapiens |
| 777 | X15013 | 1360 | 100 | ribosomal protein L7a (AA 1-266) | Rattus |
| | | | | | Rattus |
| 778 | X51538 | 693 | 100 | ribosomal protein S24 (AA 1-133) | Rattus |
| | | | | | Rattus |
| 778 | X52445 | 693 | 100 | ribosomal protein S24 | Rattus |
| | | | | | norvegicus |
| 778 | X52658 | 693 | 100 | ribosomal protein S19 (AA 1-133) | Mesocricetus |
| | | | | | auratus |
| 779 | AAH01503 | 2789 | 100 | BC001503 prosaposin (variant | Homo sapiens |
| | | | | Gaucher disease and variant | |
| | | | | metachromatic leukodystrophy) | |
| 779 | AAH04275 | 2789 | 100 | BC004275 prosaposin (variant | Homo sapiens |
| | | | | Gaucher disease and variant | |
| | | | | metachromatic leukodystrophy) | |
| 779 | AAH07612 | 2789 | 100 | BC007612 prosaposin (variant | Homo sapiens |
| | | | | Gaucher disease and variant | |
| | | | | metachromatic leukodystrophy) | |
| 780 | AAH11776 | 1369 | 100 | BC011776 Similar to tropomyosin 2 | Homo sapiens |
| | | | | (beta) | |
| 780 | M74817 | 1369 | 100 | tropomyosin-1 | Homo sapiens |
| 780 | M75165 | 1369 | 100 | tropomyosin | Homo sapiens |
| 781 | AL023883 | 1173 | 99 | dJ404K8.1 (prolactin) | Homo sapiens |
| 781 | BC015850 | 1185 | 100 | similar to prolactin precursor | Homo sapiens |
| 781 | V00566 | 1185 | 100 | reading frame prolactin | Homo sapiens |
| 782 | AK012601 | 247 | 64 | unnamed protein product | Mus musculus |
| 782 | AK021409 | 286 | 69 | unnamed protein product | Mus musculus |
| 782 | AK075801 | 246 | 64 | unnamed protein product | Mus musculus |
| 783 | AF300943_1 | 9468 | 94 | AF300943 tyrosine phosphatase LAR | Mus musculus |
| 783 | L11586 | 9484 | 95 | leukocyte common antigen-related | Rattus |
| | | | | phosphatase | norvegicus |
| 783 | Y00815 | 9953 | 100 | put. LAR preprotein (AA −16 to | Homo sapiens |
| | | | | 1881) | |
| 784 | AAH16046 | 2739 | 100 | BC016046 ATP synthase, H+ | Homo sapiens |
| | | | | transporting, mitochondrial F1 | |
| | | | | complex, alpha subunit, isoform | |
| | | | | 1, cardiac muscle | |
| 784 | AAH19310 | 2739 | 100 | BC019310 ATP synthase, H+ | Homo sapiens |
| | | | | transporting, mitochondrial F1 | |
| | | | | complex, alpha subunit, isoform | |
| | | | | 1, cardiac muscle | |
| 784 | X65460 | 2739 | 100 | ATP synthase alpha subunit | Homo sapiens |
| 785 | AF237581_1 | 613 | 100 | AF237581 migration inhibitory | Homo sapiens |
| | | | | factor-related protein 14 variant P | |
| 785 | M26311 | 613 | 100 | cystic fibrosis antigen | Homo sapiens |
| 785 | X06233 | 613 | 100 | MRP-14 (AA 1-114) | Homo sapiens |
| 786 | AAH15492 | 523 | 96 | BC015492 Unknown (protein for | Homo sapiens |
| | | | | MGC: 8967) | |
| 786 | BC032626 | 280 | 64 | TLH29 protein precursor | Homo sapiens |
| 786 | X67325 | 556 | 100 | ISG12 | Homo sapiens |
| 787 | L00160 | 2135 | 100 | phosphoglycerate kinase | Homo sapiens |
| 787 | M11968 | 2135 | 100 | phosphoglycerate kinase | Homo sapiens |
| 787 | V00572 | 2135 | 100 | coding sequence | Homo sapiens |
| 788 | AF075575 | 11112 | 100 | dysferlin | Homo sapiens |
| 788 | AF188290_1 | 10355 | 93 | AF188290 dysferlin | Mus musculus |
| 788 | AK074104 | 7939 | 98 | FLJ00175 protein | Homo sapiens |
| 789 | AB052229 | 10414 | 100 | RNA polymerase II largest subunit | Cricetulus |
| 789 | D87294 | 10414 | 100 | RNA polymerase II largest subunit | Cricetulus |
| | | | | | griseus |
| 789 | X63564 | 10414 | 100 | RNA polymerase II largest subunit | Homo sapiens |
| 790 | AF070650 | 844 | 100 | F1FO-type ATP synthase subunit d | Homo sapiens |
| 790 | AF087135 | 844 | 100 | F1FO-type ATPase subunit d | Homo sapiens |
| 790 | BC038092 | 844 | 100 | ATP synthase, H+ transporting, | Homo sapiens |
| | | | | mitochondrial F0 complex, subunit d | |
| 791 | U01153 | 4046 | 97 | GRP94 | Canis |
| | | | | | familiaris |
| 791 | X15187 | 4112 | 100 | precursor polypeptide (AA −21 to | Homo sapiens |
| | | | | 782) | |
| 791 | Y09136 | 4038 | 97 | gp96/GRP94 | Sus scrofa |
| 792 | AF297036_1 | 670 | 100 | AF297036 ubiquitin fusion protein | Ophiophagus |
| | | | | | hannah |
| 792 | BC014772 | 670 | 100 | ubiquitin A-52 residue ribosomal | Mus musculus |
| | | | | protein fusion product 1 | |
| 792 | M24508 | 670 | 100 | ubiquitin | synthetic |
| | | | | | construct |
| 793 | AB047600 | 167 | 67 | hypothetical protein | Macaca |
| | | | | | fascicularis |
| 793 | AK097085 | 208 | 48 | unnamed protein product | Homo sapiens |
| 793 | X92485 | 165 | 68 | pval | Plasmodium |
| | | | | | vivax |
| 794 | AF100956 | 782 | 100 | ribosomal protein subunit S18 | Mus musculus |
| 794 | AF110520 | 782 | 100 | RPS18 | Mus musculus |
| 794 | M76763 | 782 | 100 | ribosomal protein | Mus musculus |
| 795 | BC025077 | 930 | 100 | RIKEN cDNA 2010203J19 gene | Mus musculus |
| 795 | L05092 | 930 | 100 | ribosomal protein L11 | Homo sapiens |
| 795 | X62146 | 930 | 100 | ribosomal protein L11 | Rattus |
| | | | | | Rattus |
| 796 | AB037890 | 6795 | 99 | pre-mRNA splicing factor SF3b 155 kDa | Mus musculus |
| | | | | subunit | |
| 796 | AF054284 | 6808 | 100 | spliceosomal protein SAP 155 | Homo sapiens |
| 796 | Y08997 | 6566 | 96 | 146 kDa nuclear protein | Xenopus |
| | | | | | laevis |
| 797 | AF072097 | 624 | 100 | beta-2 microglobulin | Homo sapiens |
| 797 | AY007153 | 624 | 100 | similar to Homo sapiens mRNA for | |
| | | | | beta 2-microglobulin with GenBank | |
| | | | | Accession Number AB021288 | |
| 797 | BC032589 | 624 | 100 | beta 2-microglobulin | Homo sapiens |
| 798 | AAH17839 | 1602 | 100 | BC017839 caspase 4, apoptosis- | Homo sapiens |
| | | | | related cysteine protease | |
| 798 | U28976 | 1602 | 100 | Mih1/TX isoform alpha | Homo sapiens |
| 798 | U28977 | 1769 | 100 | Mih1/TX isoform beta | Homo sapiens |
| 799 | AAH07967 | 974 | 100 | BC007967 Unknown (protein for | Homo sapiens |
| | | | | MGC: 14460) | |
| 799 | AAH12149 | 974 | 100 | BC012149 Unknown (protein for | Homo sapiens |
| | | | | MGC: 20365) | |
| 799 | BC031906 | 974 | 100 | similar to ribosomal protein L9; | Homo sapiens |
| | | | | 60S ribosomal protein L9 | |
| 800 | BC002145 | 745 | 100 | ribosomal protein S23 | Mus musculus |
| 800 | D14530 | 745 | 100 | ribosomal protein | Homo sapiens |
| 800 | X77398 | 745 | 100 | ribosomal protein S23 | Rattus |
| | | | | | norvegicus |
| 801 | AF227256_1 | 405 | 100 | AF227256 NEDD8 | Bos taurus |
| 801 | BC004625 | 398 | 98 | neural precursor cell expressed, | Mus musculus |
| | | | | developmentally down-regulated | |
| | | | | gene 8 | |
| 801 | D23662 | 405 | 100 | ubiquitin-like protein | Homo sapiens |
| 802 | U46034 | 2076 | 83 | stromelysin 3 | Rattus |
| | | | | | norvegicus |
| 802 | X57766 | 2679 | 100 | stromelysin-3 precursor | Homo sapiens |
| 802 | Z12604 | 2164 | 81 | stromelysin-3 | Mus musculus |
| 803 | AAH01734 | 499 | 100 | BC001734 protein translocation | Homo sapiens |
| | | | | complex beta | |
| 803 | AL137067 | 499 | 100 | bA13B9.2 (novel protein similar | Homo sapiens |
| | | | | to the beta subunit of transport | |
| | | | | protein SEC61) | |
| 803 | L25085 | 499 | 100 | Sec61-complex beta-subunit | Homo sapiens |
| 804 | AF165522_1 | 360 | 100 | AF165522 ras-related GTP-binding | Homo sapiens |
| | | | | protein 4b | |
| 804 | AF217985_1 | 360 | 100 | AF217985 unknown | Homo sapiens |
| 804 | AF498935_1 | 360 | 100 | AF498935 small GTP binding | Homo sapiens |
| | | | | protein RAB4B | |
| 805 | AF006602 | 5436 | 94 | histone deacetylase mHDA1 | Mus musculus |
| 805 | AF132608_1 | 5784 | 100 | AF132608 histone deacetylase 5 | Homo sapiens |
| 805 | AF207748_1 | 5431 | 94 | AF207748 histone deacetylase 5 | Mus musculus |
| 806 | AL050259 | 4009 | 100 | hypothetical protein | Homo sapiens |
| 806 | BC032681 | 4009 | 100 | RAB2, member RAS oncogene family- | Homo sapiens |
| | | | | like | |
| 806 | Z97184 | 4009 | 100 | cICF0811.4.1 (RAB2, member RAS | Homo sapiens |
| | | | | oncogene family-like, isoform 1) | |
| 807 | AF151855_1 | 1278 | 100 | AF151855 CGI-97 protein | Homo sapiens |
| 807 | AK001779 | 1214 | 96 | unnamed protein product | Homo sapiens |
| 807 | BC003849 | 1200 | 94 | RIKEN cDNA 4733401P19 gene | Mus musculus |
| 808 | AAH00234 | 1377 | 100 | BC000234 nicotinamide N- | Homo sapiens |
| | | | | methyltransferase | |
| 808 | U08021 | 1377 | 100 | nicotinamide N-methyltransferase | Homo sapiens |
| 808 | U20971 | 1377 | 100 | nicotinamide N-methyltransferase | Homo sapiens |
| 809 | AAH03137 | 1240 | 100 | BC003137 ribosomal protein S3 | Homo sapiens |
| 809 | BC034149 | 1240 | 100 | ribosomal protein S3 | Homo sapiens |
| 809 | U14992 | 1240 | 100 | ribosomal protein S3 | Homo sapiens |
| 810 | AF090891_1 | 3913 | 99 | AF090891 PRO0105 | Homo sapiens |
| 810 | AF268075_1 | 3913 | 99 | AF268075 TRAF6-binding protein | Homo sapiens |
| | | | | T6BP | |
| 810 | U33821 | 3924 | 100 | tax1-binding protein TXBP151 | Homo sapiens |
| 811 | AF186112_1 | 619 | 100 | AF186112 neurokinin B-like | Homo sapiens |
| | | | | protein ZNEUROK1 | |
| 811 | AF216586_1 | 619 | 100 | AF216586 neurokinin B | Homo sapiens |
| 811 | BC032145 | 619 | 100 | tachykinin 3 (neuromedin K, | Homo sapiens |
| | | | | neurokinin beta) | |
| 812 | AAH08405 | 2044 | 90 | BC008405 Unknown (protein for | Homo sapiens |
| | | | | MGC: 14528) | |
| 812 | M94891 | 2042 | 90 | pregnancy-specific beta-1 | Homo sapiens |
| | | | | glycoprotein | |
| 812 | U18467 | 2252 | 100 | pregnancy-specific beta 1- | Homo sapiens |
| | | | | glycoprotein 7 precursor | |
| 813 | AK002989 | 980 | 93 | unnamed protein product | Mus musculus |
| 813 | D38076 | 1041 | 99 | Ran-BP1 (Ran-binding protein 1) | Homo sapiens |
| 813 | X83617 | 1057 | 100 | RanBP1 | Homo sapiens |
| 814 | AF152604 | 3398 | 100 | bromodomain-containing protein | Homo sapiens |
| 814 | AF213969 | 3369 | 99 | bromodomain protein CELTIX1 | Homo sapiens |
| 814 | AJ271881 | 3398 | 100 | bromodomain containing protein | Homo sapiens |
| 815 | AK000496 | 327 | 65 | unnamed protein product | Homo sapiens |
| 815 | AK090511 | 328 | 65 | unnamed protein product | Homo sapiens |
| 815 | AX399963 | 319 | 62 | unnamed protein product | Homo sapiens |
| 816 | AK000917 | 2276 | 100 | unnamed protein product | Homo sapiens |
| 816 | BC025560 | 2156 | 94 | Similar to hypothetical protein | Mus musculus |
| | | | | FLJ10055 | |
| 816 | BC039867 | 2259 | 99 | hypothetical protein FLJ10055 | Homo sapiens |
| 817 | AB039886 | 1071 | 100 | down-regulated in gastric cancer | Homo sapiens |
| 817 | AY139182 | 995 | 100 | 18 kDa antrum mucosa protein | Homo sapiens |
| 817 | AY139184 | 995 | 100 | 18 kDa antrum mucosa protein | Homo sapiens |
| 818 | BC033721 | 3540 | 99 | Unknown (protein for MGC: 45264) | Homo sapiens |
| 818 | X82157 | 3543 | 100 | hevin | Homo sapiens |
| 818 | X86693 | 3504 | 99 | Hevin-like protein | Homo sapiens |
| 819 | M84472 | 1675 | 100 | 17-beta-hydroxysteroid | Homo sapiens |
| | | | | dehydrogenase | |
| 819 | U34879 | 1675 | 100 | 17-beta-hydroxysteroid | Homo sapiens |
| | | | | dehydrogenase | |
| 819 | X13440 | 1675 | 100 | 17-HSD protein (AA 1-328) | Homo sapiens |
| 820 | AAH12612 | 1812 | 99 | BC012612 Similar to cathepsin L | Homo sapiens |
| 820 | M20496 | 1816 | 100 | preprocathepsin L precursor | Homo sapiens |
| 820 | X12451 | 1816 | 100 | pro-(cathepsin L) | Homo sapiens |
| 821 | AAH12355 | 3449 | 100 | BC012355 Similar to solute | Homo sapiens |
| | | | | carrier family 6 | |
| | | | | (neurotransmitter transporter, | |
| | | | | creatine), member 8 | |
| 821 | U36341 | 3449 | 100 | creatine transporter | Homo sapiens |
| 821 | Z66539 | 3449 | 100 | creatine transporter | Homo sapiens |
| 822 | AF267852_1 | 749 | 100 | AF267852 placental protein 13- | Homo sapiens |
| | | | | like protein | |
| 822 | AF367430 | 571 | 100 | placental protein 13-like | Homo sapiens |
| 822 | BC022257 | 731 | 98 | Similar to placental protein 13- | Homo sapiens |
| | | | | like protein | |
| 823 | AB001636 | 4072 | 99 | ATP-dependent RNA helicase #46 | Homo sapiens |
| 823 | AF279891_1 | 4162 | 100 | AF279891 dead box protein 15 | Homo sapiens |
| 823 | BC035974 | 4162 | 100 | DEAD/H (Asp-Glu-Ala-Asp/His) box | Homo sapiens |
| | | | | polypeptide 15 | |
| 824 | AAH17321 | 687 | 100 | BC017321 Unknown (protein for | Homo sapiens |
| | | | | MGC: 29768) | |
| 824 | BC002079 | 687 | 100 | Similar to ribosomal protein S12 | Mus musculus |
| 824 | BC018362 | 687 | 100 | Unknown (protein for MGC: 19264) | Mus musculus |
| 825 | AAH20619 | 1123 | 99 | BC020619 glutathione S- | Homo sapiens |
| | | | | transferase A3 | |
| 825 | AF508266_1 | 1127 | 100 | AF508266 glutathione transferase | Homo sapiens |
| | | | | A3-3 | |
| 825 | AL121969 | 1127 | 100 | dJ214M20.1 (glutathione S- | Homo sapiens |
| | | | | transferase A3) | |
| 826 | AAH00359 | 923 | 100 | BC000359 signal peptidase complex | Homo sapiens |
| | | | | (18 kD) | |
| 826 | AAH14508 | 923 | 100 | BC014508 Similar to signal | Homo sapiens |
| | | | | peptidase complex (18 kD) | |
| 826 | AF061737 | 923 | 100 | microsomal signal peptidase | Homo sapiens |
| 827 | AF179890_1 | 598 | 100 | AF179890 DNA polymerase delta | Homo sapiens |
| | | | | smallest subunit p12 | |
| 827 | AF515709_1 | 492 | 83 | AF515709 small subunit DNA | Mus musculus |
| | | | | polymerase delta p12 | |
| 827 | BC028520 | 492 | 83 | Unknown (protein for MGC: 41275) | Mus musculus |
| 828 | AC005067_2 | 1340 | 73 | AC005067 Supported by Human EST | Homo sapiens |
| | | | | H08032.1 (NID: g872854), mouse EST | |
| | | | | AA870042.1 (NID: g2965487), and | |
| | | | | genscan | |
| 828 | AF226732_1 | 2286 | 100 | AF226732 NPD007 | Homo sapiens |
| 828 | BC018360 | 1199 | 68 | Unknown (protein for MGC: 18730) | Mus musculus |
| 829 | AAH19040 | 897 | 100 | BC019040 Unknown (protein for | Homo sapiens |
| | | | | MGC: 20769) | |
| 829 | D11428 | 826 | 100 | PMP-22(PAS-II/SR13/Gas-3) | Homo sapiens |
| 829 | L03203 | 826 | 100 | peripheral myelin protein 22 | Homo sapiens |
| 830 | AK023767 | 960 | 100 | unnamed protein product | Homo sapiens |
| 830 | AL080169 | 979 | 100 | hypothetical protein | Homo sapiens |
| 830 | BC016647 | 960 | 100 | Unknown (protein for MGC: 16844) | Homo sapiens |
| 831 | AF309646_1 | 1144 | 88 | AF309646 Rab6-like protein WTH3 | Homo sapiens |
| 831 | AF498941_1 | 1058 | 100 | AF498941 small GTP binding | Homo sapiens |
| | | | | protein RAB6C | |
| 831 | AL136727 | 1144 | 88 | hypothetical protein | Homo sapiens |
| 832 | AC005095_1 | 1373 | 100 | AC005095 pantophysin | Homo sapiens |
| 832 | S72481 | 1373 | 100 | pantophysin | Homo sapiens |
| 832 | X68194 | 1373 | 100 | h-Sp1 | Homo sapiens |
| 833 | D14665 | 3850 | 99 | KIAA0021 protein | Homo sapiens |
| 833 | U41765 | 3814 | 83 | metalloprotease/disintegrin/cysteine | Mus musculus |
| | | | | rich protein precursor | |
| 833 | U41766 | 4476 | 100 | metalloprotease/disintegrin/cysteine- | Homo sapiens |
| | | | | rich protein precursor | |
| 834 | U20770 | 1412 | 100 | cell surface glycoprotein | Homo sapiens |
| 834 | U67274 | 1412 | 100 | metastasis suppressor | Homo sapiens |
| 834 | X53795 | 1412 | 100 | inducible membrane protein | Homo sapiens |
| 835 | AF517934_1 | 2980 | 100 | AF517934 interleukin 2 receptor, | Homo sapiens |
| | | | | beta | |
| 835 | AL022314 | 2980 | 100 | dJ1170K4.3 (Interleukin 2 | Homo sapiens |
| | | | | Receptor, Beta (IL-2 Receptor, | |
| | | | | CD122 antigen)) | |
| 835 | BC025691 | 2980 | 100 | interleukin 2 receptor, beta | Homo sapiens |
| 836 | AF072242 | 2167 | 100 | methyl-CpG binding protein MBD2 | Homo sapiens |
| 836 | AF120994 | 2167 | 100 | methyl-CpG binding protein 2 | Homo sapiens |
| 836 | BC032638 | 2167 | 100 | methyl-CpG binding domain protein 2 | Homo sapiens |
| 837 | AAH00486 | 607 | 100 | BC000486 small nuclear | Homo sapiens |
| | | | | ribonucleoprotein D2 polypeptide | |
| | | | | (16.5 kD) | |
| 837 | AAH01930 | 607 | 100 | BC001930 small nuclear | Homo sapiens |
| | | | | ribonucleoprotein D2 polypeptide | |
| | | | | (16.5 kD) | |
| 837 | AC007191_1 | 607 | 100 | AC007191 SMD2_HUMAN; SNRNP CORE | Homo sapiens |
| | | | | PROTEIN D2; SM-D2 | |
| 838 | AAH18180 | 870 | 100 | BC018180 CGI-121 protein | Homo sapiens |
| 838 | AF151879_1 | 870 | 100 | AF151879 CGI-121 protein | Homo sapiens |
| 838 | BC029492 | 870 | 100 | CGI-121 protein | Homo sapiens |
| 839 | U52373 | 4063 | 99 | MNB | Homo sapiens |
| 839 | U58497 | 4037 | 99 | mp86 | Mus musculus |
| 839 | X79769 | 4052 | 99 | Dual Specificity Yak1-related | Rattus |
| | | | | Kinase (Dyrk) | norvegicus |
| 853 | AF090949 | 1710 | 97 | HBV-X associated protein 2 | Cercopithecus |
| | | | | | aethiops |
| 853 | U31913 | 1736 | 99 | HBV-X associated protein | Homo sapiens |
| 853 | U78521 | 1740 | 100 | immunophilin homolog ARA9 | Homo sapiens |
| 854 | AAH12333 | 1168 | 100 | BC012333 Unknown (protein for | Homo sapiens |
| | | | | MGC: 2084) | |
| 854 | AF187981_1 | 1168 | 100 | AF187981 delta7-sterol-C5- | Homo sapiens |
| | | | | desaturase | |
| 854 | D85181 | 1273 | 100 | fungal sterol-C5-desaturase | Homo sapiens |
| | | | | homolog | |
| 856 | A84511 | 1017 | 99 | unnamed protein product | unidentified |
| 856 | AF498970_1 | 1016 | 100 | AF498970 small GTP binding | Homo sapiens |
| | | | | protein RhoA | |
| 856 | AX427410 | 1017 | 99 | unnamed protein product | unidentified |
| 857 | AAH04312 | 563 | 94 | BC004312 insulin-like growth | Homo sapiens |
| | | | | factor binding protein 2 (36 kD) | |
| 857 | AAH09902 | 563 | 94 | BC009902 Unknown (protein for | Homo sapiens |
| | | | | MGC: 2339) | |
| 857 | AAH12769 | 563 | 94 | BC012769 Unknown (protein for | Homo sapiens |
| | | | | MGC: 16256) | |
| 858 | AAH02434 | 430 | 100 | BC002434 p8 protein (candidate of | Homo sapiens |
| | | | | metastasis 1) | |
| 858 | AF069074 | 430 | 100 | P8 protein | Homo sapiens |
| 858 | AF135266_1 | 430 | 100 | AF135266 p8 protein homolog | Homo sapiens |
| 859 | AB047892 | 301 | 84 | hypothetical protein | Macaca |
| | | | | | fascicularis |
| 860 | AAH01199 | 833 | 99 | BC001199 Similar to glucose | Homo sapiens |
| | | | | regulated protein, 58 kDa | |
| 860 | AJ440721 | 833 | 99 | thioredoxin related protein | Homo sapiens |
| 860 | AL834423 | 833 | 99 | hypothetical protein | Homo sapiens |
| 861 | AAH00866 | 1124 | 100 | BC000866 tissue inhibitor of | Homo sapiens |
| | | | | metalloproteinase 1 (erythroid | |
| | | | | potentiating activity, | |
| | | | | collagenase inhibitor) | |
| 861 | M59906 | 1124 | 100 | collagenase inhibitor | Homo sapiens |
| 861 | X03124 | 1124 | 100 | precursor | Homo sapiens |
| 862 | AAH00518 | 1120 | 98 | BC000518 Similar to brain acid- | Homo sapiens |
| | | | | soluble protein 1 | |
| 862 | AF039656 | 1105 | 96 | neuronal tissue-enriched acidic | Homo sapiens |
| | | | | protein | |
| 862 | U92535 | 818 | 75 | neuronal axonal membrane protein | Bos taurus |
| 863 | AAH05931 | 733 | 100 | BC005931 hemoglobin, alpha 2 | Homo sapiens |
| 863 | AAH08572 | 733 | 100 | BC008572 hemoglobin, alpha 2 | Homo sapiens |
| 863 | BC032122 | 733 | 100 | hemoglobin, alpha 2 | Homo sapiens |
| 864 | AF347006 | 2436 | 91 | cytochrome c oxidase subunit I | Homo sapiens |
| 864 | AF382012 | 2424 | 92 | cytochrome c oxidase subunit I | Homo sapiens |
| 864 | AF382013 | 2424 | 92 | cytochrome c oxidase subunit I | Homo sapiens |
| 865 | AF242729_1 | 1242 | 100 | AF242729 HT022 | Homo sapiens |
| 865 | AJ245874 | 1242 | 100 | putative ATG/GTP binding protein | Homo sapiens |
| 865 | AJ250344 | 1242 | 100 | hypothetical protein | Homo sapiens |
| 866 | AAH17050 | 1367 | 100 | BC017050 2,3-bisphosphoglycerate | Homo sapiens |
| | | | | mutase | |
| 866 | M23068 | 1367 | 100 | 2,3-bisphosphoglycerate | Homo sapiens |
| 866 | X04327 | 1367 | 100 | 2,3 biphosphoglycerated mutase | Homo sapiens |
| | | | | (AA 1-259) | |
| 867 | AAH02334 | 921 | 100 | BC002334 DAZ associated protein 2 | Homo sapiens |
| 867 | AAH07900 | 921 | 100 | BC007900 DAZ associated protein 2 | Homo sapiens |
| 867 | D31767 | 921 | 100 | KIAA0058 | Homo sapiens |
| 868 | AAH09571 | 308 | 98 | BC009571 Similar to stimulated by | Homo sapiens |
| | | | | retinoic acid 13 | |
| 868 | U95006 | 309 | 98 | D9 splice variant A | Homo sapiens |
| 868 | U95007 | 273 | 98 | D9 splice variant B | Homo sapiens |
| 869 | AAH11674 | 753 | 92 | BC011674 Similar to procollagen- | Homo sapiens |
| | | | | lysine, 2-oxoglutarate 5- | |
| | | | | dioxygenase 3 | |
| 869 | AC004876_4 | 753 | 92 | AC004876 lysyl hydroxylase 3 | Homo sapiens |
| 869 | AF207069 | 753 | 92 | lysyl hydroxylase 3 | Homo sapiens |
| 870 | AAH16765 | 1778 | 99 | BC016765 Unknown (protein for | Homo sapiens |
| | | | | MGC: 22663) | |
| 870 | AF153882_1 | 1785 | 100 | AF153882 reversion-induced LIM | Homo sapiens |
| | | | | protein | |
| 870 | AF154335_1 | 1785 | 100 | AF154335 reversion-induced LIM | Homo sapiens |
| | | | | protein | |
| 871 | AF023268 | 1546 | 95 | metaxin | Homo sapiens |
| 871 | BC023071 | 1424 | 87 | metaxin | Mus musculus |
| 871 | U46920 | 1546 | 95 | metaxin | Homo sapiens |
| 872 | AF193053_1 | 575 | 100 | AF193053 unknown | Homo sapiens |
| 873 | AF318351_1 | 3211 | 100 | AF318351 unknown | Homo sapiens |
| 873 | AF318377_1 | 3211 | 100 | AF318377 unknown | Homo sapiens |
| 873 | AX106709 | 3211 | 100 | unnamed protein product | Homo sapiens |
| 874 | AL357374 | 2678 | 100 | bA353C18.3.2 (splicing factor | Homo sapiens |
| | | | | CC1.3, isoform 2 (CC1.4)) | |
| 874 | AY061882 | 2663 | 99 | transcription coactivator CAPER | Mus musculus |
| 874 | L10911 | 2678 | 100 | splicing factor | Homo sapiens |
| 875 | AAH08807 | 2806 | 98 | BC008807 keratin 6A | Homo sapiens |
| 875 | AAH14152 | 2809 | 98 | BC014152 Similar to keratin 6A | Homo sapiens |
| 875 | L42583 | 2806 | 98 | keratin type II | Homo sapiens |
| 876 | AK000496 | 301 | 72 | unnamed protein product | Homo sapiens |
| 876 | AK025116 | 271 | 67 | unnamed protein product | Homo sapiens |
| 876 | AK090511 | 282 | 60 | unnamed protein product | Homo sapiens |
| 877 | AAH16842 | 2431 | 99 | BC016842 Unknown (protein for | Homo sapiens |
| | | | | MGC: 10135) | |
| 877 | AK027643 | 2435 | 100 | unnamed protein product | Homo sapiens |
| 877 | AL834398 | 2529 | 99 | hypothetical protein | Homo sapiens |
| 878 | AAH02563 | 1624 | 100 | BC002563 Similar to zinc/iron | Homo sapiens |
| | | | | regulated transporter-like | |
| 878 | AAH07886 | 1624 | 100 | BC007886 Unknown (protein for | Homo sapiens |
| | | | | MGC: 14180) | |
| 878 | AAH14303 | 1624 | 100 | BC014303 Unknown (protein for | Homo sapiens |
| | | | | MGC: 16418) | |
| 879 | AF056732 | 3342 | 100 | prostaglandin transporter | Homo sapiens |
| 879 | BC041140 | 3478 | 99 | solute carrier family 21 | Homo sapiens |
| | | | | (prostaglandin transporter), | |
| | | | | member 2 | |
| 879 | U70867 | 3342 | 100 | prostaglandin transporter hPGT | Homo sapiens |
| 880 | AAH15206 | 335 | 100 | BC015206 guanine nucleotide | Homo sapiens |
| | | | | binding protein 10 | |
| 880 | AAH16319 | 335 | 100 | BC016319 guanine nucleotide | Homo sapiens |
| | | | | binding protein 10 | |
| 880 | AF493877_1 | 335 | 100 | AF493877 guanine nucleotide | Homo sapiens |
| | | | | binding protein gamma 10 | |
| 881 | BC010572 | 1333 | 79 | Jun proto-oncogene related gene | Mus musculus |
| | | | | d1 | |
| 881 | X51346 | 1517 | 99 | jun-D gene product (AA 1-303) | Homo sapiens |
| 881 | X56681 | 1716 | 98 | junD protein | Homo sapiens |
| 882 | AY081680 | 693 | 100 | chlorophyll a/b-binding protein | Arabidopsis |
| | | | | CP29 | thaliana |
| 882 | AY133566 | 693 | 100 | At5g01530/F7A7_50 | Arabidopsis |
| | | | | | thaliana |
| 882 | BT000363 | 693 | 100 | chlorophyll a/b-binding protein | Arabidopsis |
| | | | | CP29 | thaliana |
| 883 | AY086905 | 622 | 100 | photosystem II type I | Arabidopsis |
| | | | | chlorophyll a/b binding protein, | thaliana |
| | | | | putative | |
| 883 | AY128345 | 622 | 100 | photosystem II type I chlorophyll | Arabidopsis |
| | | | | a/b binding protein, putative | thaliana |
| 883 | BT000726 | 622 | 100 | putative photosystem II type I | Arabidopsis |
| | | | | chlorophyll a/b binding protein | thaliana |
| 884 | AK074519 | 1524 | 97 | unnamed protein product | Homo sapiens |
| 884 | AK074523 | 1524 | 97 | unnamed protein product | Homo sapiens |
| 884 | AX118867 | 1543 | 100 | unnamed protein product | Homo sapiens |
| 885 | AY050935 | 572 | 100 | putative photosystem II type I | Arabidopsis |
| | | | | chlorophyll a/b binding protein | thaliana |
| 885 | AY058180 | 572 | 100 | At1g29930/F1N18_23 | Arabidopsis |
| | | | | | thaliana |
| 885 | AY091169 | 572 | 100 | putative chlorophyll a/b-binding | Arabidopsis |
| | | | | protein | thaliana |
| 886 | AF178954 | 2149 | 88 | monocarboxylate transporter 4 | Mus musculus |
| 886 | U81800 | 2399 | 100 | monocarboxylate transporter | Homo sapiens |
| 886 | U87627 | 2164 | 88 | putative monocarboxylate | Rattus |
| | | | | transporter | norvegicus |
| 887 | AAH18345 | 173 | 100 | BC018345 Unknown (protein for | Homo sapiens |
| | | | | MGC: 8802) | |
| 887 | AF237776_1 | 173 | 100 | AF237776 MAP kinase-interacting | Homo sapiens |
| | | | | kinase 2b | |
| 887 | AL137565 | 173 | 100 | hypothetical protein | Homo sapiens |
| 888 | AF006013 | 3773 | 99 | dishevelled 3 | Homo sapiens |
| 888 | BC032459 | 3784 | 99 | dishevelled, dsh homolog 3 | Homo sapiens |
| | | | | (Drosophila) | |
| 888 | U75651 | 3806 | 100 | dishevelled 3 | Homo sapiens |
| 889 | AK000268 | 2659 | 100 | unnamed protein product | Homo sapiens |
| 889 | AK053678 | 1598 | 71 | unnamed protein product | Mus musculus |
| 889 | L00193 | 1342 | 58 | epidermal keratin subunit I | Mus musculus |
| 890 | AX354357 | 840 | 100 | unnamed protein product | Homo sapiens |
| 890 | BC002198 | 243 | 42 | Similar to hypothetical protein | Mus musculus |
| | | | | FLJ20093 | |
| 890 | BC039642 | 658 | 75 | Unknown (protein for | Mus musculus |
| | | | | IMAGE: 5352548) | |
| 891 | AF012348 | 962 | 92 | smooth muscle gamma actin | Gallus |
| | | | | | gallus |
| 891 | BC002042 | 962 | 92 | Similar to actin, gamma 2, smooth | Mus musculus |
| | | | | muscle, enteric | |
| 891 | S63494 | 962 | 92 | gamma-actin | Gallus |
| | | | | | gallus |
| 892 | AAH13867 | 2057 | 100 | BC013867 Similar to palladin | Homo sapiens |
| 892 | AB023209 | 2064 | 99 | KIAA0992 protein | Homo sapiens |
| 892 | AF151909_1 | 2161 | 100 | AF151909 CGI-151 protein | Homo sapiens |
| 893 | AF287271_1 | 714 | 100 | AF287271 ribosomal protein L23 | Mus musculus |
| 893 | AF401577_1 | 714 | 100 | AF401577 ribosomal protein L23 | Ictalurus |
| | | | | | punctatus |
| 893 | BC025918 | 714 | 100 | ribosomal protein L23 | Mus musculus |
| 894 | U43916 | 817 | 100 | TMP | Homo sapiens |
| 894 | Y07909 | 817 | 100 | progression associated protein | Homo sapiens |
| 894 | Z50751 | 817 | 100 | B4B | Homo sapiens |
| 895 | AAH09647 | 2778 | 99 | BC009647 Unknown (protein for | Homo sapiens |
| | | | | MGC: 5096) | |
| 895 | M13078 | 2773 | 99 | alkaline phosphatase precursor | Homo sapiens |
| 895 | M19159 | 2780 | 100 | placental alkaline phosphatase-1 | Homo sapiens |
| 896 | AF326591 | 2240 | 100 | fenestrated-endothelial linked | Homo sapiens |
| | | | | structure protein | |
| 896 | AF348827 | 2232 | 99 | PV1 protein | Homo sapiens |
| 896 | AL834363 | 2304 | 99 | hypothetical protein | Homo sapiens |
| 897 | AAH11686 | 5877 | 100 | BC011686 damage-specific DNA | Homo sapiens |
| | | | | binding protein 1 (127 kD) | |
| 897 | L40326 | 5877 | 100 | X-associated protein 1 | Homo sapiens |
| 897 | U18299 | 5877 | 100 | DDBa p127 | Homo sapiens |
| 898 | U66661 | 1330 | 100 | GABA-A receptor epsilon subunit | Homo sapiens |
| 898 | Y07637 | 1330 | 100 | putative GABA-gated chloride | Homo sapiens |
| | | | | channel | |
| 898 | Y09765 | 1330 | 100 | GABA receptor epsilon subunit | Homo sapiens |
| 899 | AF380181_1 | 11506 | 99 | AF380181 SON DNA binding protein | Homo sapiens |
| | | | | isoform C | |
| 899 | AF380184_1 | 12193 | 99 | AF380184 SON DNA binding protein | Homo sapiens |
| | | | | isoform F | |
| 899 | AY026895 | 11871 | 97 | NREBP | Homo sapiens |
| 900 | A20470 | 2142 | 99 | preA-PAI-2 | synthetic |
| | | | | | construct |
| 900 | AAH12609 | 2148 | 100 | BC012609 Similar to serine (or | Homo sapiens |
| | | | | cysteine) proteinase inhibitor, | |
| | | | | clade B (ovalbumin), member 2 | |
| 900 | Y00630 | 2139 | 99 | PAI-2 precursor (AA −22 to 393) | Homo sapiens |
| 901 | AB037819 | 7936 | 100 | KIAA1398 protein | Homo sapiens |
| 901 | AL132765 | 5785 | 95 | bA462D18.3.2 (ribosome binding | Homo sapiens |
| | | | | protein 1 (dog 180 kDa homolog) | |
| | | | | (KIAA1398) (isoform 2)) | |
| 901 | X87224 | 6518 | 84 | ribosome receptor | Canis |
| | | | | | familiaris |
| 902 | AAH00716 | 2646 | 98 | BC000716 seryl-tRNA synthetase | Homo sapiens |
| 902 | D49914 | 2646 | 98 | Seryl tRNA Synthetase | Homo sapiens |
| 902 | X91257 | 2649 | 98 | seryl-tRNA synthetase | Homo sapiens |
| 903 | D29640 | 4698 | 57 | KIAA0051 | Homo sapiens |
| 903 | L33075 | 4698 | 57 | ras GTPase-activating-like | Homo sapiens |
| | | | | protein | |
| 903 | U51903 | 8003 | 100 | RasGAP-related protein | Homo sapiens |
| 904 | AAH17338 | 2576 | 99 | BC017338 fucosidase, alpha-L-1, | Homo sapiens |
| | | | | tissue | |
| 904 | M29877 | 2581 | 100 | alpha-L-fucosidase precursor (EC | Homo sapiens |
| | | | | 3.2.1.5) | |
| 904 | M80815 | 2576 | 99 | alpha-L-fucosidase | Homo sapiens |
| 905 | AAH03067 | 3601 | 100 | BC003067 growth arrest and DNA- | Homo sapiens |
| | | | | damage-inducible 34 | |
| 905 | AK001361 | 3568 | 99 | unnamed protein product | Homo sapiens |
| 905 | U83981 | 3601 | 100 | apoptosis associated protein | Homo sapiens |
| 906 | AAH02717 | 379 | 77 | BC002717 Similar to chorionic | Homo sapiens |
| | | | | somatomammotropin hormone 1 | |
| | | | | (placental lactogen) | |
| 906 | AAH05921 | 379 | 77 | BC005921 chorionic | Homo sapiens |
| | | | | somatomammotropin hormone 1 | |
| | | | | (placental lactogen) | |
| 906 | AAH20756 | 379 | 77 | BC020756 chorionic | Homo sapiens |
| | | | | somatomammotropin hormone 1 | |
| | | | | (placental lactogen) | |
| 907 | M57939 | 2349 | 100 | ribonucleoprotein antigen | Homo sapiens |
| 907 | X04654 | 3252 | 100 | 70 K protein (AA 1-614) | Homo sapiens |
| 907 | X84841 | 2349 | 100 | 68 kDa (U1) ribonucleoprotein | Homo sapiens |
| 908 | AAH09945 | 3737 | 99 | BC009945 Unknown (protein for | Homo sapiens |
| | | | | IMAGE: 4123572) | |
| 908 | AB018289 | 5502 | 100 | KIAA0746 protein | Homo sapiens |
| 908 | AK030487 | 4620 | 87 | unnamed protein product | Mus musculus |
| 909 | AJ422147 | 664 | 100 | C15 protein | Homo sapiens |
| 909 | AX352692 | 664 | 100 | unnamed protein product | Homo sapiens |
| 909 | AX357061 | 664 | 100 | unnamed protein product | Homo sapiens |
| 910 | AF251294_1 | 375 | 90 | AF251294 hCLA-iso | Homo sapiens |
| 910 | AL834432 | 375 | 90 | hypothetical protein | Homo sapiens |
| 910 | AY037150 | 375 | 90 | hypothetical protein SB138 | Homo sapiens |
| 911 | AAH01501 | 1520 | 100 | BC001501 Unknown (protein for | Homo sapiens |
| | | | | MGC: 2233) | |
| 911 | AAH14078 | 1520 | 100 | BC014078 cyclin D1 (PRAD1: | Homo sapiens |
| | | | | parathyroid adenomatosis 1) | |
| 911 | BC025302 | 1520 | 100 | cyclin D1 (PRAD1: parathyroid | Homo sapiens |
| | | | | adenomatosis 1) | |
| 912 | BC036285 | 1936 | 100 | protein kinase, cAMP-dependent, | Homo sapiens |
| | | | | regulatory, type I, alpha (tissue | |
| | | | | specific extinguisher 1) | |
| 912 | M18468 | 1936 | 100 | cAMP-dependent protein kinase | Homo sapiens |
| | | | | regulatory subunit type 1 | |
| 912 | M33336 | 1936 | 100 | cAMP-dependent protein kinase | Homo sapiens |
| | | | | type I-alpha subunit | |
| 913 | BC024165 | 600 | 100 | polymerase (RNA) II (DNA | Homo sapiens |
| | | | | directed) polypeptide J (13.3 kD) | |
| 913 | X82385 | 600 | 100 | RNA polymerase II subunit | Homo sapiens |
| 913 | X98433 | 600 | 100 | RNA polymerase II subunit | Homo sapiens |
| 914 | AL138761 | 8033 | 99 | bA16H23.2 (collagen, type XVII, | Homo sapiens |
| | | | | alpha 1 (BP180)) | |
| 914 | M91669 | 8228 | 100 | autoantigen | Homo sapiens |
| 914 | U76604 | 8037 | 99 | 180 kDa bullous pemphigoid | Homo sapiens |
| | | | | antigen 2/type XVII collagen | |
| 915 | AAH03575 | 2373 | 100 | BC003575 mannosyl (alpha-1,3-)- | Homo sapiens |
| | | | | glycoprotein beta-1,2-N- | |
| | | | | acetylglucosaminyltransferase | |
| 915 | M55621 | 2363 | 99 | N-acetylglucosaminyltransferase I | Homo sapiens |
| 915 | M61829 | 2373 | 100 | alpha-1,3-mannosyl-glycoprotein | Homo sapiens |
| | | | | beta-1,2-N- | |
| | | | | acetylglucosaminyltransferase | |
| 916 | L13923 | 16639 | 99 | fibrillin | Homo sapiens |
| 916 | L28748 | 16362 | 97 | putative | Bos taurus |
| 916 | X63556 | 17359 | 100 | fibrillin | Homo sapiens |
| 917 | AAH02576 | 3661 | 100 | BC002576 matrix metalloproteinase | Homo sapiens |
| | | | | 2 (gelatinase A, 72 kD gelatinase, | |
| | | | | 72 kD type IV collagenase) | |
| 917 | J03210 | 3584 | 100 | collagenase type IV precursor | Homo sapiens |
| 917 | M55593 | 3661 | 100 | type IV collagenase | Homo sapiens |
| 918 | AAH22087 | 2466 | 99 | BC022087 Similar to CD36 antigen | Homo sapiens |
| | | | | (collagen type I receptor, | |
| | | | | thrombospondin receptor)-like 1 | |
| 918 | AF467889_1 | 2380 | 86 | AF467889 high density lipoprotein | Sus scrofa |
| | | | | receptor SR-BI | |
| 918 | Z22555 | 2684 | 100 | CLA-1 | Homo sapiens |
| 919 | AF106202_1 | 1249 | 100 | AF106202 endothelial cell protein | Homo sapiens |
| | | | | C receptor precursor | |
| 919 | AF375468_1 | 1249 | 100 | AF375468 endothelial protein C | Homo sapiens |
| | | | | receptor | |
| 919 | X89079 | 1249 | 100 | centrocyclin | Homo sapiens |
| 920 | AF153603_1 | 666 | 100 | AF153603 TSC-22 related protein | Homo sapiens |
| 920 | AF183393_1 | 666 | 100 | AF183393 TSC-22-like Protein | Homo sapiens |
| 920 | AF228339 | 666 | 100 | glucocorticoid-induced GILZ | Homo sapiens |
| 921 | AF111168 | 3586 | 99 | unknown | Homo sapiens |
| 921 | AK075445 | 2876 | 99 | unnamed protein product | Homo sapiens |
| 921 | AX136231 | 2876 | 99 | unnamed protein product | Homo sapiens |
| 922 | AAH11234 | 1220 | 100 | BC011234 Similar to splicing | Homo sapiens |
| | | | | factor 30, survival of motor | |
| | | | | neuron-related | |
| 922 | AF083385 | 1220 | 100 | 30 kDa splicing factor; SPF 30 | Homo sapiens |
| 922 | AF107463 | 1220 | 100 | splicing factor | Homo sapiens |
| 923 | AAH10240 | 1921 | 100 | BC010240 cathepsin B | Homo sapiens |
| 923 | L16510 | 1912 | 99 | cathepsin B | Homo sapiens |
| 923 | M14221 | 1915 | 99 | preprocathepsin B | Homo sapiens |
| 924 | AK056033 | 495 | 97 | unnamed protein product | Homo sapiens |
| 925 | AE003588 | 205 | 22 | CG2839-PA | Drosophila |
| | | | | | melanogaster |
| 925 | AE014836_21 | 231 | 26 | AE014836 hypothetical protein | Plasmodium |
| | | | | | falciparum |
| | | | | | 3D7 |
| 925 | AY052127 | 202 | 22 | SD07741p | Drosophila |
| | | | | | melanogaster |
| 926 | AF222743_1 | 2415 | 100 | AF222743 Sec61 alpha-1 | Mus musculus |
| 926 | BC003707 | 2415 | 100 | sec61 homolog | Mus musculus |
| 926 | M96630 | 2415 | 100 | sec61-like protein | Rattus sp. |
| 927 | AF332086_1 | 3193 | 96 | AF332086 Rad21 | Mus musculus |
| 927 | D38551 | 3284 | 100 | The ha1237 gene product is | Homo sapiens |
| | | | | related to S. pombe rad21 gene | |
| | | | | product. | |
| 927 | X98294 | 3275 | 99 | HR21spA | Homo sapiens |
| 928 | AAH16325 | 925 | 100 | BC016325 ADP-ribosylation factor 4 | Homo sapiens |
| 928 | AF493883_1 | 925 | 100 | AF493883 ADP-ribosylation factor | Homo sapiens |
| | | | | protein 4 | |
| 928 | BC022866 | 925 | 100 | ADP-ribosylation factor 4 | Homo sapiens |
| 929 | AAH18201 | 763 | 100 | BC018201 Unknown (protein for | Homo sapiens |
| | | | | MGC: 21505) | |
| 929 | AF217965_1 | 763 | 100 | AF217965 unknown | Homo sapiens |
| 929 | AF217972_1 | 763 | 100 | AF217972 unknown | Homo sapiens |
| 930 | AAH00211 | 1162 | 100 | BC000211 eukaryotic translation | Homo sapiens |
| | | | | elongation factor 1 beta 2 | |
| 930 | AAH04931 | 1162 | 100 | BC004931 eukaryotic translation | Homo sapiens |
| | | | | elongation factor 1 beta 2 | |
| 930 | X60489 | 1162 | 100 | elongation factor-1-beta | Homo sapiens |
| 931 | D82984 | 1758 | 93 | C/EBP alpha protein | Bos taurus |
| 931 | U34070 | 1857 | 96 | CCAAT/enhancer binding protein | Homo sapiens |
| | | | | alpha | |
| 931 | Y11525 | 1927 | 100 | CCAAT/enhancer binding protein | Homo sapiens |
| | | | | alpha | |
| 932 | AK025116 | 341 | 71 | unnamed protein product | Homo sapiens |
| 932 | AK090511 | 358 | 72 | unnamed protein product | Homo sapiens |
| 932 | AK096373 | 341 | 70 | unnamed protein product | Homo sapiens |
| 933 | AAH13963 | 2458 | 100 | BC013963 Similar to adenylyl | Homo sapiens |
| | | | | cyclase-associated protein | |
| 933 | AAH17196 | 2458 | 100 | BC017196 adenylyl cyclase- | Homo sapiens |
| | | | | associated protein | |
| 933 | M98474 | 2458 | 100 | CAP protein | Homo sapiens |
| 934 | AAH02464 | 2175 | 99 | BC002464 coagulation factor II | Homo sapiens |
| | | | | (thrombin) receptor | |
| 934 | AF391809_1 | 2179 | 99 | AF391809 coagulation factor II | Homo sapiens |
| | | | | (thrombin) receptor | |
| 934 | M62424 | 2187 | 100 | thrombin receptor | Homo sapiens |
| 935 | AF085250 | 759 | 100 | calmodulin | Perca |
| | | | | | flavescens |
| 935 | D83350 | 759 | 100 | calmodulin | Anas |
| | | | | | platyrhynchos |
| 935 | K01945 | 759 | 100 | calmodulin (cDNA clone 71) | Xenopus |
| | | | | | laevis |
| 936 | AL050265 | 2193 | 100 | hypothetical protein | Homo sapiens |
| 936 | BC033475 | 2128 | 96 | similar to TAR DNA-binding | Mus musculus |
| | | | | protein-43 (TDP-43) | |
| 936 | U23731 | 2193 | 100 | TAR DNA-binding protein-43 | Homo sapiens |
| 937 | AAH01495 | 1673 | 99 | BC001495 chromosome 1 open | Homo sapiens |
| | | | | reading frame 8 | |
| 937 | AAH16374 | 1697 | 100 | BC016374 chromosome 1 open | Homo sapiens |
| | | | | reading frame 8 | |
| 937 | AF290615_1 | 1673 | 99 | AF290615 liver membrane-bound | Homo sapiens |
| | | | | protein | |
| 938 | AK000385 | 329 | 65 | unnamed protein product | Homo sapiens |
| 938 | AK092450 | 360 | 69 | unnamed protein product | Homo sapiens |
| 938 | AK097266 | 329 | 74 | unnamed protein product | Homo sapiens |
| 939 | AAH00642 | 683 | 99 | BC000642 MY047 protein | Homo sapiens |
| 939 | AF063605 | 688 | 100 | brain my047 protein | Homo sapiens |
| 939 | AX136119 | 683 | 99 | unnamed protein product | Homo sapiens |
| 940 | AF035947_1 | 1394 | 100 | AF035947 cytokine-inducible | Homo sapiens |
| | | | | inhibitor of signalling type 1b | |
| 940 | AF132297_1 | 1332 | 99 | AF132297 cytokine-inducible SH2- | Homo sapiens |
| | | | | containing protein | |
| 940 | BC031590 | 1321 | 100 | cytokine inducible SH2-containing | Homo sapiens |
| | | | | protein | |
| 941 | AF151018_1 | 955 | 100 | AF151018 HSPC184 | Homo sapiens |
| 941 | AK012047 | 951 | 99 | unnamed protein product | Mus musculus |
| 941 | AK075227 | 955 | 100 | unnamed protein product | Homo sapiens |
| 942 | AK025116 | 322 | 70 | unnamed protein product | Homo sapiens |
| 942 | AK090511 | 302 | 63 | unnamed protein product | Homo sapiens |
| 942 | AK090929 | 308 | 71 | unnamed protein product | Homo sapiens |
| 943 | AAH09357 | 1052 | 100 | BC009357 transgelin 2 | Homo sapiens |
| 943 | AY007127 | 1157 | 100 | similar to Homo sapiens mRNA for | |
| | | | | KIAA0120 gene with GenBank | |
| | | | | Accession Number D21261.1 | |
| 943 | D21261 | 1052 | 100 | similar to human 22 kDa, SM22 mRNA | Homo sapiens |
| | | | | (HUM22SM). | |
| 945 | AAH14006 | 260 | 89 | BC014006 Similar to 6- | Homo sapiens |
| | | | | phosphogluconolactonase | |
| 945 | AJ243972 | 260 | 89 | 6-phosphogluconolactonase | Homo sapiens |
| 945 | BC006594 | 243 | 80 | RIKEN cDNA 1110030K05 gene | Mus musculus |
| 946 | AAH03125 | 2055 | 99 | BC003125 Unknown (protein for | Homo sapiens |
| | | | | MGC: 3222) | |
| 946 | AK027877 | 2055 | 99 | unnamed protein product | Homo sapiens |
| 946 | AL136916 | 2055 | 99 | hypothetical protein | Homo sapiens |
| 947 | AAH03681 | 2956 | 100 | BC003681 Unknown (protein for | Homo sapiens |
| | | | | IMAGE: 3453235) | |
| 947 | AL096828 | 3008 | 100 | dJ963E22.1 (Novel protein similar | Homo sapiens |
| | | | | to NY-REN-2 Antigen) | |
| 947 | AX400070 | 2878 | 96 | unnamed protein product | Homo sapiens |
| 948 | AF161372_1 | 872 | 100 | AF161372 HSPC254 | Homo sapiens |
| 949 | AAH11714 | 476 | 100 | BC011714 Similar to heterogeneous | Homo sapiens |
| | | | | nuclear ribonucleoprotein D-like | |
| 949 | AB017020 | 476 | 100 | JKTBP | Mus musculus |
| 949 | BC021374 | 476 | 100 | heterogeneous nuclear | Mus musculus |
| | | | | ribonucleoprotein D-like | |
| 950 | AAH02673 | 1063 | 100 | BC002673 protein kinase H11; | Homo sapiens |
| | | | | small stress protein-like protein | |
| | | | | HSP22 | |
| 950 | AF191017_1 | 1063 | 100 | AF191017 E2IG1 | Homo sapiens |
| 950 | AF250138_1 | 1063 | 100 | AF250138 small stress protein- | Homo sapiens |
| | | | | like protein HSP22 | |
| 951 | AAH05033 | 4718 | 99 | BC005033 Unknown (protein for | Homo sapiens |
| | | | | MGC: 12692) | |
| 951 | AJ289242 | 4654 | 97 | alpha-actinin 4 | Mus musculus |
| 951 | BC013616 | 4654 | 97 | alpha actinin 4 | Mus musculus |
| 952 | AAH11908 | 1787 | 100 | BC011908 Unknown (protein for | Homo sapiens |
| | | | | MGC: 20321) | |
| 952 | AAH14564 | 1787 | 100 | BC014564 Unknown (protein for | Homo sapiens |
| | | | | MGC: 2063) | |
| 952 | AAH18695 | 1787 | 100 | BC018695 Unknown (protein for | Homo sapiens |
| | | | | MGC: 3838) | |
| 953 | AAH12977 | 1363 | 100 | BC012977 nuclear LIM interactor- | Homo sapiens |
| | | | | interacting factor | |
| 953 | AF229162_1 | 1363 | 100 | AF229162 nuclear LIM interactor- | Homo sapiens |
| | | | | interacting factor | |
| 953 | AF229163 | 1363 | 100 | nuclear LIM interactor- | Homo sapiens |
| | | | | interacting factor | |
| 954 | AAH09718 | 557 | 92 | BC009718 epithelial membrane | Homo sapiens |
| | | | | protein 3 | |
| 954 | U52101 | 557 | 92 | YMP | Homo sapiens |
| 954 | U87947 | 557 | 92 | hematopoietic neural membrane | Homo sapiens |
| | | | | protein | |
| 955 | AF162781_1 | 4986 | 94 | AF162781 SH2-containing inositol | Mus musculus |
| | | | | 5-phosphatase 2 | |
| 955 | L36818 | 6044 | 99 | 51C protein | Homo sapiens |
| 955 | Y14385 | 5270 | 98 | inositol polyphosphate 5- | Homo sapiens |
| | | | | phosphatase | |
| 956 | AAH17369 | 1238 | 100 | BC017369 splicing factor, | Homo sapiens |
| | | | | arginine/serine-rich 7 (35 kD) | |
| 956 | AAH17908 | 1238 | 100 | BC017908 splicing factor, | Homo sapiens |
| | | | | arginine/serine-rich 7 (35 kD) | |
| 956 | BC022328 | 1238 | 100 | splicing factor, arginine/serine- | Homo sapiens |
| | | | | rich 7 (35 kD) | |
| 957 | AAH14323 | 1209 | 99 | BC014323 Similar to accessory | Homo sapiens |
| | | | | proteins BAP31/BAP29 | |
| 957 | X81109 | 1213 | 100 | tumor-associated antigen | Homo sapiens |
| 957 | Z31696 | 1213 | 100 | CDM | Homo sapiens |
| 958 | AAH15763 | 3102 | 100 | BC015763 hypothetical protein | Homo sapiens |
| | | | | FLJ20258 | |
| 958 | AK000265 | 3093 | 99 | unnamed protein product | Homo sapiens |
| 958 | AK075098 | 2998 | 99 | unnamed protein product | Homo sapiens |
| 959 | AAH07858 | 2250 | 100 | BC007858 inhibin, beta A (activin | Homo sapiens |
| | | | | A, activin AB alpha polypeptide) | |
| 959 | M13436 | 2250 | 100 | beta-A inhibin | Homo sapiens |
| 959 | X57578 | 2250 | 100 | activin beta-A subunit | Homo sapiens |
| 960 | AK027598 | 3474 | 100 | unnamed protein product | Homo sapiens |
| 960 | AX481758 | 3492 | 99 | unnamed protein product | Homo sapiens |
| 960 | AX481760 | 3492 | 99 | unnamed protein product | Homo sapiens |
| 961 | AAH15958 | 3278 | 100 | BC015958 Unknown (protein for | Homo sapiens |
| | | | | MGC: 15290) | |
| 961 | BC023520 | 3278 | 100 | Unknown (protein for MGC: 12727) | Homo sapiens |
| 961 | U68105 | 3278 | 100 | poly(A)-binding protein | Homo sapiens |
| 962 | AAH10623 | 3729 | 96 | BC010623 Similar to nuclear | Homo sapiens |
| | | | | factor (erythroid-derived 2)-like 1 | |
| 962 | AK090459 | 4032 | 100 | FLJ00380 protein | Homo sapiens |
| 962 | X77366 | 3926 | 100 | hbZ17 | Homo sapiens |
| 963 | AAH03177 | 3500 | 100 | BC003177 KIAA1536 protein | Homo sapiens |
| 963 | AK027881 | 3480 | 99 | unnamed protein product | Homo sapiens |
| 963 | AL136895 | 3500 | 100 | hypothetical protein | Homo sapiens |
| 964 | AY054301 | 4981 | 94 | type III preprocollagen alpha 1 | Homo sapiens |
| | | | | chain | |
| 964 | BC028178 | 6603 | 100 | Similar to collagen, type III, | Homo sapiens |
| | | | | alpha 1 (Ehlers-Danlos syndrome | |
| | | | | type IV, autosomal dominant) | |
| 964 | X14420 | 4981 | 94 | prepro-alpha-1 type 3 collagen | Homo sapiens |
| 965 | AAH11819 | 3473 | 99 | BC011819 DEAD/H (Asp-Glu-Ala- | Homo sapiens |
| | | | | Asp/His) box polypeptide 3 | |
| 965 | AF000982 | 3476 | 100 | dead box, X isoform | Homo sapiens |
| 965 | AF000983 | 3476 | 100 | dead box, X isoform | Homo sapiens |
| 966 | AAH14959 | 1160 | 100 | BC014959 RING1 and YY1 binding | Homo sapiens |
| | | | | protein | |
| 966 | AF179286_1 | 1160 | 100 | AF179286 death effector domain- | Homo sapiens |
| | | | | associated factor | |
| 966 | BC036459 | 1156 | 99 | RING1 and YY1 binding protein | Homo sapiens |
| 967 | AAH17172 | 634 | 99 | BC017172 hypothetical protein | Homo sapiens |
| 967 | AF110774_1 | 634 | 99 | AF110774 adrenal gland protein | Homo sapiens |
| | | | | AD-001 | |
| 967 | AX354355 | 634 | 99 | unnamed protein product | Homo sapiens |
| 968 | AAH08442 | 1106 | 100 | BC008442 Similar to transmembrane | Homo sapiens |
| | | | | 4 superfamily member 1 | |
| 968 | AAH10166 | 1106 | 100 | BC010166 Similar to transmembrane | Homo sapiens |
| | | | | 4 superfamily member 1 | |
| 968 | M90657 | 1106 | 100 | L6 | Homo sapiens |
| 969 | AAH10354 | 1764 | 100 | BC010354 PTD010 protein | Homo sapiens |
| 969 | AB009685 | 1764 | 100 | DERP2 | Homo sapiens |
| 969 | AF131820 | 1764 | 100 | Unknown | Homo sapiens |
| 970 | AF217787 | 1172 | 99 | extracellular glutathione | Homo sapiens |
| | | | | peroxidase | |
| 970 | D00632 | 1195 | 100 | glutathione peroxidase | Homo sapiens |
| 970 | X58295 | 1195 | 100 | glutathione peroxidase | Homo sapiens |
| 971 | AAH00531 | 939 | 97 | BC000531 insulin-like growth | Homo sapiens |
| | | | | factor 2 (somatomedin A) | |
| 971 | AF517226_1 | 939 | 97 | AF517226 insulin-like growth | Homo sapiens |
| | | | | factor 2 (somatomedin A) | |
| 971 | M17863 | 942 | 97 | preproinsulin-like growth factor | Homo sapiens |
| | | | | II, domains A-E | |
| 972 | AJ310544 | 2183 | 100 | EGLN2 protein | Homo sapiens |
| 972 | AX553864 | 2183 | 100 | unnamed protein product | Homo sapiens |
| 972 | BC036051 | 2183 | 100 | Similar to egl nine homolog 2 (C. elegans) | Homo sapiens |
| 973 | AAH00867 | 915 | 98 | BC000867 PRO0659 protein | Homo sapiens |
| 973 | AL834135 | 1118 | 99 | hypothetical protein | Homo sapiens |
| 973 | AX405861 | 1118 | 99 | unnamed protein product | Homo sapiens |
| 974 | AL136890 | 1293 | 98 | hypothetical protein | Homo sapiens |
| 974 | AL137798 | 878 | 80 | dJ1182A14.5.2 (novel gene | Homo sapiens |
| | | | | (isoform 2) KIAA1245 protein) | |
| 974 | BC024011 | 1747 | 100 | Similar to hypothetical protein | Homo sapiens |
| | | | | DKFZp434D177 | |
| 975 | AB037755 | 4896 | 99 | KIAA1334 protein | Homo sapiens |
| 975 | AF155135_1 | 4845 | 99 | AF155135 novel retinal pigment | Homo sapiens |
| | | | | epithelial cell protein | |
| 975 | AF202315_1 | 4141 | 85 | AF202315 ankycorbin | Mus musculus |
| 976 | AK097965 | 344 | 77 | unnamed protein product | Homo sapiens |
| 976 | AX400008 | 283 | 62 | unnamed protein product | Homo sapiens |
| 976 | BC033959 | 342 | 70 | similar to Alu subfamily SQ | Homo sapiens |
| | | | | sequence contamination warning | |
| | | | | entry | |
| 977 | AAH12444 | 1319 | 100 | BC012444 Similar to chloride | Homo sapiens |
| | | | | intracellular channel 4 | |
| 977 | AF097330_1 | 1305 | 99 | AF097330 H1 chloride channel; | Homo sapiens |
| | | | | p64H1; CLIC4 | |
| 977 | AL117424 | 1319 | 100 | hypothetical protein | Homo sapiens |
| 978 | AB034747 | 904 | 100 | small integral membrane protein | Homo sapiens |
| | | | | of lysosome/late endosome | |
| 978 | AF171100 | 812 | 85 | TBX1 protein | Mus musculus |
| 978 | BC018559 | 812 | 85 | LPS-induced TNF-alpha factor | Mus musculus |
| 979 | AAH10645 | 1737 | 100 | BC010645 Similar to | Homo sapiens |
| | | | | sialyltransferase 4C (beta- | |
| | | | | galactosidase alpha-2,3- | |
| | | | | sialytransferase) | |
| 979 | AY040826 | 1715 | 97 | alpha 2,3-sialyltranferase IV | Homo sapiens |
| | | | | type B + 18 | |
| 979 | L23767 | 1710 | 100 | a2,3 sialyltransferse | Homo sapiens |
| 980 | AAH09329 | 887 | 82 | BC009329 triosephosphate | Homo sapiens |
| | | | | isomerase 1 | |
| 980 | AAH11611 | 887 | 82 | BC011611 Similar to | Homo sapiens |
| | | | | triosephosphate isomerase 1 | |
| 980 | AAH15100 | 887 | 82 | BC015100 triosephosphate | Homo sapiens |
| | | | | isomerase 1 | |
| 981 | AAH18986 | 1338 | 98 | BC018986 Unknown (protein for | Homo sapiens |
| | | | | MGC: 20092) | |
| 981 | J05594 | 1331 | 98 | NAD+-dependent 15- | Homo sapiens |
| | | | | hydroxyprostaglandin | |
| | | | | dehydrogenase | |
| 981 | L76465 | 1331 | 98 | NAD+-dependent 15- | Homo sapiens |
| | | | | hydroxyprostaglandin | |
| | | | | dehydrogenase | |
| 982 | AAH00690 | 794 | 100 | BC000690 ribosomal protein L24 | Homo sapiens |
| 982 | BC002110 | 794 | 100 | ribosomal protein L24 | Mus musculus |
| 982 | X78443 | 794 | 100 | ribosomal protein L24 | Rattus |
| | | | | | norvegicus |
| 983 | AAH11402 | 1122 | 100 | BC011402 Similar to decidual | Homo sapiens |
| | | | | protein induced by progesterone | |
| 983 | AB022718 | 1122 | 100 | DEPP | Homo sapiens |
| 983 | AL136653 | 1116 | 99 | hypothetical protein | Homo sapiens |
| 984 | AF108841 | 406 | 74 | pol protein | Homo sapiens |
| 984 | AF108843 | 420 | 75 | pol protein | Homo sapiens |
| 984 | U88902 | 319 | 73 | integrase | Homo sapiens |
| 985 | A07358 | 1657 | 99 | VAC beta | Mus musculus |
| 985 | AAH04376 | 1666 | 100 | BC004376 annexin A8 | Homo sapiens |
| 985 | X16662 | 1657 | 99 | vascular anticoagulant-beta (AA 1-327) | Homo sapiens |
| 986 | AF068227 | 2236 | 100 | putative transmembrane protein | Homo sapiens |
| 986 | AK032293 | 1426 | 76 | unnamed protein product | Mus musculus |
| 986 | BC025487 | 1447 | 77 | Similar to ceroid-lipofuscinosis, | Mus musculus |
| | | | | neuronal 5 | |
| 987 | AAH10652 | 1355 | 100 | BC010652 Unknown (protein for | Homo sapiens |
| | | | | MGC: 9753) | |
| 987 | AF217980_1 | 1338 | 98 | AF217980 unknown | Homo sapiens |
| 988 | AK000496 | 378 | 68 | unnamed protein product | Homo sapiens |
| 988 | AK025116 | 403 | 72 | unnamed protein product | Homo sapiens |
| 988 | AK090511 | 363 | 68 | unnamed protein product | Homo sapiens |
| 989 | AF001900 | 1702 | 100 | secreted frizzled-related protein | Homo sapiens |
| 989 | AF056087 | 1702 | 100 | secreted frizzled related protein | Homo sapiens |
| 989 | BC036503 | 1690 | 99 | Unknown (protein for MGC: 43294) | Homo sapiens |
| 990 | AAH14052 | 2127 | 100 | BC014052 transcriptional coactivator | Homo sapiens |
| | | | | with PDZ-binding motif | |
| | | | | (TAZ) | |
| 990 | AJ299431 | 2127 | 100 | transcriptional coactivator | Homo sapiens |
| 990 | AK022036 | 2127 | 100 | unnamed protein product | Homo sapiens |
| 991 | AAH07493 | 552 | 99 | BC007493 galactosidase, beta 1 | Homo sapiens |
| 991 | M22590 | 552 | 99 | beta-galactosidase precursor (EC | Homo sapiens |
| | | | | 3.2.1.23) | |
| 991 | M34423 | 552 | 99 | beta-galactosidase precursor (EC | Homo sapiens |
| | | | | 3.2.1.23) | |
| 992 | AAH15928 | 2186 | 100 | BC015928 Unknown (protein for | Homo sapiens |
| | | | | MGC: 8773) | |
| 992 | AB037797 | 2313 | 100 | KIAA1376 protein | Homo sapiens |
| 992 | AK088288 | 2153 | 98 | unnamed protein product | Mus musculus |
| 993 | AF087873_1 | 383 | 100 | AF087873 protein kinase inhibitor | Homo sapiens |
| 993 | AF225513_1 | 383 | 100 | AF225513 cAMP-dependent protein | Homo sapiens |
| | | | | kinase inhibitor beta | |
| 993 | BC036011 | 383 | 100 | protein kinase (cAMP-dependent, | Homo sapiens |
| | | | | catalytic) inhibitor beta | |
| 994 | X53305 | 736 | 100 | stathmin | Homo sapiens |
| 994 | X94912 | 736 | 100 | Pr22 | Homo sapiens |
| 994 | Z11566 | 736 | 100 | Pr22 protein | Homo sapiens |
| 995 | AF148856_2 | 150 | 79 | AF148856 unknown | Homo sapiens |
| 995 | AL096744 | 153 | 82 | hypothetical protein | Homo sapiens |
| 995 | M80341 | 150 | 79 | ORF2 | Homo sapiens |
| 996 | AK002154 | 798 | 94 | unnamed protein product | Homo sapiens |
| 996 | AK023417 | 819 | 100 | unnamed protein product | Homo sapiens |
| 996 | AX399949 | 230 | 64 | unnamed protein product | Homo sapiens |
| 997 | AF151807_1 | 2196 | 99 | AF151807 CGI-49 protein | Homo sapiens |
| 997 | AK075178 | 2149 | 97 | unnamed protein product | Homo sapiens |
| 997 | BC026185 | 2136 | 97 | Similar to CGI-49 protein | Homo sapiens |
| 998 | AAH10123 | 2134 | 100 | BC010123 SH3-domain binding | Homo sapiens |
| | | | | protein 5 (BTK-associated) | |
| 998 | AB005047 | 2134 | 100 | SH3 binding protein | Homo sapiens |
| 998 | AB027562 | 2008 | 94 | vascular endothelial cell | Rattus |
| | | | | specific protein 18 | norvegicus |
| 999 | AJ131023 | 5309 | 99 | oxytocinase/insulin-responsive | Homo sapiens |
| | | | | aminopeptidase, variant 1 | |
| 999 | U62768 | 5318 | 99 | oxytocinase splice variant 1 | Homo sapiens |
| 999 | U62769 | 5242 | 99 | oxytocinase splice variant 2 | Homo sapiens |
| 1000 | AF234263 | 2521 | 99 | cathepsin C | Homo sapiens |
| 1000 | U79415 | 2527 | 100 | prepro dipeptidyl peptidase I | Homo sapiens |
| 1000 | X87212 | 2527 | 100 | cathepsin C | Homo sapiens |
| 1001 | BC003426 | 1438 | 94 | Similar to eukaryotic translation | Mus musculus |
| | | | | initiation factor 2B, subunit 1 | |
| | | | | (alpha, 26 kD) | |
| 1001 | U05821 | 1419 | 92 | translation initiation factor | Rattus |
| | | | | eIF-2B alpha-subunit | norvegicus |
| 1001 | X95648 | 1526 | 100 | alfa subunit | Homo sapiens |
| 1002 | AAH14093 | 4073 | 96 | BC014093 Similar to amiloride | Homo sapiens |
| | | | | binding protein 1 (amine oxidase | |
| | | | | (copper-containing)) | |
| 1002 | U11862 | 4060 | 96 | diamine oxidase, copper/topa | Homo sapiens |
| | | | | quinone-containing | |
| 1002 | X78212 | 4066 | 96 | amiloride binding protein | Homo sapiens |
| 1003 | AK003633 | 925 | 98 | unnamed protein product | Mus musculus |
| 1003 | AK007989 | 925 | 98 | unnamed protein product | Mus musculus |
| 1003 | AK076212 | 925 | 98 | unnamed protein product | Mus musculus |
| 1004 | AAH18340 | 1692 | 99 | BC018340 Unknown (protein for | Homo sapiens |
| | | | | MGC: 9372) | |
| 1004 | X79066 | 1692 | 99 | ERF-1 | Homo sapiens |
| 1004 | X99404 | 1684 | 99 | Berg36 | Homo sapiens |
| 1005 | AB055977 | 492 | 93 | I3 protein | Homo sapiens |
| 1005 | AF041430 | 492 | 93 | pRGR2 | Homo sapiens |
| 1005 | AF106966 | 492 | 93 | I3 protein | Homo sapiens |
| 1006 | AAH14438 | 1018 | 100 | BC014438 Unknown (protein for | Homo sapiens |
| | | | | MGC: 22947) | |
| 1006 | AE006639_3 | 1018 | 100 | AE006639 HN1 like | Homo sapiens |
| 1006 | AK023154 | 1018 | 100 | unnamed protein product | Homo sapiens |
| 1007 | J03779 | 3944 | 100 | common acute lymphoblastic | Homo sapiens |
| | | | | leukemia antigen precursor | |
| 1007 | M26628 | 3919 | 99 | enkephalinase | Homo sapiens |
| 1007 | Y00811 | 3919 | 99 | CALLA protein (AA 1-750) | Homo sapiens |
| 1008 | AB035304 | 4092 | 100 | cadherin-5 | Homo sapiens |
| 1008 | U84722 | 4086 | 99 | vascular endothelial cadherin | Homo sapiens |
| 1008 | X79981 | 4092 | 100 | VE-cadherin | Homo sapiens |
| 1009 | AX019983 | 739 | 100 | unnamed protein product | Homo sapiens |
| 1009 | BC026254 | 739 | 100 | insulin-like 4 (placenta) | Homo sapiens |
| 1009 | L34838 | 739 | 100 | EPIL | Homo sapiens |
| 1010 | AF139894_1 | 1813 | 100 | AF139894 RNA-binding protein | Mus musculus |
| | | | | alpha-CP1 | |
| 1010 | AF139895_1 | 1813 | 100 | AF139895 RNA-binding protein | Mus musculus |
| | | | | alpha-CP1 | |
| 1010 | BC004793 | 1813 | 100 | poly (rC)-binding protein 1 | Mus musculus |
| 1011 | U12390 | 366 | 88 | beta-galactosidase alpha peptide | Cloning |
| | | | | | vector |
| | | | | | pSport1 |
| 1011 | U12391 | 355 | 88 | beta-galactosidase alpha peptide | Cloning |
| | | | | | vector |
| | | | | | pSport2 |
| 1011 | Y14836 | 290 | 77 | beta-galactosidase | Phagemid |
| | | | | | cloning |
| | | | | | vector |
| | | | | | pTZ19U |
| 1012 | AF218012_1 | 1751 | 100 | AF218012 unknown | Homo sapiens |
| 1012 | AF218030_1 | 1751 | 100 | AF218030 unknown | Homo sapiens |
| 1012 | AL121586 | 2000 | 88 | dJ47704.1.1 (novel protein | Homo sapiens |
| | | | | similar to otoferlin and | |
| | | | | dysferlin, isoform 1) | |
| 1013 | AAH00352 | 1286 | 100 | BC000352 proteasome (prosome, | Homo sapiens |
| | | | | macropain) activator subunit 1 | |
| | | | | (PA28 alpha) | |
| 1013 | AAH07503 | 1286 | 100 | BC007503 proteasome (prosome, | Homo sapiens |
| | | | | macropain) activator subunit 1 | |
| | | | | (PA28 alpha) | |
| 1013 | AF078829_1 | 1286 | 100 | AF078829 proteasome activator | Homo sapiens |
| | | | | PA28 alpha | |
| 1014 | AAH16155 | 521 | 89 | BC016155 Ras homolog enriched in | Homo sapiens |
| | | | | brain 2 | |
| 1014 | AF493921_1 | 521 | 89 | AF493921 Ras family small GTP | Homo sapiens |
| | | | | binding protein RHEB2 | |
| 1014 | Z29677 | 521 | 89 | Ras-related GTP-binding protein | Homo sapiens |
| 1015 | AAH10423 | 2657 | 100 | BC010423 Ig superfamily receptor | Homo sapiens |
| | | | | LNIR | |
| 1015 | AF160477_1 | 2655 | 99 | AF160477 Ig superfamily receptor | Homo sapiens |
| | | | | LNIR precursor | |
| 1015 | AF426163_1 | 2657 | 100 | AF426163 nectin 4 | Homo sapiens |
| 1016 | AJ295142 | 3578 | 99 | C1q receptor protein | Homo sapiens |
| 1016 | BC028075 | 3577 | 99 | complement component 1, q | Homo sapiens |
| | | | | subcomponent, receptor 1 | |
| 1016 | U94333 | 3587 | 100 | C1qR(p) | Homo sapiens |
| 1017 | AAH14271 | 3392 | 100 | BC014271 endoglin (Osler-Rendu- | Homo sapiens |
| | | | | Weber syndrome 1) | |
| 1017 | J05481 | 3319 | 99 | endoglin precursor | Homo sapiens |
| 1017 | U37439 | 3385 | 99 | endoglin | Homo sapiens |
| 1018 | AAH07411 | 540 | 86 | BC007411 Unknown (protein for | Homo sapiens |
| | | | | MGC: 2554) | |
| 1018 | AF051782 | 536 | 85 | diaphanous 1 | Homo sapiens |
| 1018 | U96963 | 495 | 80 | p140mDia | Mus musculus |
| 1019 | AF151966_1 | 1875 | 66 | AF151966 GTPase activating | Gallus |
| | | | | protein Rap1-GAP | gallus |
| 1019 | BC030891 | 2109 | 95 | Unknown (protein for | Mus musculus |
| | | | | IMAGE: 4485689) | |
| 1019 | M64788 | 3477 | 100 | GTPase activating protein | Homo sapiens |
| 1020 | AX206708 | 1968 | 100 | unnamed protein product | Homo sapiens |
| 1020 | M92934 | 1968 | 100 | connective tissue growth factor | Homo sapiens |
| 1020 | X78947 | 1968 | 100 | connective tissue growth factor | Homo sapiens |
| 1021 | AAH18823 | 849 | 100 | BC018823 Unknown (protein for | Homo sapiens |
| | | | | MGC: 1236) | |
| 1021 | AK007729 | 809 | 97 | unnamed protein product | Mus musculus |
| 1021 | U30826 | 849 | 100 | SRp40-1 | Homo sapiens |
| 1022 | AAH07333 | 2823 | 100 | BC007333 ets variant gene 5 (ets- | Homo sapiens |
| | | | | related molecule) | |
| 1022 | X76184 | 2823 | 100 | ets-related protein | Homo sapiens |
| 1022 | X96381 | 2823 | 100 | erm | Homo sapiens |
| 1023 | AAH02599 | 996 | 99 | BC002599 corticotropin releasing | Homo sapiens |
| | | | | hormone | |
| 1023 | AAH11031 | 996 | 99 | BC011031 Similar to corticotropin | Homo sapiens |
| | | | | releasing hormone | |
| 1023 | V00571 | 996 | 99 | corticotropin releasing factor | Homo sapiens |
| 1024 | AK007731 | 1164 | 94 | unnamed protein product | Mus musculus |
| 1024 | AL110239 | 1234 | 99 | hypothetical protein | Homo sapiens |
| 1024 | AX399865 | 1355 | 100 | unnamed protein product | Homo sapiens |
| 1025 | AAH00732 | 1553 | 100 | BC000732 glioblastoma amplified | Homo sapiens |
| | | | | sequence | |
| 1025 | AAH01837 | 1553 | 100 | BC001837 glioblastoma amplified | Homo sapiens |
| | | | | sequence | |
| 1025 | BC030821 | 1553 | 100 | glioblastoma amplified sequence | Homo sapiens |
| 1026 | AAH01483 | 2103 | 100 | BC001483 Unknown (protein for | Homo sapiens |
| | | | | MGC: 1364) | |
| 1026 | AAH09241 | 2103 | 100 | BC009241 Unknown (protein for | Homo sapiens |
| | | | | MGC: 3556) | |
| 1026 | BC023599 | 2103 | 100 | TRK-fused gene | Homo sapiens |
| 1027 | AAH12806 | 3278 | 100 | BC012806 solute carrier family 5 | Homo sapiens |
| | | | | (sodium-dependent vitamin | |
| | | | | transporter), member 6 | |
| 1027 | AAH15631 | 3278 | 100 | BC015631 solute carrier family 5 | Homo sapiens |
| | | | | (sodium-dependent vitamin | |
| | | | | transporter), member 6 | |
| 1027 | AF116241 | 3272 | 99 | sodium-dependent multivitamin | Homo sapiens |
| | | | | transporter | |
| 1029 | AAH04324 | 744 | 100 | BC004324 ribosomal protein S16 | Homo sapiens |
| 1029 | AAH07977 | 744 | 100 | BC007977 ribosomal protein S16 | Homo sapiens |
| 1029 | X17665 | 744 | 100 | ribosomal protein S16 (AA 1-146) | Rattus |
| | | | | | Rattus |
| 1030 | AB047555 | 624 | 90 | IZP6 | Mus musculus |
| | | | | | musculus |
| 1030 | AK007948 | 624 | 90 | unnamed protein product | Mus musculus |
| 1030 | BC004729 | 624 | 90 | RIKEN cDNA 1810063P04 gene | Mus musculus |
| 1031 | BC003337 | 1957 | 100 | actin, gamma 1 | Mus musculus |
| 1031 | BC021796 | 1957 | 100 | actin, gamma 1 | Mus musculus |
| 1031 | BC023248 | 1957 | 100 | actin, gamma, cytoplasmic | Mus musculus |
| 1032 | AAH11700 | 2048 | 100 | BC011700 glutamate-ammonia ligase | Homo sapiens |
| | | | | (glutamine synthase) | |
| 1032 | AAH11852 | 2048 | 100 | BC011852 glutamate-ammonia ligase | Homo sapiens |
| | | | | (glutamine synthase) | |
| 1032 | AAH18992 | 2048 | 100 | BC018992 Unknown (protein for | Homo sapiens |
| | | | | MGC: 20095) | |
| 1033 | AF234654_1 | 1155 | 100 | AF234654 PLAC1 | Homo sapiens |
| 1033 | AK075086 | 1155 | 100 | unnamed protein product | Homo sapiens |
| 1033 | BC022335 | 1155 | 100 | placenta-specific 1 | Homo sapiens |
| 1034 | AAB67977 | 4108 | 99 | AF019413 complement factor B | Homo sapiens |
| 1034 | AAH04143 | 4121 | 100 | BC004143 B-factor, properdin | Homo sapiens |
| 1034 | AAH07990 | 4121 | 100 | BC007990 B-factor, properdin | Homo sapiens |
| 1035 | AAH17399 | 355 | 98 | BC017399 Similar to RIKEN cDNA | Homo sapiens |
| | | | | 1810037I17 gene | |
| 1035 | AK007721 | 236 | 68 | unnamed protein product | Mus musculus |
| 1035 | BC002135 | 236 | 68 | Unknown (protein for MGC: 7243) | Mus musculus |
| 1036 | AAH13383 | 1701 | 100 | BC013383 calumenin | Homo sapiens |
| 1036 | AF013759 | 1701 | 100 | calumein | Homo sapiens |
| 1036 | U67280 | 1695 | 99 | calumenin | Homo sapiens |
| 1037 | AF069065 | 596 | 97 | inducible cAMP early repressor | Homo sapiens |
| | | | | type 1 | |
| 1037 | AJ311667 | 588 | 95 | induced cAMP early repressor, | Mus musculus |
| | | | | ICER I | |
| 1037 | D14826 | 608 | 100 | hCREM 2alpha-a protein | Homo sapiens |
| 1038 | AAH00452 | 1043 | 100 | BC000452 Similar to thioredoxin | Homo sapiens |
| | | | | peroxidase 1 | |
| 1038 | AAH03022 | 1043 | 100 | BC003022 Similar to thioredoxin | Homo sapiens |
| | | | | peroxidase 1 | |
| 1038 | BC039428 | 1043 | 100 | Similar to peroxiredoxin 2 | Homo sapiens |
| 1039 | AB056107 | 2995 | 100 | zinc finger protein homologous to | Homo sapiens |
| | | | | mouse Zfp91 | |
| 1039 | AB057443 | 2775 | 100 | testis specific ZFP91 | Homo sapiens |
| 1039 | AF310246_1 | 2586 | 99 | AF310246 FKSG11 | Homo sapiens |
| 1040 | AF023476 | 4954 | 100 | meltrin-L precursor | Homo sapiens |
| 1040 | AF023477 | 3855 | 99 | meltrin-S | Homo sapiens |
| 1040 | D50411 | 3939 | 80 | meltrin alpha | Mus musculus |
| 1041 | AF154121_1 | 3126 | 100 | AF154121 sodium-dependent high- | Homo sapiens |
| | | | | affinity dicarboxylate | |
| | | | | transporter | |
| 1041 | AY072810 | 3057 | 98 | energy metabolism-related sodium- | Homo sapiens |
| | | | | dependent high-affinity | |
| | | | | dicarboxylate transporter | |
| 1041 | BC035966 | 3056 | 98 | similar to solute carrier family | Homo sapiens |
| | | | | 13 (sodium-dependent | |
| | | | | dicarboxylate transporter), | |
| | | | | member 3 | |
| 1042 | AF400594 | 687 | 64 | endothelial nitric oxide synthase | Homo sapiens |
| 1042 | AF519768_1 | 687 | 64 | AF519768 nitric oxide synthase 3 | Homo sapiens |
| | | | | (endothelial cell) | |
| 1042 | L26914 | 687 | 64 | nitric oxide synthase | Homo sapiens |
| 1043 | AAH01462 | 1835 | 100 | BC001462 protease, serine, 8 | Homo sapiens |
| | | | | (prostasin) | |
| 1043 | L41351 | 1835 | 100 | prostasin | Homo sapiens |
| 1043 | U33446 | 1835 | 100 | prostasin | Homo sapiens |
| 1044 | AB051442 | 304 | 71 | KIAA1655 protein | Homo sapiens |
| 1044 | AK090913 | 358 | 64 | unnamed protein product | Homo sapiens |
| 1044 | BC024651 | 276 | 76 | similar to PRO2550 | Homo sapiens |
| 1045 | AF346465 | 7291 | 91 | latent transforming growth factor | Mus musculus |
| | | | | beta binding protein 1S | |
| 1045 | AF489528_1 | 7887 | 99 | AF489528 transforming growth | Homo sapiens |
| | | | | factor-beta binding protein-1S | |
| 1045 | M34057 | 7903 | 100 | transforming growth factor-beta 1 | Homo sapiens |
| | | | | binding protein precursor | |
| 1046 | AY004254 | 1199 | 90 | endoplasmic reticulum protein 29 | Rattus |
| | | | | precursor | norvegicus |
| 1046 | X94910 | 1334 | 100 | ERp28 | Homo sapiens |
| 1046 | Y10264 | 1199 | 90 | ERp29 precursor | Rattus |
| | | | | | norvegicus |
| 1047 | AF119917_58 | 250 | 100 | AF119896 PRO2751 | Homo sapiens |
| 1048 | AB020692 | 4158 | 100 | KIAA0885 protein | Homo sapiens |
| 1048 | BC016898 | 4107 | 98 | Unknown (protein for MGC: 19174) | Mus musculus |
| 1048 | X52311 | 4102 | 98 | unr protein (AA 1-798) | Rattus |
| | | | | | norvegicus |
| 1050 | AL049698 | 7034 | 98 | dJ470B24.1.3 (myeloid/lymphoid or | Homo sapiens |
| | | | | mixed-lineage leukemia (trithorax | |
| | | | | (Drosophila) homolog); | |
| | | | | translocated to, 4 (AF-6) | |
| | | | | (isoform 3)) | |
| 1050 | AL049698 | 7050 | 98 | dJ470B24.1.5 (myeloid/lymphoid or | Homo sapiens |
| | | | | mixed-lineage leukemia (trithorax | |
| | | | | (Drosophila) homolog); | |
| | | | | translocated to, 4 (AF-6) | |
| | | | | (isoform 5)) | |
| 1050 | AL161973 | 7363 | 100 | hypothetical protein | Homo sapiens |
| 1051 | AAH21288 | 2134 | 100 | BC021288 Unknown (protein for | Homo sapiens |
| | | | | MGC: 29494) | |
| 1051 | J03263 | 1934 | 98 | membrane glycoprotein | Homo sapiens |
| 1051 | J04182 | 2041 | 96 | lysosomal membrane glycoprotein-1 | Homo sapiens |
| 1052 | AC002400 | 817 | 100 | Acyl carrier protein, | Homo sapiens |
| | | | | Mitochondrial (ACP) (5′partial) | |
| 1052 | AF087660_1 | 788 | 100 | AF087660 NADH: ubiquinone | Homo sapiens |
| | | | | oxidoreductase SDAP subunit | |
| 1052 | AK018717 | 672 | 85 | unnamed protein product | Mus musculus |
| 1053 | AB031550 | 1490 | 95 | pctp-L | Mus musculus |
| 1053 | AF151810_1 | 1853 | 98 | AF151810 CGI-52 protein | Homo sapiens |
| 1053 | Z81134 | 477 | 41 | Hypothetical protein T28D6.7 | Caenorhabditis |
| | | | | | elegans |
| 1055 | AAH09392 | 5306 | 99 | BC009392 Unknown (protein for | Homo sapiens |
| | | | | MGC: 15329) | |
| 1055 | AB011149 | 5318 | 100 | KIAA0577 protein | Homo sapiens |
| 1055 | AP000512 | 5318 | 100 | RNA helicase | Homo sapiens |
| 1056 | AAH08751 | 3757 | 99 | BC008751 calpain 1, (mu/I) large | Homo sapiens |
| | | | | subunit | |
| 1056 | AAH17200 | 3762 | 100 | BC017200 calpain 1, (mu/I) large | Homo sapiens |
| | | | | subunit | |
| 1056 | X04366 | 3762 | 100 | CANP, large subunit (aa 1-714) | Homo sapiens |
| 1057 | AB093679 | 740 | 100 | ribosomal protein L26 | Macaca |
| | | | | | fascicularis |
| 1057 | X69392 | 740 | 100 | ribosomal protein L26 | Homo sapiens |
| 1057 | X80699 | 740 | 100 | L26 | Mus musculus |
| 1058 | AAH06391 | 1974 | 100 | BC006391 inhibin, alpha | Homo sapiens |
| 1058 | M13981 | 1974 | 100 | inhibin A-subunit precursor | Homo sapiens |
| 1058 | X04445 | 1974 | 100 | preproinhibin | Homo sapiens |
| 1059 | AK000385 | 267 | 65 | unnamed protein product | Homo sapiens |
| 1059 | AK092450 | 270 | 58 | unnamed protein product | Homo sapiens |
| 1059 | AK097214 | 354 | 74 | unnamed protein product | Homo sapiens |
| 1060 | AF130117_48 | 357 | 77 | AF130089 PRO2550 | Homo sapiens |
| 1060 | AK000385 | 363 | 75 | unnamed protein product | Homo sapiens |
| 1060 | U22376 | 327 | 76 | alternatively spliced product | Homo sapiens |
| | | | | using exon 13A | |
| 1061 | AF090930_1 | 172 | 51 | AF090930 PRO0478 | Homo sapiens |
| 1061 | AX399919 | 158 | 68 | unnamed protein product | Homo sapiens |
| 1062 | AF063591_1 | 1401 | 99 | AF063591 brain my033 protein | Homo sapiens |
| 1062 | BC022522 | 1411 | 100 | antigen identified by monoclonal | Homo sapiens |
| | | | | antibody MRC OX-2 | |
| 1062 | BC031103 | 1411 | 100 | antigen identified by monoclonal | Homo sapiens |
| | | | | antibody MRC OX-2 | |
| 1063 | AAH00692 | 2582 | 100 | BC000692 Similar to | Homo sapiens |
| | | | | hyaluronoglucosaminidase 2 | |
| 1063 | AC002455 | 2579 | 99 | human PH-20 homolog (LUCA-2) | Homo sapiens |
| 1063 | U09577 | 2579 | 99 | lysosomal hyaluronidase | Homo sapiens |
| 1064 | AAH02700 | 2294 | 100 | BC002700 Similar to keratin 7 | Homo sapiens |
| 1064 | AF509887 | 2294 | 100 | keratin 7 | Homo sapiens |
| 1064 | AF509892 | 2294 | 100 | keratin 7 | Homo sapiens |
| 1065 | AF523361_1 | 1951 | 99 | AF523361 CD34 antigen | Homo sapiens |
| 1065 | M81945 | 1955 | 100 | hematopoietic stem cell antigen | Homo sapiens |
| 1065 | S53910 | 1951 | 99 | CD34 | Homo sapiens |
| 1066 | AB037891 | 493 | 100 | Bc10 | Mus musculus |
| 1066 | AF303656_1 | 493 | 100 | AF303656 bladder cancer-related | Mus musculus |
| | | | | protein | |
| 1066 | BC026935 | 493 | 100 | bladder cancer associated protein | Mus musculus |
| 1067 | AF322909 | 3026 | 100 | transmembrane glycoprotein HGFIN | Homo sapiens |
| 1067 | BC032783 | 3003 | 97 | Similar to glycoprotein | Homo sapiens |
| | | | | (transmembrane) nmb | |
| 1067 | X76534 | 3026 | 100 | NMB | Homo sapiens |
| 1068 | AAH17352 | 3091 | 100 | BC017352 Unknown (protein for | Homo sapiens |
| | | | | MGC: 29525) | |
| 1068 | AF230388_1 | 3085 | 99 | AF230388 tripartite motif protein | Homo sapiens |
| | | | | TRIM29 alpha | |
| 1068 | L24203 | 3085 | 99 | ataxia-telangiectasia group D- | Homo sapiens |
| | | | | associated protein | |
| 1069 | AK003609 | 1032 | 99 | unnamed protein product | Mus musculus |
| 1069 | AL136635 | 1039 | 100 | hypothetical protein | Homo sapiens |
| 1069 | BC016408 | 1032 | 99 | RIKEN cDNA 1110011F09 gene | Mus musculus |
| 1070 | AF073310 | 7103 | 100 | insulin receptor substrate-2 | Homo sapiens |
| 1070 | AF385932_1 | 7014 | 99 | AF385932 insulin receptor | Homo sapiens |
| | | | | substrate 2 insertion mutant | |
| 1070 | AF385933_1 | 7026 | 99 | AF385933 insulin receptor | Homo sapiens |
| | | | | substrate 2 insertion mutant | |
| 1071 | AAH09586 | 2198 | 91 | BC009586 Unknown (protein for | Homo sapiens |
| | | | | MGC: 14649) | |
| 1071 | D26485 | 2198 | 91 | core I protein | Homo sapiens |
| 1071 | L16842 | 2193 | 90 | ubiquinol-cytochrome c reductase | Homo sapiens |
| | | | | core I protein | |
| 1072 | AF062534 | 1919 | 100 | genethonin 1 | Homo sapiens |
| 1072 | AK050416 | 1083 | 62 | unnamed protein product | Mus musculus |
| 1072 | BC022301 | 1919 | 100 | genethonin 1 | Homo sapiens |
| 1073 | AAH08950 | 956 | 100 | BC008950 Unknown (protein for | Homo sapiens |
| | | | | MGC: 3593) | |
| 1073 | AF112202_1 | 956 | 100 | AF112202 prenylated rab acceptor 1 | Homo sapiens |
| 1073 | AJ133534 | 951 | 99 | prenylated Rab acceptor 1 (PRA1) | Homo sapiens |
| 1074 | AAH14257 | 888 | 100 | BC014257 Similar to DKFZp564J157 | Homo sapiens |
| | | | | protein | |
| 1074 | AAH16064 | 888 | 100 | BC016064 DKFZp564J157 protein | Homo sapiens |
| 1074 | AX405840 | 888 | 100 | unnamed protein product | Homo sapiens |
| 1075 | AAH02394 | 2275 | 100 | BC002394 ceroid-lipofuscinosis, | Homo sapiens |
| | | | | neuronal 3, juvenile (Batten, | |
| | | | | Spielmeyer-Vogt disease) | |
| 1075 | AAH04433 | 2275 | 100 | BC004433 ceroid-lipofuscinosis, | Homo sapiens |
| | | | | neuronal 3, juvenile (Batten, | |
| | | | | Spielmeyer-Vogt disease) | |
| 1075 | U32680 | 2275 | 100 | CLN3 protein | Homo sapiens |
| 1076 | AF443072_1 | 20090 | 99 | AF443072 laminin alpha5 chain | Homo sapiens |
| | | | | precursor | |
| 1076 | AL354836 | 20063 | 99 | bA157P1.1.1 (laminin alpha 5) | Homo sapiens |
| 1076 | AX463738 | 20090 | 99 | laminin 5 | Homo sapiens |
| 1077 | BC024366 | 703 | 100 | ribosomal protein L27 | Mus musculus |
| 1077 | X07424 | 703 | 100 | ribosomal protein L27 (AA 1-136) | Rattus |
| | | | | | norvegicus |
| 1077 | X56852 | 703 | 100 | ribosomal protein L27 | Gallus |
| | | | | | gallus |
| 1078 | AAH13131 | 969 | 100 | BC013131 Similar to hypothetical | Homo sapiens |
| | | | | protein FLJ10702 | |
| 1078 | AK001564 | 969 | 100 | unnamed protein product | Homo sapiens |
| 1078 | BC013719 | 969 | 100 | hypothetical protein FLJ10702 | Mus musculus |
| 1079 | AF214737_1 | 5676 | 100 | AF214737 C9orf10a | Homo sapiens |
| 1079 | BC010304 | 3765 | 93 | Unknown (protein for | Mus musculus |
| | | | | IMAGE: 3597827) | |
| 1079 | D80005 | 5676 | 100 | KIAA0183 | Homo sapiens |
| 1080 | AF113127_1 | 1186 | 99 | AF113127 S1R protein | Homo sapiens |
| 1080 | AF151877_1 | 1242 | 99 | AF151877 CGI-119 protein | Homo sapiens |
| 1080 | AF182041_1 | 1186 | 99 | AF182041 z-protein | Homo sapiens |
| 1081 | AAH11616 | 1514 | 100 | BC011616 Similar to cyclin D3 | Homo sapiens |
| 1081 | AF517525_1 | 1511 | 99 | AF517525 cyclin D3 | Homo sapiens |
| 1081 | M92287 | 1514 | 100 | cyclin D3 | Homo sapiens |
| 1082 | AAH11581 | 4280 | 100 | BC011581 Similar to oxysterol | Homo sapiens |
| | | | | binding protein | |
| 1082 | AF185696_1 | 4280 | 100 | AF185696 oxysterol-binding | Homo sapiens |
| | | | | protein 1 | |
| 1082 | AF185705 | 4280 | 100 | oxysterol binding protein 1 | Homo sapiens |
| 1083 | AJ133816 | 1566 | 36 | viral polypeptide | Porcine |
| | | | | | endogenous |
| | | | | | retrovirus |
| 1083 | D10032 | 1645 | 37 | gag-pol precursor polyprotein | Baboon |
| | | | | | endogenous |
| | | | | | virus strain |
| | | | | | M7 |
| 1083 | M26927 | 1571 | 36 | pol polyprotein | Gibbon ape |
| | | | | | leukemia |
| | | | | | virus |
| 1084 | AF012920 | 625 | 100 | GEC-1 | Cavia |
| | | | | | porcellus |
| 1084 | AF312680 | 625 | 100 | GEC-1 | Cavia |
| | | | | | porcellus |
| 1084 | BC004602 | 625 | 100 | RIKEN cDNA 9130422N19 gene | Mus musculus |
| 1085 | AAH14241 | 1733 | 100 | BC014241 Similar to hypothetical | Homo sapiens |
| | | | | protein, MGC: 7035 | |
| 1085 | AB093636 | 1687 | 96 | hypothetical protein | Macaca |
| | | | | | fascicularis |
| 1085 | AK046512 | 1274 | 74 | unnamed protein product | Mus musculus |
| 1086 | AF140240_1 | 749 | 100 | AF140240 transcription factor | Homo sapiens |
| | | | | TBX3 | |
| 1086 | AK075457 | 749 | 100 | unnamed protein product | Homo sapiens |
| 1086 | BC025258 | 749 | 100 | T-box 3 (ulnar mammary syndrome) | Homo sapiens |
| 1087 | AK025047 | 331 | 68 | unnamed protein product | Homo sapiens |
| 1087 | AK025116 | 330 | 67 | unnamed protein product | Homo sapiens |
| 1087 | AK090511 | 365 | 72 | unnamed protein product | Homo sapiens |
| 1088 | AAH01863 | 320 | 100 | BC001863 hypoxia-inducible | Homo sapiens |
| | | | | protein 2 | |
| 1088 | AF144755_1 | 320 | 100 | AF144755 hypoxia-inducible | Homo sapiens |
| | | | | protein 2 | |
| 1088 | AX105363 | 320 | 100 | unnamed protein product | Homo sapiens |
| 1089 | AAH00718 | 1965 | 98 | BC000718 Similar to dynamitin | Homo sapiens |
| | | | | (dynactin complex 50 kD subunit) | |
| 1089 | AAH09468 | 1965 | 98 | BC009468 dynactin 2 (p50) | Homo sapiens |
| 1089 | AAH14083 | 1965 | 98 | BC014083 dynactin 2 (p50) | Homo sapiens |
| 1090 | AB037669 | 2790 | 100 | L-type amino acid transporter 2 | Homo sapiens |
| 1090 | AF171669_1 | 2790 | 100 | AF171669 glycoprotein-associated | Homo sapiens |
| | | | | amino acid transporter LAT2 | |
| 1090 | Y18483 | 2778 | 99 | SLC7A8 protein | Homo sapiens |
| 1091 | AAH16905 | 228 | 62 | BC016905 Similar to hypothetical | Homo sapiens |
| | | | | protein PRO1722 | |
| 1091 | AF118094_21 | 261 | 65 | AF118082 PRO1902 | Homo sapiens |
| 1091 | AK090913 | 202 | 59 | unnamed protein product | Homo sapiens |
| 1092 | AK075392 | 1588 | 99 | unnamed protein product | Homo sapiens |
| 1092 | AX136157 | 1588 | 99 | unnamed protein product | Homo sapiens |
| 1092 | AX179293 | 1591 | 99 | 21676 ADH | Homo sapiens |
| 1093 | AAH13985 | 2426 | 91 | BC013985 PC2 (positive cofactor | Homo sapiens |
| | | | | 2, multiprotein complex) | |
| | | | | glutanine/Q-rich-associated | |
| | | | | protein | |
| 1093 | AK090465 | 2677 | 99 | FLJ00386 protein | Homo sapiens |
| 1093 | BC017110 | 2677 | 99 | Unknown (protein for MGC: 16010) | Homo sapiens |
| 1094 | AAH10514 | 2363 | 100 | BC010514 clusterin (complement | Homo sapiens |
| | | | | lysis inhibitor, SP-40,40, | |
| | | | | sulfated glycoprotein 2, | |
| | | | | testosterone-repressed prostate | |
| | | | | message 2, apolipoprotein J) | |
| 1094 | AAH19588 | 2363 | 100 | BC019588 clusterin (complement | Homo sapiens |
| | | | | lysis inhibitor, SP-40,40, | |
| | | | | sulfated glycoprotein 2, | |
| | | | | testosterone-repressed prostate | |
| | | | | message 2, apolipoprotein J) | |
| 1094 | X14723 | 2363 | 100 | SP-40,40 prepropetide (AA −22 to | Homo sapiens |
| | | | | 427) | |
| 1095 | AAH06786 | 1161 | 100 | BC006786 cellular repressor of | Homo sapiens |
| | | | | E1A-stimulated genes | |
| 1095 | AAH08628 | 1161 | 100 | BC008628 cellular repressor of | Homo sapiens |
| | | | | E1A-stimulated genes | |
| 1095 | AF084523 | 1161 | 100 | cellular repressor of E1A- | Homo sapiens |
| | | | | stimulated genes CREG | |
| 1096 | AX167114 | 8220 | 99 | unnamed protein product | Homo sapiens |
| 1096 | BC036531 | 8206 | 99 | Unknown (protein for MGC: 33668) | Homo sapiens |
| 1096 | Z74615 | 8220 | 99 | prepro-alpha1 (I) collagen | Homo sapiens |
| 1097 | AB025412 | 5671 | 98 | Ten-m3 | Mus musculus |
| 1097 | AF195418_1 | 5676 | 99 | AF195418 ODZ3 | Mus musculus |
| 1097 | AK001336 | 5447 | 100 | unnamed protein product | Homo sapiens |
| 1098 | AAH03550 | 1419 | 100 | BC003550 Similar to CGI-20 | Homo sapiens |
| | | | | protein | |
| 1098 | AF132954_1 | 1577 | 99 | AF132954 CGI-20 protein | Homo sapiens |
| 1098 | AK003551 | 1613 | 95 | unnamed protein product | Mus musculus |
| 1099 | BC022512 | 244 | 96 | platelet/endothelial cell | Homo sapiens |
| | | | | adhesion molecule (CD31 antigen) | |
| 1099 | L34657 | 244 | 96 | platelet endothelial cell | Homo sapiens |
| | | | | adhesion molecule-1 | |
| 1099 | M28526 | 244 | 96 | PECAM-1 precursor | Homo sapiens |
| 1100 | AAH12138 | 1849 | 100 | BC012138 Similar to guanine | Homo sapiens |
| | | | | nucleotide binding protein (G | |
| | | | | protein), alpha inhibiting | |
| | | | | activity polypeptide 2 | |
| 1100 | AF493906_1 | 1849 | 100 | AF493906 guanine nucleotide | Homo sapiens |
| | | | | binding protein alpha i2 | |
| 1100 | X04828 | 1849 | 100 | G protein alpha-subunit (AA 1-355) | Homo sapiens |
| 1101 | AF081258_1 | 3091 | 100 | AF081258 testis-specific | Homo sapiens |
| | | | | chromodomain Y-like protein | |
| 1101 | AF081259_1 | 3091 | 100 | AF081259 testis-specific | Homo sapiens |
| | | | | chromodomain Y-like protein | |
| 1101 | AF081261_1 | 2614 | 88 | AF081261 testis-specific | Mus musculus |
| | | | | chromodomain Y-like protein | |
| 1102 | AF162856_1 | 5147 | 65 | AF162856 receptor-like protein | Mus musculus |
| | | | | tyrosine phosphatase rho-1 | |
| 1102 | X58287 | 7569 | 97 | protein-tyrosine phosphatase | Mus musculus |
| 1102 | X58288 | 7731 | 99 | protein-tyrosine phosphatase | Homo sapiens |
| 1103 | AK097965 | 330 | 74 | unnamed protein product | Homo sapiens |
| 1103 | AX400008 | 319 | 69 | unnamed protein product | Homo sapiens |
| 1103 | BC033959 | 362 | 79 | similar to Alu subfamily SQ | Homo sapiens |
| | | | | sequence contamination warning | |
| | | | | entry | |
| 1104 | AAH18991 | 1272 | 100 | BC018991 hepatoma-derived growth | Homo sapiens |
| | | | | factor (high-mobility group | |
| | | | | protein 1-like) | |
| 1104 | AJ237996 | 1205 | 95 | hepatoma derived growth factor | Bos taurus |
| 1104 | D16431 | 1272 | 100 | hepatoma-derived GF | Homo sapiens |
| 1105 | AAH17197 | 1785 | 99 | BC017197 myeloid cell leukemia | Homo sapiens |
| | | | | sequence 1 (BCL2-related) | |
| 1105 | AF147742_1 | 1785 | 99 | AF147742 myeloid cell | Homo sapiens |
| | | | | differentiation protein | |
| 1105 | AF162677 | 1785 | 99 | myeloid cell leukemia protein 1 | Homo sapiens |
| 1106 | AF274892 | 2520 | 100 | glucose transporter 3 | Homo sapiens |
| 1106 | BC039196 | 2520 | 100 | solute carrier family 2 | Homo sapiens |
| | | | | (facilitated glucose | |
| | | | | transporter), member 3 | |
| 1106 | M20681 | 2520 | 100 | glucose transporter-like protein | Homo sapiens |
| 1107 | AAH00730 | 3448 | 100 | BC000730 calpain 6 | Homo sapiens |
| 1107 | AJ000388 | 3439 | 99 | calpain-like protease, CANPX | Homo sapiens |
| 1107 | AL031117 | 3448 | 100 | dJ914P14.1 (calpain-like protease | Homo sapiens |
| | | | | CANPX) | |
| 1108 | AAH03143 | 1980 | 100 | BC003143 dual specificity | Homo sapiens |
| | | | | phosphatase 6 | |
| 1108 | AAH03562 | 1980 | 100 | BC003562 dual specificity | Homo sapiens |
| | | | | phosphatase 6 | |
| 1108 | X93920 | 1980 | 100 | protein-tyrosine-phosphatase | Homo sapiens |
| 1109 | AB023194 | 6006 | 100 | KIAA0977 protein | Homo sapiens |
| 1109 | AK052533 | 3549 | 61 | unnamed protein product | Mus musculus |
| 1109 | AL049939 | 1823 | 99 | hypothetical protein | Homo sapiens |
| 1110 | AAH15031 | 4447 | 100 | BC015031 Unknown (protein for | Homo sapiens |
| | | | | MGC: 9105) | |
| 1110 | AB018266 | 4447 | 100 | KIAA0723 protein | Homo sapiens |
| 1110 | BC029070 | 4375 | 98 | Similar to matrin 3 | Mus musculus |
| 1111 | AAH18726 | 1229 | 100 | BC018726 CD74 antigen (invariant | Homo sapiens |
| | | | | polypeptide of major | |
| | | | | histocompatibility complex, class | |
| | | | | II antigen-associated) | |
| 1111 | M13560 | 1229 | 100 | cell surface glycoprotein | Homo sapiens |
| 1111 | X00497 | 1229 | 100 | putative p33 | Homo sapiens |
| 1112 | AF114262_3 | 2305 | 88 | AF114260 forkhead protein AFXH | Mus musculus |
| 1112 | X93996 | 2624 | 100 | AFX | Homo sapiens |
| 1112 | Y11284 | 2489 | 97 | AFX1 | Homo sapiens |
| 1113 | AAH09409 | 1688 | 100 | BC009409 Unknown (protein for | Homo sapiens |
| | | | | MGC: 10655) | |
| 1113 | X13425 | 1688 | 100 | GA733-1 protein (AA 1-323) | Homo sapiens |
| 1113 | X77754 | 1688 | 100 | gp50/TROP-2 | Homo sapiens |
| 1114 | AAH02532 | 795 | 100 | BC002532 epididymal secretory | Homo sapiens |
| | | | | protein (19.5 kD) | |
| 1114 | X67698 | 795 | 100 | orf | Homo sapiens |
| 1114 | X78134 | 795 | 100 | epididymal secretory protein 14.6 | Macaca |
| | | | | | fascicularis |
| 1115 | AK075092 | 233 | 100 | unnamed protein product | Homo sapiens |
| 1116 | AAH16692 | 1163 | 100 | BC016692 progesterone receptor | Homo sapiens |
| | | | | membrane component 2 | |
| 1116 | AJ002030 | 1163 | 100 | progresterone binding protein | Homo sapiens |
| 1116 | AY069921 | 525 | 60 | membrane progesterone receptor- | Oncorhynchus |
| | | | | like protein | mykiss |
| 1117 | AAH16041 | 1441 | 100 | BC016041 insulin-like growth | Homo sapiens |
| | | | | factor-binding protein 4 | |
| 1117 | M62403 | 1441 | 100 | IGF-BP 4 | Homo sapiens |
| 1117 | Y12508 | 1441 | 100 | insulin-like growth factor | Homo sapiens |
| | | | | binding protein 4 | |
| 1118 | AK000575 | 734 | 100 | unnamed protein product | Homo sapiens |
| 1118 | AK013438 | 484 | 72 | unnamed protein product | Mus musculus |
| 1118 | AY116892 | 734 | 100 | HCF-1 beta-propeller interacting | Homo sapiens |
| | | | | protein | |
| 1119 | AAH14410 | 2710 | 100 | BC014410 Similar to EGF- | Homo sapiens |
| | | | | containing fibulin-like | |
| | | | | extracellular matrix protein 1 | |
| 1119 | AK077302 | 2581 | 94 | unnamed protein product | Mus musculus |
| 1119 | AY004330 | 2710 | 100 | EGF-containing fibulin-like | Homo sapiens |
| | | | | extracellular matrix protein 1 | |
| 1120 | AF102552 | 11066 | 84 | 270 kDa ankyrin G isoform | Rattus |
| | | | | | norvegicus |
| 1120 | L40632 | 7184 | 95 | ankyrin 3 | Mus musculus |
| 1120 | U13616 | 20107 | 99 | ankyrin G | Homo sapiens |
| 1121 | AC002073 | 3406 | 100 | Lim Kinase | Homo sapiens |
| 1121 | AL117466 | 3183 | 100 | hypothetical protein | Homo sapiens |
| 1121 | D45906 | 3406 | 100 | LIMK-2 | Homo sapiens |
| 1122 | AAH00836 | 633 | 100 | BC000836 CGI-127 protein | Homo sapiens |
| 1122 | AF135161_1 | 633 | 100 | AF135161 unknown | Homo sapiens |
| 1122 | AF151885_1 | 633 | 100 | AF151885 CGI-127 protein | Homo sapiens |
| 1123 | A16768 | 356 | 79 | kunitz type protease inhibitor | synthetic |
| | | | | | construct |
| 1123 | BC033174 | 501 | 98 | Similar to collagen, type VI, | Homo sapiens |
| | | | | alpha 3 | |
| 1123 | X52022 | 501 | 98 | collagen type VI, alpha 3 chain | Homo sapiens |
| 1124 | AAH04440 | 776 | 100 | BC004440 Unknown (protein for | Homo sapiens |
| | | | | MGC: 4033) | |
| 1124 | AAH19336 | 821 | 100 | BC019336 Unknown (protein for | Homo sapiens |
| | | | | IMAGE: 3617778) | |
| 1124 | U91512 | 770 | 99 | ninjurin | Homo sapiens |
| 1125 | AAH18127 | 1250 | 93 | BC018127 Similar to | Homo sapiens |
| | | | | Peptidylglycine alpha-amidating | |
| | | | | monooxygenase | |
| 1125 | AB095007 | 1250 | 93 | peptidylglycine alpha-amidating | Homo sapiens |
| | | | | monooxygenase | |
| 1125 | AF035320 | 1279 | 100 | peptidylglycine alpha-amidating | Homo sapiens |
| | | | | monooxygenase | |
| 1126 | AAH13398 | 6167 | 100 | BC013398 pumilio (Drosophila) | Homo sapiens |
| 1126 | AF315592_1 | 6167 | 100 | AF315592 Pumilio 1 | Homo sapiens |
| 1126 | D43951 | 6233 | 100 | KIAA0099 protein | Homo sapiens |
| 1127 | AAH00465 | 826 | 100 | BC000465 growth arrest and DNA- | Homo sapiens |
| | | | | damage-inducible, gamma | |
| 1127 | AAH19325 | 826 | 100 | BC019325 growth arrest and DNA- | Homo sapiens |
| | | | | damage-inducible, gamma | |
| 1127 | AF494037_1 | 826 | 100 | AF494037 growth arrest and DNA- | Homo sapiens |
| | | | | damage-inducible, gamma | |
| 1128 | AAH01955 | 883 | 100 | BC001955 ribosomal protein S10 | Homo sapiens |
| 1128 | AAH04334 | 883 | 100 | BC004334 ribosomal protein S10 | Homo sapiens |
| 1128 | AAH05012 | 883 | 100 | BC005012 ribosomal protein S10 | Homo sapiens |
| 1129 | AAH12740 | 4687 | 99 | BC012740 Similar to dystroglycan | Homo sapiens |
| | | | | 1 (dystrophin-associated | |
| | | | | glycoprotein 1) | |
| 1129 | AAH14616 | 4687 | 99 | BC014616 Unknown (protein for | Homo sapiens |
| | | | | MGC: 3618) | |
| 1129 | L19711 | 4703 | 100 | dystroglycan | Homo sapiens |
| 1130 | AAH20983 | 978 | 100 | BC020983 pituitary tumor- | Homo sapiens |
| | | | | transforming 1 interacting | |
| | | | | protein | |
| 1130 | BC031097 | 978 | 100 | pituitary tumor-transforming 1 | Homo sapiens |
| | | | | interacting protein | |
| 1130 | BC034250 | 978 | 100 | pituitary tumor-transforming 1 | Homo sapiens |
| | | | | interacting protein | |
| 1131 | AAH07082 | 185 | 100 | BC007082 SWI/SNF related, matrix | Homo sapiens |
| | | | | associated, actin dependent | |
| | | | | regulator of chromatin, subfamily | |
| | | | | e, member 1 | |
| 1131 | AAH11017 | 185 | 100 | BC011017 SWI/SNF related, matrix | Homo sapiens |
| | | | | associated, actin dependent | |
| | | | | regulator of chromatin, subfamily | |
| | | | | e, member 1 | |
| 1131 | AF035262 | 185 | 100 | BAF57 | Homo sapiens |
| 1133 | AF099154 | 13656 | 86 | von Willebrand factor | Canis |
| | | | | | familiaris |
| 1133 | M25865 | 15510 | 99 | von Willebrand factor | Homo sapiens |
| 1133 | X04385 | 15515 | 100 | VWF pre-pro-polypeptide (−22 to | Homo sapiens |
| | | | | 2791) | |
| 1134 | AAH17692 | 3143 | 99 | BC017692 Similar to quiescin Q6 | Homo sapiens |
| 1134 | AF361868 | 3135 | 98 | sulfhydryl oxidase | Homo sapiens |
| 1134 | U97276 | 3911 | 99 | quiescin | Homo sapiens |
| 1136 | AAH12123 | 1528 | 100 | BC012123 golgi phosphoprotein 3 | Homo sapiens |
| 1136 | AJ296152 | 1528 | 100 | Golgi protein | Homo sapiens |
| 1136 | BC033725 | 1528 | 100 | golgi phosphoprotein 3 (coat- | Homo sapiens |
| | | | | protein) | |
| 1137 | AAH08726 | 2687 | 100 | BC008726 oxidative-stress | Homo sapiens |
| | | | | responsive 1 | |
| 1137 | AB017642 | 2687 | 100 | oxidative-stress responsive 1 | Homo sapiens |
| 1137 | AB029024 | 2355 | 100 | KIAA1101 protein | Homo sapiens |
| 1138 | AAH00478 | 3403 | 99 | BC000478 heat shock 70 kD protein | Homo sapiens |
| | | | | 9B (mortalin-2) | |
| 1138 | BC024034 | 3403 | 99 | heat shock 70 kD protein 9B | Homo sapiens |
| | | | | (mortalin-2) | |
| 1138 | BC030634 | 3399 | 99 | heat shock 70 kD protein 9B | Homo sapiens |
| | | | | (mortalin-2) | |
| 1139 | BC006834 | 892 | 100 | B-cell translocation gene 1, | Mus musculus |
| | | | | anti-proliferative | |
| 1139 | BC018309 | 892 | 100 | B-cell translocation gene 1, | Mus musculus |
| | | | | anti-proliferative | |
| 1139 | Z16410 | 892 | 100 | btg1 | Mus musculus |
| 1140 | AK075720 | 517 | 92 | unnamed protein product | Mus musculus |
| 1140 | BC003862 | 517 | 92 | Similar to transmembrane 9 | Mus musculus |
| | | | | superfamily member 2 | |
| 1140 | U81006 | 518 | 93 | p76 | Homo sapiens |
| 1141 | A03736 | 3879 | 100 | factor XIIIa | Homo sapiens |
| 1141 | M14354 | 3879 | 100 | clotting factor XIIIa precursor | Homo sapiens |
| | | | | (EC 2.3.2.13) | |
| 1141 | M14539 | 4016 | 99 | factor XIII precursor | Homo sapiens |
| 1142 | AAH06541 | 969 | 99 | BC006541 integrin, beta 5 | Homo sapiens |
| 1142 | J05633 | 962 | 98 | integrin beta-5 subunit precursor | Homo sapiens |
| 1142 | X53002 | 969 | 99 | precusor polypeptide (AA −23 to | Homo sapiens |
| | | | | 776) | |
| 1143 | D50929 | 7262 | 100 | The KIAA0139 gene product is | Homo sapiens |
| | | | | related to mouse centrosomin B. | |
| 1143 | U58046 | 7262 | 100 | p167 | Homo sapiens |
| 1143 | U78311 | 7262 | 100 | translation initiation factor 3 | Homo sapiens |
| | | | | large subunit | |
| 1144 | AAH01571 | 4708 | 99 | BC001571 eukaryotic translation | Homo sapiens |
| | | | | initiation factor 3, subunit 8 | |
| | | | | (110 kD) | |
| 1144 | AC002544 | 4708 | 99 | Translation initiation factor | Homo sapiens |
| | | | | eIF-p110 | |
| 1144 | U46025 | 4708 | 99 | translation intiation factor eIF-3 | Homo sapiens |
| | | | | p110 subunit | |
| 1145 | AB019987 | 6513 | 99 | chromosome-associated | Homo sapiens |
| | | | | polypeptide-C | |
| 1145 | AF092564 | 6041 | 99 | chromosome-associated protein-C | Homo sapiens |
| 1145 | AL136877 | 6517 | 100 | hypothetical protein | Homo sapiens |
| 1146 | AAH01756 | 2880 | 99 | BC001756 phosphoglucomutase 1 | Homo sapiens |
| 1146 | AAH19920 | 2873 | 99 | BC019920 Unknown (protein for | Homo sapiens |
| | | | | MGC: 29909) | |
| 1146 | M83088 | 2880 | 99 | PGM1 | Homo sapiens |
| 1147 | AB020664 | 3759 | 100 | KIAA0857 protein | Homo sapiens |
| 1147 | AF334812_1 | 3333 | 100 | AF334812 Rab11 interacting | Homo sapiens |
| | | | | protein Rip11a | |
| 1147 | BC035013 | 3303 | 99 | Similar to Rab coupling protein | Homo sapiens |
| 1148 | AF356518_1 | 1637 | 100 | AF356518 junctional adhesion | Homo sapiens |
| | | | | molecule 3 precursor | |
| 1148 | AF448478_1 | 1637 | 100 | AF448478 junctional adhesional | Homo sapiens |
| | | | | molecule-3 | |
| 1148 | AJ416101 | 1870 | 100 | junction adhesion molecule 3 | Homo sapiens |
| 1149 | AF130117_48 | 355 | 77 | AF130089 PRO2550 | Homo sapiens |
| 1149 | AK000385 | 353 | 74 | unnamed protein product | Homo sapiens |
| 1149 | AK097266 | 324 | 79 | unnamed protein product | Homo sapiens |
| 1150 | AAH01562 | 3284 | 100 | BC001562 nuclear receptor | Homo sapiens |
| | | | | coactivator 4 | |
| 1150 | AL162047 | 3284 | 100 | hypothetical protein | Homo sapiens |
| 1150 | L49399 | 3284 | 100 | ORF | Homo sapiens |
| 1151 | AAH02356 | 2379 | 100 | B0002356 nucleobindin 1 | Homo sapiens |
| 1151 | M96824 | 2326 | 98 | nucleobindin | Homo sapiens |
| 1151 | U31342 | 2357 | 99 | nucleobindin | Homo sapiens |
| 1152 | AAH17180 | 4694 | 100 | BC017180 Unknown (protein for | Homo sapiens |
| | | | | MGC: 790) | |
| 1152 | AK088028 | 4597 | 97 | unnamed protein product | Mus musculus |
| 1152 | BC007126 | 4597 | 97 | Unknown (protein for MGC: 5677) | Mus musculus |
| 1153 | AAH08099 | 378 | 100 | BC008099 Unknown (protein for | Homo sapiens |
| | | | | IMAGE: 4183312) | |
| 1154 | AF137053_1 | 2310 | 99 | AF137053 mutant desmin | Homo sapiens |
| 1154 | BC032116 | 2313 | 99 | desmin | Homo sapiens |
| 1154 | U59167 | 2325 | 100 | desmin | Homo sapiens |
| 1155 | AL445795 | 23376 | 99 | heparan sulfate proteoglycan | Homo sapiens |
| | | | | perlecan | |
| 1155 | M85289 | 23477 | 99 | heparan sulfate proteoglycan | Homo sapiens |
| 1155 | X62515 | 23627 | 99 | Human basement membrane heparan | Homo sapiens |
| | | | | sulfate proteoglycan core protein | |
| 1156 | AK057830 | 270 | 51 | unnamed protein product | Homo sapiens |
| 1156 | BC024651 | 210 | 58 | similar to PRO2550 | Homo sapiens |
| 1156 | BC032019 | 230 | 55 | similar to Alu subfamily SQ | Homo sapiens |
| | | | | sequence contamination warning | |
| | | | | entry | |
| 1157 | AAH00429 | 309 | 100 | BC000429 chromosome 14 open | Homo sapiens |
| | | | | reading frame 2 | |
| 1157 | AAH01944 | 309 | 100 | BC001944 chromosome 14 open | Homo sapiens |
| | | | | reading frame 2 | |
| 1157 | AF054175 | 309 | 100 | mitochondrial proteolipid 68MP | Homo sapiens |
| | | | | homolog | |
| 1158 | AAH01263 | 2152 | 100 | BC001263 serum/glucocorticoid | Homo sapiens |
| | | | | regulated kinase | |
| 1158 | AF153609_1 | 2152 | 100 | AF153609 serine/threonine protein | Homo sapiens |
| | | | | kinase sgk | |
| 1158 | AX553549 | 2152 | 100 | unnamed protein product | Homo sapiens |
| 1159 | AAH07103 | 710 | 100 | BC007103 small acidic protein | Homo sapiens |
| 1159 | AAH16352 | 710 | 100 | BC016352 small acidic protein | Homo sapiens |
| 1159 | AAH20937 | 710 | 100 | BC020937 small acidic protein | Homo sapiens |
| 1161 | AY043487 | 412 | 100 | selenoprotein SelM | Homo sapiens |
| 1161 | AY043488 | 367 | 85 | selenoprotein SelM | Mus musculus |
| 1161 | BC019742 | 345 | 85 | Unknown (protein for MGC: 30803) | Mus musculus |
| 1162 | AF124719_1 | 1018 | 100 | AF124719 GM2 activator protein | Homo sapiens |
| 1162 | X61095 | 1039 | 97 | GM2-activator protein | Homo sapiens |
| 1162 | X62078 | 1018 | 100 | GM2 activator protein | Homo sapiens |
| 1163 | AB028974 | 1802 | 100 | KIAA1051 protein | Homo sapiens |
| 1163 | AB049150 | 1703 | 100 | MEF3 like 1 | Homo sapiens |
| 1163 | AX082622 | 2129 | 100 | unnamed protein product | Homo sapiens |
| 1164 | BC026690 | 3964 | 100 | CD97 antigen | Homo sapiens |
| 1164 | U76764 | 3796 | 87 | CD97 | Homo sapiens |
| 1164 | X84700 | 3951 | 99 | leucocyte antigen CD97 | Homo sapiens |
| 1165 | K03195 | 2485 | 99 | glucose transporter glycoprotein | Homo sapiens |
| 1165 | M13979 | 2430 | 97 | glucose-transporter protein | Rattus |
| | | | | | norvegicus |
| 1165 | M22063 | 2430 | 97 | glucose transporter protein | Rattus |
| | | | | | norvegicus |
| 1166 | AAH19297 | 1801 | 100 | BC019297 Unknown (protein for | Homo sapiens |
| | | | | MGC: 4111) | |
| 1166 | AK021655 | 1801 | 100 | unnamed protein product | Homo sapiens |
| 1166 | AK022757 | 1801 | 100 | unnamed protein product | Homo sapiens |
| 1167 | AC005943 | 1522 | 100 | methyl-CpG binding protein MBD3 | Homo sapiens |
| 1167 | AF072247 | 1522 | 100 | methyl-CpG binding domain- | Homo sapiens |
| | | | | containing protein MBD3 | |
| 1167 | AF072248 | 1427 | 95 | methyl-CpG binding domain- | Mus musculus |
| | | | | containing protein MBD3 | |
| 1168 | AB018009 | 2602 | 100 | L-type amino acid transporter 1 | Homo sapiens |
| 1168 | AB018542 | 2602 | 100 | CD98 light chain | Homo sapiens |
| 1168 | AF104032 | 2602 | 100 | L-type amino acid transporter | Homo sapiens |
| | | | | subunit LAT1 | |
| 1170 | AAH10737 | 1911 | 100 | BC010737 Similar to reticulon 4 | Homo sapiens |
| 1170 | AAH12619 | 1911 | 100 | BC012619 Unknown (protein for | Homo sapiens |
| | | | | MGC: 13655) | |
| 1170 | BC026788 | 1911 | 100 | reticulon 4 | Homo sapiens |
| 1171 | AAH02412 | 3766 | 99 | BC002412 inner membrane protein, | Homo sapiens |
| | | | | mitochondrial (mitofilin) | |
| 1171 | D21094 | 3766 | 99 | motor protein | Homo sapiens |
| 1171 | L42572 | 3771 | 100 | transmembrane protein | Homo sapiens |
| 1172 | AAH01925 | 573 | 100 | BC001925 FK506-binding protein 1A | Homo sapiens |
| | | | | (12 kD) | |
| 1172 | AAH05147 | 573 | 100 | BC005147 FK506-binding protein 1A | Homo sapiens |
| | | | | (12 kD) | |
| 1172 | M93060 | 573 | 100 | FK506-binding protein 12 | Homo sapiens |
| 1173 | AF116721_20 | 391 | 100 | AF116620 PRO1068 | Homo sapiens |
| 1174 | AK075023 | 1335 | 99 | unnamed protein product | Homo sapiens |
| 1174 | AL117442 | 1344 | 100 | hypothetical protein | Homo sapiens |
| 1174 | BC002138 | 1302 | 96 | Unknown (protein for | Mus musculus |
| | | | | IMAGE: 3484538) | |
| 1175 | AAH07674 | 382 | 100 | BC007674 CD24 antigen (small cell | Homo sapiens |
| | | | | lung carcinoma cluster 4 antigen) | |
| 1175 | L33930 | 382 | 100 | signal transducer CD24 | Homo sapiens |
| 1175 | M58664 | 382 | 100 | signal transducer CD24 | Homo sapiens |
| 1176 | AAH12181 | 4260 | 100 | BC012181 Similar to paired basic | Homo sapiens |
| | | | | amino acid cleaving enzyme | |
| | | | | (furin, membrane associated | |
| | | | | receptor protein) | |
| 1176 | U20436 | 4060 | 95 | furin endoprotease | Cricetulus |
| | | | | | griseus |
| 1176 | X17094 | 4260 | 100 | furin (AA 1-794) | Homo sapiens |
| 1177 | AAH15236 | 1189 | 100 | BC015236 hypothetical protein | Homo sapiens |
| 1177 | AF335324_1 | 1189 | 100 | AF335324 RTP801 | Homo sapiens |
| 1177 | AY090097 | 1189 | 100 | REDD-1 | Homo sapiens |
| 1178 | AK026800 | 289 | 72 | unnamed protein product | Homo sapiens |
| 1178 | AK057830 | 364 | 69 | unnamed protein product | Homo sapiens |
| 1178 | BC032019 | 330 | 70 | similar to Alu subfamily SQ | Homo sapiens |
| | | | | sequence contamination warning | |
| | | | | entry | |
| 1179 | AAH10058 | 3813 | 100 | BC010058 exostoses (multiple) 2 | Homo sapiens |
| 1179 | U62740 | 3813 | 100 | EXT2 | Homo sapiens |
| 1179 | U67368 | 3813 | 100 | multiple exostosis 2 | Homo sapiens |
| 1180 | AAH08301 | 1967 | 100 | BC008301 tuftelin 1 | Homo sapiens |
| 1180 | AF254260_1 | 1967 | 100 | AF254260 tuftelin 1 | Homo sapiens |
| 1180 | AF254860 | 1967 | 100 | tuftelin 1 | Homo sapiens |
| 1182 | AF272662_1 | 9764 | 94 | AF272662 alpha 1 type V collagen | Rattus |
| | | | | | norvegicus |
| 1182 | D90279 | 10311 | 99 | collagen alpha 1(V) chain | Homo sapiens |
| | | | | precursor | |
| 1182 | M76729 | 10277 | 99 | pro-alpha-1 type V collagen | Homo sapiens |
| 1183 | AAH03155 | 1475 | 90 | BC003155 coatomer protein | Homo sapiens |
| | | | | complex, subunit epsilon | |
| 1183 | AAH07250 | 1475 | 90 | BC007250 coatomer protein | Homo sapiens |
| | | | | complex, subunit epsilon | |
| 1183 | AAH17285 | 1475 | 90 | BC017285 Unknown (protein for | Homo sapiens |
| | | | | MGC: 29652) | |
| 1184 | AX354381 | 347 | 100 | unnamed protein product | Homo sapiens |
| 1185 | AF202636_1 | 2164 | 100 | AF202636 angiopoietin-like | Homo sapiens |
| | | | | protein PP1158 | |
| 1185 | AX079971 | 2164 | 100 | unnamed protein product | Homo sapiens |
| 1185 | BC023647 | 2164 | 100 | angiopoietin-like 4 | Homo sapiens |
| 1186 | AK056767 | 1189 | 100 | unnamed protein product | Homo sapiens |
| 1186 | AL831913 | 713 | 85 | hypothetical protein | Homo sapiens |
| 1187 | AAH01270 | 1896 | 100 | BC001270 SM3-domain GRB2-like 1 | Homo sapiens |
| 1187 | U65999 | 1896 | 100 | SH3-containing protein EEN | Homo sapiens |
| 1187 | X99656 | 1896 | 100 | SH3-containing Grb-2-like 1 | Homo sapiens |
| 1188 | AAH00385 | 4505 | 100 | BC000385 Unknown (protein for | Homo sapiens |
| | | | | MGC: 8429) | |
| 1188 | AF102803 | 4505 | 100 | alphaE-catenin | Homo sapiens |
| 1188 | D13866 | 4505 | 100 | alpha-catenin | Homo sapiens |
| 1189 | AAH07564 | 607 | 90 | BC007564 annexin A11 | Homo sapiens |
| 1189 | AJ278464 | 607 | 90 | annexin A11 | Homo sapiens |
| 1189 | AJ278465 | 607 | 90 | annexin A11 | Homo sapiens |
| 1190 | AAH01491 | 1470 | 99 | BC001491 heme oxygenase | Homo sapiens |
| | | | | (decycling) 1 | |
| 1190 | X06985 | 1475 | 100 | heme oxygenase (AA 1-288) | Homo sapiens |
| 1190 | Z82244 | 1475 | 100 | bK286B10.2 (Heme Oxygenase | Homo sapiens |
| | | | | (decycling) 1 (HO-1 EC | |
| | | | | 1.14.99.3)) | |
| 1192 | AAH13910 | 1671 | 100 | BC013910 Similar to death | Homo sapiens |
| | | | | effector domain-containing | |
| 1192 | AAH16724 | 1671 | 100 | BC016724 death effector domain- | Homo sapiens |
| | | | | containing | |
| 1192 | AJ010973 | 1671 | 100 | DEDD protein | Homo sapiens |
| 1193 | AAH17882 | 1276 | 100 | BC017882 proteasome (prosome, | Homo sapiens |
| | | | | macropain) subunit, alpha type 6 | |
| 1193 | BC022354 | 1276 | 100 | proteasome (prosome, macropain) | Homo sapiens |
| | | | | subunit, alpha type 6 | |
| 1193 | D10755 | 1276 | 100 | proteasome subunit R-IOTA | Rattus sp. |
| 1194 | AAH09581 | 2041 | 100 | BC009581 hydroxysteroid (17-beta) | Homo sapiens |
| | | | | dehydrogenase 2 | |
| 1194 | L11708 | 2041 | 100 | 17 beta hydroxysteroid | Homo sapiens |
| | | | | dehydrogenase type 2 | |
| 1194 | L40802 | 2041 | 100 | 17-hydroxysteroid dehydrogenase | Homo sapiens |
| 1195 | AAH08452 | 586 | 100 | BC008452 ATPase, H+ transporting, | Homo sapiens |
| | | | | lysosomal (vacuolar proton pump), | |
| | | | | member J | |
| 1195 | AP038954 | 586 | 100 | vacuolar H(+)-ATPase subunit | Homo sapiens |
| 1195 | S82464 | 573 | 96 | vacuolar H(+)-ATPase subunit; V- | Bos taurus |
| | | | | ATPase subunit; M16 | |
| 1196 | AE003452 | 193 | 35 | CG9350-PB | Drosophila |
| | | | | | melanogaster |
| 1196 | AJ510148 | 571 | 72 | mitochondrial NADH: ubiquinone | Bos taurus |
| | | | | oxidoreductase B14.7 subunit | |
| 1196 | AK008201 | 532 | 65 | unnamed protein product | Mus musculus |
| 1197 | AB020685 | 3216 | 100 | KIAA0878 protein | Homo sapiens |
| 1197 | AK006650 | 2065 | 93 | unnamed protein product | Mus musculus |
| 1197 | BC041337 | 3212 | 99 | Rho-related BTB domain containing 3 | Homo sapiens |
| 1198 | AB058749 | 1868 | 100 | KIAA1846 protein | Homo sapiens |
| 1198 | AK092295 | 1868 | 100 | unnamed protein product | Homo sapiens |
| 1198 | AL035661 | 1868 | 100 | dJ568C11.3 (novel AMP-binding | Homo sapiens |
| | | | | enzyme similar to acetyl-coenzyme | |
| | | | | A synthethase (acetate-coA | |
| | | | | ligase)) | |
| 1199 | AF009242 | 1163 | 100 | proline-rich Gla protein 1 | Homo sapiens |
| 1199 | AF419154 | 572 | 52 | mitotic phosphoprotein 77 | Xenopus |
| | | | | | laevis |
| 1199 | BC030786 | 1246 | 100 | proline-rich Gla (G- | Homo sapiens |
| | | | | carboxyglutamic acid) polypeptide 1 | |
| 1200 | AF000652 | 1503 | 99 | syntenin | Homo sapiens |
| 1200 | AF006636 | 1508 | 100 | melanoma differentiation | Homo sapiens |
| | | | | associated protein-9 | |
| 1200 | U83463 | 1503 | 99 | scaffold protein Pbp1 | Homo sapiens |
| 1201 | AF312032 | 5200 | 99 | ephrin type-B receptor 4 | Homo sapiens |
| | | | | precursor | |
| 1201 | AY056047 | 5200 | 99 | receptor protein tyrosine kinase | Homo sapiens |
| | | | | EphB4 | |
| 1201 | U07695 | 5196 | 99 | tyrosine kinase | Homo sapiens |
| 1202 | AF015553 | 4955 | 99 | TFII-I protein | Homo sapiens |
| 1202 | AF038969 | 4949 | 99 | general transcription factor 2-I | Homo sapiens |
| 1202 | Y14946 | 4949 | 99 | SPIN protein | Homo sapiens |
| 1203 | AAH07452 | 1442 | 100 | BC007452 Similar to WW domain | Homo sapiens |
| | | | | binding protein 2 | |
| 1203 | AAH10616 | 1442 | 100 | BC010616 Unknown (protein for | Homo sapiens |
| | | | | MGC: 18269) | |
| 1203 | U79458 | 1458 | 100 | WW domain binding protein-2 | Homo sapiens |
| 1204 | AB097511 | 3996 | 93 | hypothetical protein | Macaca |
| | | | | | fascicularis |
| 1204 | AL359292 | 7373 | 99 | dJ448K1.1.1 (absent in melanoma | Homo sapiens |
| | | | | 1, isoform 1) | |
| 1204 | U83115 | 8577 | 100 | non-lens beta gamma-crystallin | Homo sapiens |
| | | | | like protein | |
| 1205 | AAH05921 | 589 | 87 | BC005921 chorionic | Homo sapiens |
| | | | | somatomammotropin hormone 1 | |
| | | | | (placental lactogen) | |
| 1205 | AAH20756 | 589 | 87 | BC020756 chorionic | Homo sapiens |
| | | | | somatomammotropin hormone 1 | |
| | | | | (placental lactogen) | |
| 1205 | AAH22044 | 589 | 87 | BC022044 chorionic | Homo sapiens |
| | | | | somatomammotropin hormone 2 | |
| 1206 | AY158924 | 650 | 100 | histone protein Hist2h2aa2 | Mus musculus |
| 1206 | AY158925 | 650 | 100 | histone protein Hist2h2aa1 | Mus musculus |
| 1206 | AY158953 | 650 | 100 | histone protein Hist2h3c2 | Mus musculus |
| 1207 | AF226614_1 | 2929 | 100 | AF226614 ferroportin1 | Homo sapiens |
| 1207 | AF231121_1 | 2929 | 100 | AF231121 iron-regulated | Homo sapiens |
| | | | | transporter IREG1 | |
| 1207 | BC037733 | 2929 | 100 | solute carrier family 11 (proton- | Homo sapiens |
| | | | | coupled divalent metal ion | |
| | | | | transporters), member 3 | |
| 1208 | AAH01693 | 709 | 100 | BC001693 lectin, galactoside- | Homo sapiens |
| | | | | binding, soluble, 1 (galectin 1) | |
| 1208 | AAH20675 | 709 | 100 | BC020675 lectin, galactoside- | Homo sapiens |
| | | | | binding, soluble, 1 (galectin 1) | |
| 1208 | X14829 | 709 | 100 | beta-galactoside-binding lectin | Homo sapiens |
| | | | | (AA 1-135) | |
| 1209 | AF151794 | 1678 | 38 | pol protein | Phascolarctos |
| | | | | | cinereus |
| 1209 | AY099324 | 1671 | 38 | gag-pol polyprotein | porcine |
| | | | | | endogenous |
| | | | | | retrovirus B |
| 1209 | M26927 | 1717 | 38 | pol polyprotein | Gibbon ape |
| | | | | | leukemia |
| | | | | | virus |
| 1210 | AAD18076 | 689 | 99 | AF129756 G6c | Homo sapiens |
| 1210 | AJ012008 | 689 | 99 | Ly6-C protein | Homo sapiens |
| 1210 | AJ315533 | 689 | 99 | LY6G6C protein | Homo sapiens |
| 1211 | AAH11682 | 2559 | 100 | BC011682 Similar to cathepsin F | Homo sapiens |
| 1211 | AF132894_1 | 2559 | 100 | AF132894 cathepsin F | Homo sapiens |
| 1211 | AJ007331 | 2559 | 100 | cysteine proteinase | Homo sapiens |
| 1212 | AF247565_1 | 513 | 97 | AF247565 anaphase promoting | Homo sapiens |
| | | | | complex subunit 11 | |
| 1212 | AF247789_1 | 513 | 97 | AF247789 putative anaphase- | Homo sapiens |
| | | | | promoting complex subunit APC11 | |
| 1212 | AX061622 | 513 | 97 | unnamed protein product | Homo sapiens |
| 1213 | AAH11811 | 559 | 92 | BC011811 Unknown (protein for | Homo sapiens |
| | | | | MGC: 20260) | |
| 1213 | AF218016_1 | 432 | 76 | AF218016 unknown | Homo sapiens |
| 1214 | AAH17201 | 680 | 92 | BC017201 insulin-like growth | Homo sapiens |
| | | | | factor binding protein 7 | |
| 1214 | L19182 | 680 | 92 | MAC25 | Homo sapiens |
| 1214 | S75725 | 680 | 92 | prostacyclin-stimulating factor; | Homo sapiens |
| | | | | PGI2-stimulating factor; PSF | |
| 1215 | AAH00590 | 250 | 71 | BC000590 actin related protein | Homo sapiens |
| | | | | 2/3 complex, subunit 2 (34 kD) | |
| 1215 | AP006085 | 250 | 71 | p34-Arc | Homo sapiens |
| 1215 | U50523 | 250 | 71 | unknown | Homo sapiens |
| 1216 | AF126110_1 | 718 | 96 | AF126110 fibulin-1 isoform D | Homo sapiens |
| | | | | precursor | |
| 1216 | AF217999_1 | 718 | 96 | AF217999 unknown | Homo sapiens |
| 1216 | BC022497 | 718 | 96 | fibulin 1 | Homo sapiens |
| 1217 | AAH05839 | 502 | 97 | BC005839 follistatin-like 3 | Homo sapiens |
| | | | | (secreted glycoprotein) | |
| 1217 | BC033119 | 502 | 97 | follistatin-like 3 (secreted | Homo sapiens |
| | | | | glycoprotein) | |
| 1217 | U76702 | 502 | 97 | follistatin-related protein FLRG | Homo sapiens |
| 1218 | AAH00163 | 601 | 99 | BC000163 vimentin | Homo sapiens |
| 1218 | BC030573 | 601 | 99 | Unknown (protein for MGC: 16183) | Homo sapiens |
| 1218 | X56134 | 601 | 99 | vimentin | Homo sapiens |
| 1219 | AB018265 | 5555 | 100 | KIAA0722 protein | Homo sapiens |
| 1219 | AF045458 | 5460 | 100 | serine/threonine kinase ULK1 | Homo sapiens |
| 1219 | AF072370_1 | 4865 | 89 | AF072370 UNC51.1 serine/threonine | Mus musculus |
| | | | | kinase | |
| 1220 | AAH00865 | 227 | 100 | BC000865 Unknown (protein for | Homo sapiens |
| | | | | IMAGE: 3460093) | |
| 1221 | AAH02978 | 279 | 91 | BC002978 CD81 antigen (target of | Homo sapiens |
| | | | | antiproliferative antibody 1) | |
| 1221 | AF116600 | 279 | 91 | CD81 | Pan |
| | | | | | troglodytes |
| 1221 | M33680 | 279 | 91 | 26-kDa cell surface protein TAPA-1 | Homo sapiens |
| 1222 | AAH15156 | 678 | 100 | BC015156 ferritin, heavy | Homo sapiens |
| | | | | polypeptide 1 | |
| 1222 | AAH16009 | 678 | 100 | BC016009 ferritin, heavy | Homo sapiens |
| | | | | polypeptide 1 | |
| 1222 | AAH16857 | 678 | 100 | BC016857 ferritin, heavy | Homo sapiens |
| | | | | polypeptide 1 | |
| 1223 | AAH08012 | 518 | 100 | BC008012 eukaryotic translation | Homo sapiens |
| | | | | elongation factor 1 delta | |
| | | | | (guanine nucleotide exchange | |
| | | | | protein) | |
| 1223 | AAH09907 | 518 | 100 | BC009907 eukaryotic translation | Homo sapiens |
| | | | | elongation factor 1 delta | |
| | | | | (guanine nucleotide exchange | |
| | | | | protein) | |
| 1223 | AAH12819 | 518 | 100 | BC012819 eukaryotic translation | Homo sapiens |
| | | | | elongation factor 1 delta | |
| | | | | (guanine nucleotide exchange | |
| | | | | protein) | |
| 1224 | AAH05921 | 556 | 83 | BC005921 chorionic | Homo sapiens |
| | | | | somatomammotropin hormone 1 | |
| | | | | (placental lactogen) | |
| 1224 | AAH20756 | 556 | 83 | BC020756 chorionic | Homo sapiens |
| | | | | somatomammotropin hormone 1 | |
| | | | | (placental lactogen) | |
| 1224 | AAH22044 | 556 | 83 | BC022044 chorionic | Homo sapiens |
| | | | | somatomammotropin hormone 2 | |
| 1225 | A65264 | 705 | 100 | unnamed protein product | unidentified |
| 1225 | AAH01288 | 574 | 93 | BC001288 Similar to decay | Homo sapiens |
| | | | | accelerating factor for | |
| | | | | complement (CD55, Cromer blood | |
| | | | | group system) | |
| 1225 | AF149760_1 | 574 | 93 | AF149760 decay-accelerating | Pan |
| | | | | factor | troglodytes |
| 1226 | AK022217 | 191 | 76 | unnamed protein product | Homo sapiens |
| 1226 | AK056734 | 191 | 72 | unnamed protein product | Homo sapiens |
| 1226 | AK097342 | 209 | 78 | unnamed protein product | Homo sapiens |
| 1227 | AAH05326 | 499 | 98 | BC005326 ribosomal protein L27a | Homo sapiens |
| 1227 | AAH20169 | 499 | 98 | BC020169 Unknown (protein for | Homo sapiens |
| | | | | IMAGE: 3543815) | |
| 1227 | U14968 | 499 | 98 | ribosomal protein L27a | Homo sapiens |
| 1229 | AAH21297 | 569 | 94 | BC021297 Similar to Dynein heavy | Homo sapiens |
| | | | | chain 64C | |
| 1229 | AB002323 | 569 | 94 | KIAA0325 | Homo sapiens |
| 1229 | AY004877 | 539 | 89 | cytoplasmic dynein heavy chain | Mus musculus |
| 1230 | BC026018 | 643 | 100 | Similar to laminin, beta 1 | Homo sapiens |
| 1230 | M20206 | 643 | 100 | laminin B1 | Homo sapiens |
| 1230 | M55370 | 643 | 100 | laminin B1 | Homo sapiens |
| 1231 | AF061658 | 591 | 91 | cytidine deaminase | Homo sapiens |
| 1231 | AJ000474 | 591 | 91 | cytidine deaminase | Homo sapiens |
| 1231 | L27943 | 591 | 91 | cytidine deaminase | Homo sapiens |
| 1232 | AAH18986 | 486 | 83 | BC018986 Unknown (protein for | Homo sapiens |
| | | | | MGC: 20092) | |
| 1232 | AF229830 | 486 | 83 | prostaglandin dehydrogenase | Papio |
| | | | | | hamadryas |
| 1232 | U63296 | 486 | 83 | 15-hydroxyprostaglandin | Homo sapiens |
| | | | | dehydrogenase | |
| 1233 | AAH00749 | 507 | 100 | BC000749 lactate dehydrogenase A | Homo sapiens |
| 1233 | AAH01829 | 507 | 100 | BC001829 lactate dehydrogenase A | Homo sapiens |
| 1233 | X03077 | 507 | 100 | lactate dehydrogenase-A | Homo sapiens |
| 1234 | AAH00903 | 791 | 88 | BC000903 high-mobility group | Homo sapiens |
| | | | | (nonhistone chromosomal) protein 2 | |
| 1234 | AAH01063 | 791 | 88 | BC001063 high-mobility group | Homo sapiens |
| | | | | (nonhistone chromosomal) protein 2 | |
| 1234 | X62534 | 791 | 88 | HMG-2 | Homo sapiens |
| 1235 | AF193055_1 | 594 | 88 | AF193055 unknown | Homo sapiens |
| 1235 | AK075214 | 594 | 88 | unnamed protein product | Homo sapiens |
| 1235 | BC038587 | 594 | 88 | Similar to EGF-like-domain, | Homo sapiens |
| | | | | multiple 6 | |
| 1236 | AF135060 | 632 | 96 | fibrillin-2 | Rattus |
| | | | | | norvegicus |
| 1236 | U03272 | 637 | 99 | fibrillin-2 | Homo sapiens |
| 1236 | X62009 | 637 | 98 | fibrillin 5 | Homo sapiens |
| 1237 | AAH13083 | 522 | 100 | BC013083 Similar to cystatin C | Homo sapiens |
| | | | | (amyloid angiopathy and cerebral | |
| | | | | hemorrhage) | |
| 1237 | X12763 | 522 | 100 | ompA —cystatin C fusion | synthetic |
| | | | | preprotein (AA −21 to 120) | construct |
| 1237 | X61681 | 522 | 100 | cystatin C | Homo sapiens |
| 1239 | AF135060 | 523 | 89 | fibrillin-2 | Rattus |
| | | | | | norvegicus |
| 1239 | L39790 | 532 | 90 | fibrillin 2 | Mus musculus |
| 1239 | U03272 | 597 | 100 | fibrillin-2 | Homo sapiens |
| 1240 | M65149 | 1200 | 85 | CELF | Rattus |
| | | | | | norvegicus |
| 1240 | M83667 | 1430 | 100 | NF-IL6-beta protein | Homo sapiens |
| 1240 | S63168 | 1418 | 99 | CCAAT/enhancer-binding protein | Homo sapiens |
| | | | | delta; C/EBP delta | |
| 1241 | AF186111_1 | 230 | 52 | AF186111 NOTCH4-like protein | Homo sapiens |
| 1241 | AL512735 | 230 | 52 | hypothetical protein | Homo sapiens |
| 1241 | AX133831 | 230 | 52 | unnamed protein product | Homo sapiens |
| 1242 | BC015302 | 664 | 87 | lamin A | Mus musculus |
| 1242 | M13452 | 715 | 95 | lamin A protein | Homo sapiens |
| 1242 | X76297 | 670 | 88 | lamin A | Rattus |
| | | | | | norvegicus |
| 1244 | AB049946 | 666 | 100 | mitochondrial ribosomal protein | Homo sapiens |
| | | | | S15 | |
| 1244 | BC029193 | 433 | 69 | mitochondrial ribosomal protein | Mus musculus |
| | | | | S15 | |
| 1244 | BC031336 | 666 | 100 | mitochondrial ribosomal protein | Homo sapiens |
| | | | | S15 | |
| 1245 | AAH13733 | 392 | 93 | BC013733 px19-like protein | Homo sapiens |
| 1245 | AAH13748 | 392 | 93 | BC013748 px19-like protein | Homo sapiens |
| 1245 | AF201925_1 | 392 | 93 | AF201925 PRELI | Homo sapiens |
| 1246 | AAH02362 | 694 | 100 | BC002362 lactate dehydrogenase B | Homo sapiens |
| 1246 | AAH15122 | 694 | 100 | BC015122 lactate dehydrogenase B | Homo sapiens |
| 1246 | Y00711 | 694 | 100 | lactate dehydrogenase B (AA 1-334) | Homo sapiens |
| 1247 | AAH03070 | 504 | 86 | BC003070 GATA-binding protein 3 | Homo sapiens |
| 1247 | AAH06793 | 504 | 86 | BC006793 GATA-binding protein 3 | Homo sapiens |
| 1247 | X55037 | 504 | 86 | GATA-3 | Homo sapiens |
| 1248 | AF269289_1 | 357 | 100 | AF269289 unknown | Homo sapiens |
| 1249 | AAH07728 | 546 | 86 | BC007728 Unknown (protein for | Homo sapiens |
| | | | | MGC: 12671) | |
| 1249 | AL080102 | 546 | 86 | hypothetical protein | Homo sapiens |
| 1249 | U49436 | 546 | 86 | translation initiation factor 5 | Homo sapiens |
| 1250 | AAH03190 | 472 | 94 | BC003190 p75NTR-associated cell | Homo sapiens |
| | | | | death executor; ovarian granulosa | |
| | | | | cell protein (13 kD) | |
| 1250 | AF187064_1 | 472 | 94 | AF187064 p75NTR-associated cell | Homo sapiens |
| | | | | death executor; NADE | |
| 1250 | M38188 | 472 | 94 | unknown | Homo sapiens |
| 1251 | AB037767 | 5427 | 99 | KIAA1346 protein | Homo sapiens |
| 1251 | AF207664_1 | 5274 | 100 | AF207664 matrix metalloprotease | Homo sapiens |
| 1251 | AP001697 | 5274 | 100 | metalloprotease with | Homo sapiens |
| | | | | thrombospondin type 1 motifs | |
| 1252 | U90938 | 222 | 76 | Fc gamma receptor IIc1 | Homo sapiens |
| 1252 | X17652 | 222 | 76 | IgG Fc receptor | Homo sapiens |
| 1252 | X17652 | 222 | 76 | IgG Fc receptor | Homo sapiens |
| 1253 | AAH01768 | 390 | 93 | BC001768 neuronatin | Homo sapiens |
| 1253 | AL109614 | 390 | 93 | bA425M5.3.1 (neuronatin (isoform | Homo sapiens |
| | | | | 1)) | |
| 1253 | U31767 | 390 | 93 | neuronatin alpha | Homo sapiens |
| 1254 | AF151373_1 | 542 | 75 | AF151373 nucleolin-related | Rattus |
| | | | | protein NRP | norvegicus |
| 1254 | AK091742 | 670 | 96 | unnamed protein product | Homo sapiens |
| 1254 | M60858 | 670 | 96 | nucleolin | Homo sapiens |
| 1255 | AAH13428 | 616 | 93 | BC013428 PP1201 protein | Homo sapiens |
| 1255 | AF193045_1 | 616 | 93 | AF193045 unknown | Homo sapiens |
| 1255 | BC026348 | 616 | 93 | PP1201 protein | Homo sapiens |
| 1256 | AF393832_1 | 765 | 99 | AF393832 beta-actin | Morulius |
| | | | | | calbasu |
| 1256 | AY039657 | 765 | 99 | beta-actin | Chrysophrys |
| | | | | | auratus |
| 1256 | AY148350 | 765 | 99 | actin | Dicentrarchus |
| | | | | | labrax |
| 1257 | AK055593 | 379 | 100 | unnamed protein product | Homo sapiens |
| 1258 | AAH21233 | 1036 | 100 | BC021233 ATP synthase, H+ | Homo sapiens |
| | | | | transporting, mitochondrial F1 | |
| | | | | complex, O subunit (oligomycin | |
| | | | | sensitivity conferring protein) | |
| 1258 | BC022865 | 1036 | 100 | ATP synthase, H+ transporting, | Homo sapiens |
| | | | | mitochondrial F1 complex, O | |
| | | | | subunit (oligomycin sensitivity | |
| | | | | conferring protein) | |
| 1258 | X83218 | 1036 | 100 | ATP synthase, oligomycin | Homo sapiens |
| | | | | sensitivity conferring protein | |
| 1259 | AAH04368 | 1221 | 99 | BC004368 proteasome (prosome, | Homo sapiens |
| | | | | macropain) activator subunit 2 | |
| | | | | (PA28 beta) | |
| 1259 | AAH19885 | 1221 | 99 | BC019885 proteasome (prosome, | Homo sapiens |
| | | | | macropain) activator subunit 2 | |
| | | | | (PA28 beta) | |
| 1259 | D45248 | 1226 | 100 | proteasome activator hPA28 suunit | Homo sapiens |
| | | | | beta | |
| 1260 | AF090306 | 2306 | 100 | retinoblastoma binding protein | Rattus |
| | | | | | norvegicus |
| 1260 | U35143 | 2306 | 100 | retinoblastoma-binding protein | Homo sapiens |
| | | | | RbAp46 | |
| 1260 | X72841 | 2306 | 100 | IEF 7442 | Homo sapiens |
| 1261 | AAH00413 | 1748 | 100 | BC000413 eukaryotic translation | Homo sapiens |
| | | | | initiation factor 3, subunit 2 | |
| | | | | (beta, 36 kD) | |
| 1261 | AAH03140 | 1748 | 100 | BC003140 eukaryotic translation | Homo sapiens |
| | | | | initiation factor 3, subunit 2 | |
| | | | | (beta, 36 kD) | |
| 1261 | U39067 | 1748 | 100 | translation initiation factor | Homo sapiens |
| | | | | eIF3 p36 subunit | |
| 1262 | AF042166 | 13721 | 100 | beta-filamin | Homo sapiens |
| 1262 | AF043045 | 13709 | 99 | actin-binding protein homolog | Homo sapiens |
| | | | | ABP-278 | |
| 1262 | AF191633 | 13721 | 100 | filamin | Homo sapiens |
| 1263 | AF165515_1 | 1862 | 100 | AF165515 ancient ubiquitous | Homo sapiens |
| | | | | protein 1 precursor | |
| 1263 | AK023983 | 1935 | 100 | unnamed protein product | Homo sapiens |
| 1263 | BC033646 | 1862 | 100 | ancient ubiquitous protein 1 | Homo sapiens |
| 1264 | AB009865 | 1347 | 100 | Angiopoietin-2 | Homo sapiens |
| 1264 | AF187858_1 | 1335 | 99 | AF187858 angiopoietin-2 isoform-1 | Homo sapiens |
| 1264 | AF218015_1 | 1347 | 100 | AF218015 unknown | Homo sapiens |
| 1265 | AF035718 | 914 | 99 | mesoderm-specific basic-helix- | Homo sapiens |
| | | | | loop-helix protein; Pod-1 | |
| 1265 | AL356109 | 917 | 100 | bA373A10.1 (transcription factor | Homo sapiens |
| | | | | 21) | |
| 1265 | BC025697 | 917 | 100 | transcription factor 21 | Homo sapiens |
| 1266 | M38690 | 1200 | 100 | CD9 antigen | Homo sapiens |
| 1266 | S60489 | 1200 | 100 | CD9 antigen | Homo sapiens |
| 1266 | X60111 | 1200 | 100 | MRP-1 (motility related protein) | Homo sapiens |
| 1267 | AAH02368 | 4629 | 99 | BC002368 proteasome (prosome, | Homo sapiens |
| | | | | macropain) 26S subunit, non- | |
| | | | | ATPase, 2 | |
| 1267 | AAH02997 | 4629 | 99 | BC002997 proteasome (prosome, | Homo sapiens |
| | | | | macropain) 26S subunit, non- | |
| | | | | ATPase, 2 | |
| 1267 | D78151 | 4637 | 100 | human 26S proteasome subunit p97 | Homo sapiens |
| 1268 | AAH00182 | 1622 | 100 | BC000182 annexin A4 | Homo sapiens |
| 1268 | AAH11659 | 1622 | 100 | BC011659 Similar to annexin A4 | Homo sapiens |
| 1268 | D78152 | 1622 | 100 | annexin IV (carbohydrtate-binding | Homo sapiens |
| | | | | protein p33/41) | |
| 1269 | AAH03064 | 4016 | 99 | BC003064 disabled (Drosophila) | Homo sapiens |
| | | | | homolog 2 (mitogen-responsive | |
| | | | | phosphoprotein) | |
| 1269 | AF205890 | 4028 | 100 | disabled-2 | Homo sapiens |
| 1269 | U39050 | 4028 | 100 | DOC-2 | Homo sapiens |
| 1270 | AAH07075 | 780 | 100 | BC007075 hemoglobin, beta | Homo sapiens |
| 1270 | U01317 | 780 | 100 | beta-globin | Homo sapiens |
| 1270 | V00499 | 780 | 100 | beta globin | Homo sapiens |
| 1271 | AAH21557 | 4093 | 99 | BC021557 transmembrane protein 8 | Homo sapiens |
| | | | | (five membrane-spanning domains) | |
| 1271 | AB045292 | 4100 | 100 | M83 protein | Homo sapiens |
| 1271 | AE006463_7 | 4088 | 99 | AE006463 M83 | Homo sapiens |
| 1272 | AF193048_1 | 946 | 100 | AF193048 unknown | Homo sapiens |
| 1273 | AF151980_1 | 2009 | 100 | AF151980 connexin 43 | Homo sapiens |
| 1273 | BC026329 | 2009 | 100 | gap junction protein, alpha 1, | Homo sapiens |
| | | | | 43 kD (connexin 43) | |
| 1273 | X52947 | 2009 | 100 | gap junction protein (AA 1-382) | Homo sapiens |
| 1274 | AJ313463 | 1258 | 100 | adipsin/complement factor D | Homo sapiens |
| | | | | precursor | |
| 1274 | BC034529 | 1249 | 100 | Unknown (protein for | Homo sapiens |
| | | | | IMAGE: 4780594) | |
| 1274 | M84526 | 1198 | 98 | adipsin/complement factor D | Homo sapiens |
| 1275 | AF258549_1 | 533 | 100 | AF258549 PP1292 | Homo sapiens |
| 1276 | AF217963_1 | 4215 | 99 | AF217963 NRAGE | Homo sapiens |
| 1276 | AF258554_1 | 4223 | 100 | AF258554 PP2250 | Homo sapiens |
| 1276 | BC032473 | 4223 | 100 | melanoma antigen, family D, 1 | Homo sapiens |
| 1277 | AAH14635 | 635 | 100 | BC014635 Similar to SH3-domain, | Homo sapiens |
| | | | | GRB2-like, endophilin B2 | |
| 1277 | AF257319_1 | 635 | 100 | AF257319 SH3-containing protein | Homo sapiens |
| | | | | SH3GLB2 | |
| 1277 | AF258589_1 | 635 | 100 | AF258589 PP578 | Homo sapiens |
| 1278 | AAH03390 | 707 | 100 | BC003390 hypothetical protein | Homo sapiens |
| 1278 | AAH14334 | 707 | 100 | BC014334 Unknown (protein for | Homo sapiens |
| | | | | MGC: 22874) | |
| 1278 | AF275807_1 | 822 | 100 | AF275807 PNAS-110 | Homo sapiens |
| 1279 | AAH05238 | 469 | 100 | BC005238 FXYD domain-containing | Homo sapiens |
| | | | | ion transport regulator 3 | |
| 1279 | U28249 | 411 | 75 | 11 kD protein | Homo sapiens |
| 1279 | X93036 | 469 | 100 | MAT8 protein | Homo sapiens |
| 1280 | AF014402 | 1500 | 100 | type-2 phosphatidic acid | Homo sapiens |
| | | | | phosphatase alpha-1 | |
| 1280 | BC039847 | 1500 | 100 | Similar to phosphatidic acid | Homo sapiens |
| | | | | phosphatase type 2A | |
| 1280 | Y14436 | 1500 | 100 | phosphatidic acid phosphatase | Homo sapiens |
| | | | | type 2 | |
| 1281 | AL163249 | 2729 | 99 | T-complex protein 1 theta subunit | Homo sapiens |
| 1281 | D13627 | 2730 | 99 | KIAA0002 | Homo sapiens |
| 1281 | D42052 | 2734 | 100 | predicted protein of 548 amino | Homo sapiens |
| | | | | acids | |
| 1282 | AAH01312 | 2306 | 100 | BC001312 protein disulfide | Homo sapiens |
| | | | | isomerase-related protein | |
| 1282 | BC006865 | 2220 | 95 | Similar to protein disulfide | Mus musculus |
| | | | | isomerase-related protein | |
| 1283 | D49489 | 2306 | 100 | human P5 | Homo sapiens |
| 1283 | AF439513_1 | 7917 | 91 | AF439513 pregnancy-associated | Mus musculus |
| | | | | plasma protein-A | |
| 1283 | U28727 | 8980 | 100 | pregnancy-associated plasma | Homo sapiens |
| | | | | protein-A preproform | |
| 1283 | X68280 | 8574 | 100 | unnamed protein product | Homo sapiens |
| 1284 | AAH01936 | 1357 | 100 | BC001936 Similar to BCL2- | Homo sapiens |
| | | | | associated athanogene | |
| 1284 | AAH14774 | 1357 | 100 | BC014774 Unknown (protein for | Homo sapiens |
| | | | | MGC: 17086) | |
| 1284 | Z35491 | 1357 | 100 | glucocortoid receptor-associated | Homo sapiens |
| | | | | protein RAP46 | |
| 1285 | AAH04490 | 1953 | 100 | BC004490 v-fos FBJ murine | Homo sapiens |
| | | | | osteosarcoma viral oncogene | |
| | | | | homolog | |
| 1285 | AF111167 | 1953 | 100 | cfos | Homo sapiens |
| 1285 | V01512 | 1953 | 100 | c-fos | Homo sapiens |
| 1286 | AAH20235 | 3282 | 99 | BC020235 Unknown (protein for | Homo sapiens |
| | | | | MGC: 31939) | |
| 1286 | M19645 | 3314 | 100 | GRP78 precursor | Homo sapiens |
| 1286 | X87949 | 3314 | 100 | BiP | Homo sapiens |
| 1287 | AAH14433 | 2640 | 100 | BC014433 Unknown (protein for | Homo sapiens |
| | | | | MGC: 2159) | |
| 1287 | BC036000 | 2640 | 100 | Unknown (protein for | Homo sapiens |
| | | | | IMAGE: 4712175) | |
| 1287 | U42068 | 2640 | 100 | P58 | Homo sapiens |
| 1288 | BC032722 | 1478 | 100 | tumor necrosis factor (ligand) | Homo sapiens |
| | | | | superfamily, member 10 | |
| 1288 | U37518 | 1478 | 100 | TNF-related apoptosis inducing | Homo sapiens |
| | | | | ligand TRAIL | |
| 1288 | U57059 | 1478 | 100 | Apo-2 ligand | Homo sapiens |
| 1289 | AAH01022 | 1591 | 100 | BC001022 pyrophosphatase | Homo sapiens |
| | | | | (inorganic) | |
| 1289 | AF119665_1 | 1591 | 100 | AF119665 inorganic | Homo sapiens |
| | | | | pyrophosphatase | |
| 1289 | AF217186_1 | 1591 | 100 | AF217186 inorganic | Homo sapiens |
| | | | | pyrophosphatase 1 | |
| 1290 | AAH08743 | 3145 | 100 | BC008743 zyxin | Homo sapiens |
| 1290 | AAH09360 | 3145 | 100 | BC009360 zyxin | Homo sapiens |
| 1290 | AAH10031 | 3145 | 100 | BC010031 zyxin | Homo sapiens |
| 1291 | AAH05901 | 919 | 100 | BC005901 Microfibril-associated | Homo sapiens |
| | | | | glycoprotein-2 | |
| 1291 | AF084927 | 919 | 100 | microfibril-associated | Homo sapiens |
| | | | | glycoprotein 2 | |
| 1291 | U37283 | 919 | 100 | microfibril-associated | Homo sapiens |
| | | | | glycoprotein-2 MAGP-2 | |
| 1292 | AAH00933 | 2015 | 100 | BC000933 isocitrate dehydrogenase | Homo sapiens |
| | | | | 3 (NAD+) gamma | |
| 1292 | Z68129 | 2015 | 100 | NAD (H)-specific isocitrate | Homo sapiens |
| | | | | dehydrogenase gamma-subunit | |
| | | | | precursor | |
| 1292 | Z68907 | 2015 | 100 | NAD (H)-specific isocitrate | Homo sapiens |
| | | | | dehydrogenase gamma subunit | |
| | | | | precursor | |
| 1293 | AAH12265 | 846 | 100 | BC012265 Similar to cofilin 1, | Homo sapiens |
| | | | | non-muscle | |
| 1293 | AAH12318 | 846 | 100 | BC012318 Similar to cofilin 1, | Homo sapiens |
| | | | | non-muscle | |
| 1293 | AAH18256 | 846 | 100 | BC018256 Similar to cofilin 1, | Homo sapiens |
| | | | | non-muscle | |
| 1294 | AB069964 | 861 | 100 | ubiquitin-conjugating enzyme 9 | Gallus |
| | | | | | gallus |
| 1294 | AF461016_1 | 861 | 100 | AF461016 ubiquitin-conjugating | Gallus |
| | | | | enzyme | gallus |
| 1294 | U88561 | 861 | 100 | E2 ubiquitin conjugating enzyme | Xenopus |
| | | | | | laevis |
| 1295 | AAH06249 | 989 | 100 | BC006249 guanylate kinase 1 | Homo sapiens |
| 1295 | AAH09914 | 989 | 100 | BC009914 guanylate kinase 1 | Homo sapiens |
| 1295 | U66895 | 989 | 100 | guanylate kinase | Homo sapiens |
| 1296 | AF095770_1 | 224 | 94 | AF095770 PTH-responsive | Homo sapiens |
| | | | | osteosarcoma D1 protein | |
| 1297 | AAH01120 | 1369 | 99 | BC001120 lectin, galactoside- | Homo sapiens |
| | | | | binding, soluble, 3 (galectin 3) | |
| 1297 | AF031425 | 1369 | 99 | galectin 3 | Homo sapiens |
| 1297 | M35368 | 1377 | 100 | galactose-specific lectin | Homo sapiens |
| 1298 | AF241786_1 | 1125 | 100 | AF241786 NPD013 | Homo sapiens |
| 1299 | AAH02503 | 547 | 70 | BC002503 spermidine/spermine N1- | Homo sapiens |
| | | | | acetyltransferase | |
| 1299 | AAH08424 | 547 | 70 | BC008424 spermdine/spermine N1- | Homo sapiens |
| | | | | acetyltransferase | |
| 1299 | AF251292_1 | 1059 | 100 | AF251292 DC21 | Homo sapiens |
| 1300 | AF135157_1 | 190 | 63 | AF135157 complement C1q A chain | Homo sapiens |
| | | | | precursor | |
| 1300 | AF260332_1 | 1550 | 100 | AF260332 DC33 | Homo sapiens |
| 1300 | BC030153 | 190 | 63 | complement component 1, q | Homo sapiens |
| | | | | subcomponent, alpha polypeptide | |
| 1301 | AAH00589 | 770 | 100 | BC000589 CGI-39 protein; cell | Homo sapiens |
| | | | | death-regulatory protein GRIM19 | |
| 1301 | AAH09189 | 770 | 100 | BC009189 CGI-39 protein; cell | Homo sapiens |
| | | | | death-regulatory protein GRIM19 | |
| 1301 | AF261134_1 | 1196 | 100 | AF261134 CDA016 | Homo sapiens |
| 1302 | AAH12296 | 1135 | 99 | BC012296 hypothetical protein | Homo sapiens |
| | | | | FLJ21174 | |
| 1302 | AF271783_1 | 1141 | 100 | AF271783 NPD017 | Homo sapiens |
| 1302 | AF314542_1 | 1141 | 100 | AF314542 B lymphocyte activation- | Homo sapiens |
| | | | | related protein | |
| 1303 | AK090427 | 13940 | 99 | FLJ00343 protein | Homo sapiens |
| 1303 | L44140 | 14011 | 100 | filamin | Homo sapiens |
| 1303 | X53416 | 14004 | 99 | actin-binding protein | Homo sapiens |
| 1304 | AAH12341 | 1492 | 100 | BC012341 Similar to M5-14 protein | Homo sapiens |
| 1304 | AL136622 | 1492 | 100 | hypothetical protein | Homo sapiens |
| 1304 | AL390090 | 1492 | 100 | c3orf1 hypothetical protein, M5-14 | Homo sapiens |
| | | | | similar to (AE003703) 140up | |
| | | | | gene product Drosophila | |
| | | | | melanogaster | |
| 1305 | AC005624 | 824 | 100 | MY18_HUMAN | Homo sapiens |
| 1305 | AF078077 | 824 | 100 | growth arrest and DNA-damage- | Homo sapiens |
| | | | | inducible protein GADD45beta | |
| 1305 | AF087853_1 | 824 | 100 | AF087853 growth arrest and DNA | Homo sapiens |
| | | | | damage inducible protein beta | |
| 1306 | AF020185 | 478 | 100 | protein inhibitor of nitric oxide | Mus musculus |
| | | | | synthase | |
| 1306 | BC008106 | 478 | 100 | dynein, cytoplasmic, light | Mus musculus |
| | | | | polypeptide | |
| 1306 | BC034258 | 478 | 100 | dynein, cytoplasmic, light | Mus musculus |
| | | | | polypeptide | |
| 1307 | AAH01539 | 1466 | 100 | BC001539 dickkopf (Xenopus | Homo sapiens |
| | | | | laevis) homolog 1 | |
| 1307 | AF177394_1 | 1466 | 100 | AF177394 dickkopf-1 | Homo sapiens |
| 1307 | AF261158 | 1466 | 100 | dickkopf homolog 1 | Homo sapiens |
| 1308 | AAC33279 | 1396 | 100 | AC005559 basigin | Homo sapiens |
| 1308 | AAH09040 | 1396 | 100 | BC009040 basigin (OK blood group) | Homo sapiens |
| 1308 | AF042855 | 1396 | 100 | EMMPRIN | Homo sapiens |
| 1309 | L47125 | 3057 | 100 | glypican | Homo sapiens |
| 1309 | L47176 | 3057 | 100 | GTR2-2 gene product | Homo sapiens |
| 1309 | Z37987 | 3057 | 100 | MXR7 | Homo sapiens |
| 1310 | D83476 | 4306 | 77 | xtld protein | Xenopus |
| | | | | | laevis |
| 1310 | L24755 | 4948 | 92 | bone morphogenetic protein | Mus musculus |
| 1310 | U50330 | 5416 | 100 | procollagen C-proteinase | Homo sapiens |
| 1311 | AAH01287 | 669 | 100 | BC001287 histidine triad | Homo sapiens |
| | | | | nucleotide-binding protein | |
| 1311 | AAH07090 | 669 | 100 | BC007090 histidine triad | Homo sapiens |
| | | | | nucleotide-binding protein | |
| 1311 | U51004 | 669 | 100 | protein kinase C inhibitor | Homo sapiens |
| 1312 | AB003306 | 1280 | 94 | PSMB5 | Mus musculus |
| 1312 | AF060091_1 | 1280 | 94 | AF060091 proteasome subunit X | Mus musculus |
| 1312 | X95586 | 1370 | 100 | proteasome | Homo sapiens |
| 1313 | AF102848_1 | 2178 | 100 | AF102848 keratin 23 | Homo sapiens |
| 1313 | AK002047 | 2151 | 98 | unnamed protein product | Homo sapiens |
| 1313 | BC028356 | 2155 | 99 | type I intermediate filament | Homo sapiens |
| | | | | cytokeratin | |
| 1314 | AAH00097 | 3483 | 100 | BC000097 transforming growth | Homo sapiens |
| | | | | factor, beta-induced, 68 kD | |
| 1314 | AAR04972 | 3483 | 100 | BC004972 transforming growth | Homo sapiens |
| | | | | factor, beta-induced, 68 kD | |
| 1314 | AY149344 | 3483 | 100 | transforming growth factor, beta- | Homo sapiens |
| | | | | induced, 68 kDa | |
| 1315 | AF414110_1 | 635 | 100 | AF414110 histone variant H2A.F/Z | Danio rerio |
| 1315 | AF414111_1 | 635 | 100 | AF414111 histone variant H2A.F/Z | Danio rerio |
| 1315 | V00414 | 635 | 100 | histone H2A | Gallus |
| | | | | | gallus |
| 1316 | BC011457 | 957 | 100 | Unknown (protein for MGC: 7976) | Mus musculus |
| 1316 | BC019761 | 957 | 100 | putative membrane protein | Mus musculus |
| 1316 | BC020098 | 957 | 100 | putative membrane protein | Mus musculus |
| 1317 | AAH00140 | 3579 | 100 | BC000140 propionyl Coenzyme A | Homo sapiens |
| | | | | carboxylase, alpha polypeptide | |
| 1317 | AF385926_1 | 3579 | 100 | AF385926 propionyl-CoA | Homo sapiens |
| | | | | carboxylase alpha subunit | |
| 1317 | AY035808 | 3579 | 100 | propionyl-CoA carboxylase alpha | Homo sapiens |
| | | | | polypeptide precursor | |
| 1318 | AF372216_1 | 562 | 99 | AF372216 tropomyosin alpha | Rattus |
| | | | | isoform | norvegicus |
| 1318 | M19267 | 565 | 100 | tropomyosin | Homo sapiens |
| 1318 | M19715 | 565 | 100 | skeletal muscle tropomyosin | Homo sapiens |
| 1319 | AAH00191 | 704 | 100 | BC000191 hypothetical protein | Homo sapiens |
| 1319 | AAH14329 | 704 | 100 | BC014329 Unknown (protein for | Homo sapiens |
| | | | | MGC: 22862) | |
| 1319 | AF212248_1 | 704 | 100 | AF212248 CDA09 | Homo sapiens |
| 1320 | AAH00255 | 783 | 100 | BC000255 Unknown (protein for | Homo sapiens |
| | | | | MGC: 2495) | |
| 1320 | AF320778_1 | 783 | 100 | AF320778 cervical cancer oncogene 3 | Homo sapiens |
| 1320 | AY032594 | 783 | 100 | hepatitis C virus core-binding | Homo sapiens |
| | | | | protein 6 | |
| 1321 | AAH00271 | 799 | 100 | BC000271 Unknown (protein for | Homo sapiens |
| | | | | MGC: 3204) | |
| 1321 | AAH01434 | 799 | 100 | BC001434 Unknown (protein for | Homo sapiens |
| | | | | MGC: 2477) | |
| 1321 | AK007390 | 449 | 82 | unnamed protein product | Mus musculus |
| 1322 | AAH00421 | 1243 | 100 | BC000421 lysosomal-associated | Homo sapiens |
| | | | | protein transmembrane 4 alpha | |
| 1322 | AAH03158 | 1240 | 99 | BC003158 lysosomal-associated | Homo sapiens |
| | | | | protein transmembrane 4 alpha | |
| 1322 | D14696 | 1243 | 100 | KIAA0108 | Homo sapiens |
| 1323 | AAH00461 | 1738 | 100 | BC000461 eukaryotic translation | Homo sapiens |
| | | | | initiation factor 2, subunit 2 | |
| | | | | (beta, 38 kD) | |
| 1323 | AAH00934 | 1735 | 99 | BC000934 eukaryotic translation | Homo sapiens |
| | | | | initiation factor 2, subunit 2 | |
| | | | | (beta, 38 kD) | |
| 1323 | AL031668 | 1738 | 100 | dJ64K7.2 (eukaryotic translation | Homo sapiens |
| | | | | initiation factor 2, subunit 2 | |
| | | | | (beta, 38 kD)) | |
| 1324 | AAH00466 | 1059 | 100 | BC000466 NADH dehydrogenase | Homo sapiens |
| | | | | (ubiquinone) 1 beta subcomplex, 8 | |
| | | | | (19 kD, ASHI) | |
| 1324 | AAH19276 | 1059 | 100 | BC019276 NADH dehydrogenase | Homo sapiens |
| | | | | (ubiquinone) 1 beta subcomplex, 8 | |
| | | | | (19 kD, ASHI) | |
| 1324 | AF044958 | 1059 | 100 | NADH: ubiquinone oxidoreductase | Homo sapiens |
| | | | | ASHI subunit | |
| 1325 | AAH00490 | 1821 | 100 | BC000490 eukaryotic translation | Homo sapiens |
| | | | | initiation factor 3, subunit 5 | |
| | | | | (epsilon, 47 KD) | |
| 1325 | AK095574 | 1774 | 98 | unnamed protein product | Homo sapiens |
| 1325 | U94855 | 1821 | 100 | translation initiation factor 3 | Homo sapiens |
| | | | | 47 kDa subunit | |
| 1326 | AAH00502 | 970 | 100 | BC000502 ribosomal protein L17 | Homo sapiens |
| 1326 | AAH17831 | 970 | 100 | BC017831 ribosomal protein L17 | Homo sapiens |
| 1326 | X53777 | 970 | 100 | putative ribosomal protein (AA 1-184) | Homo sapiens |
| 1327 | AAH00505 | 808 | 100 | BC000505 microsomal glutathione | Homo sapiens |
| | | | | S-transferase 3 | |
| 1327 | AAH03034 | 808 | 100 | BC003034 microsomal glutathione | Homo sapiens |
| | | | | S-transferase 3 | |
| 1327 | AAH05964 | 808 | 100 | BC005964 microsomal glutathione | Homo sapiens |
| | | | | S-transferase 3 | |
| 1328 | AAH00509 | 1425 | 100 | BC000509 proteasome (prosome, | Homo sapiens |
| | | | | macropain) subunit, beta type, 7 | |
| 1328 | AAH17116 | 1393 | 100 | BC017116 proteasome (prosome, | Homo sapiens |
| | | | | macropain) subunit, beta type, 7 | |
| 1328 | D38048 | 1421 | 99 | proteasome subunit z | Homo sapiens |
| 1329 | BC033015 | 4539 | 100 | RAS p21 protein activator (GTPase | Homo sapiens |
| | | | | activating protein) 1 | |
| 1329 | M23379 | 4539 | 100 | GTPase-activating protein | Homo sapiens |
| 1329 | M23612 | 4555 | 100 | GTPase-activating protein | Homo sapiens |
| 1330 | BC003860 | 2254 | 100 | protease (prosome, macropain) 26S | Mus musculus |
| | | | | subunit, ATPase 1 | |
| 1330 | D50696 | 2254 | 100 | proteasomal ATPase (S4) | Rattus |
| | | | | | norvegicus |
| 1330 | U39302 | 2254 | 100 | P26s4 | Mus musculus |
| 1331 | AAH00522 | 2131 | 100 | BC000522 Similar to serine (or | Homo sapiens |
| | | | | cysteine) proteinase inhibitor, | |
| | | | | clade F (alpha-2 antiplasmin, | |
| | | | | pigment epithelium derived | |
| | | | | factor). member 1 | |
| 1331 | AF400442_1 | 2125 | 99 | AF400442 pigment epithelium- | Homo sapiens |
| | | | | derived factor | |
| 1331 | M76979 | 2119 | 99 | pigment epithelial- | Homo sapiens |
| | | | | differentiating factor | |
| 1332 | AAH00529 | 1616 | 100 | BC000529 prostate differentiation | Homo sapiens |
| | | | | factor | |
| 1332 | AAH08962 | 1616 | 100 | BC008962 Unknown (protein for | Homo sapiens |
| | | | | MGC: 4145) | |
| 1332 | AF003934 | 1613 | 99 | prostate differentiation factor | Homo sapiens |
| 1333 | AAH00548 | 806 | 100 | BC000548 receptor (calcitonin) | Homo sapiens |
| | | | | activity modifying protein 1 | |
| 1333 | AF181550_1 | 596 | 71 | AF181550 receptor activity | Rattus |
| | | | | modifying protein 1 | norvegicus |
| 1333 | AJ001014 | 806 | 100 | RAMP1 | Homo sapiens |
| 1334 | AAH00554 | 1409 | 100 | BC000554 Similar to integral | Homo sapiens |
| | | | | membrane protein 2B | |
| 1334 | AF136973_1 | 1409 | 100 | AF136973 putative transmembrane | Homo sapiens |
| | | | | protein E3-16 | |
| 1334 | AF152462_1 | 1409 | 100 | AF152462 transmembrane protein | Homo sapiens |
| | | | | BRI | |
| 1335 | AAH00601 | 479 | 100 | BC000601 DKFZP564K247 protein | Homo sapiens |
| 1335 | AAH09583 | 479 | 100 | BC009583 DKFZP564K247 protein | Homo sapiens |
| 1335 | AAH09594 | 479 | 100 | BC009594 DKFZP564K247 protein | Homo sapiens |
| 1336 | AAH00691 | 906 | 100 | BC000691 brain specific protein | Homo sapiens |
| 1336 | AF132972_1 | 902 | 99 | AF132972 CGI-38 protein | Homo sapiens |
| 1336 | BC010788 | 888 | 96 | RIKEN cDNA 2700055K07 gene | Mus musculus |
| 1337 | AAH00720 | 798 | 100 | BC000720 ubiquitously-expressed | Homo sapiens |
| | | | | transcript | |
| 1337 | AAH08890 | 798 | 100 | BC008890 ubiquitously-expressed | Homo sapiens |
| | | | | transcript | |
| 1337 | AF092737_1 | 798 | 100 | AF092737 ubiquitously expressed | Homo sapiens |
| | | | | transcript | |
| 1338 | AAH01016 | 958 | 100 | BC001016 NADH dehydrogenase | Homo sapiens |
| | | | | (ubiquinone) 1 alpha subcomplex, | |
| | | | | 8 (19 kD, PGIV) | |
| 1338 | AF044953_1 | 958 | 100 | AF044953 NADH: ubiquinone | Homo sapiens |
| | | | | oxidoreductase PGIV subunit | |
| 1338 | X59697 | 866 | 88 | 19 kDa subunit of NADH: ubiquinone | Bos taurus |
| | | | | oxidoreductase complex (complex | |
| | | | | I) | |
| 1339 | AAH01066 | 763 | 100 | BC001066 hypothetical protein | Homo sapiens |
| 1339 | AAH21986 | 763 | 100 | BC021986 mitochondrial ribosomal | Homo sapiens |
| | | | | protein L27 | |
| 1339 | AB049647 | 763 | 100 | mitochondrial ribosomal protein | Homo sapiens |
| | | | | L27 (L27mt) | |
| 1340 | AAH01101 | 2975 | 100 | BC001101 HSPC025 | Homo sapiens |
| 1340 | AAH07510 | 2975 | 100 | BC007510 HSPC025 | Homo sapiens |
| 1340 | BC029265 | 2975 | 100 | eukaryotic translation initiation | Homo sapiens |
| | | | | factor 3, subunit 6 interacting | |
| | | | | protein | |
| 1341 | AAH01150 | 2803 | 100 | BC001150 metalloprotease 1 | Homo sapiens |
| | | | | (pitrilysin family) | |
| 1341 | AAH05025 | 2802 | 99 | BC005025 Similar to | Homo sapiens |
| | | | | metalloprotease 1 (pitrilysin | |
| | | | | family) | |
| 1341 | AB029027 | 2803 | 100 | KIAA1104 protein | Homo sapiens |
| 1342 | AAH01288 | 2064 | 100 | BC001288 Similar to decay | Homo sapiens |
| | | | | accelerating factor for | |
| | | | | complement (CD55, Cromer blood | |
| | | | | group system) | |
| 1342 | M30142 | 2064 | 100 | decay-accelerating factor A | Homo sapiens |
| 1342 | M31516 | 2064 | 100 | decay-accelerating factor | Homo sapiens |
| 1343 | AAH01387 | 833 | 100 | BC001387 similar to rat HREV107 | Homo sapiens |
| 1343 | AB030814 | 833 | 100 | H-REV107 protein homolog | Homo sapiens |
| 1343 | AF317086 | 833 | 100 | HREV107-3 | Homo sapiens |
| 1344 | AAH01420 | 800 | 100 | BC001420 HN1 protein | Homo sapiens |
| 1344 | AF177862_1 | 800 | 100 | AF177862 HN1 protein | Homo sapiens |
| 1344 | AF348672 | 800 | 100 | hematological and neurological | Homo sapiens |
| | | | | expressed 1 protein | |
| 1345 | AAH01426 | 482 | 100 | BC001426 Similar to ubiquinol- | Homo sapiens |
| | | | | cytochrome c reductase hinge | |
| | | | | protein | |
| 1345 | AAH01934 | 482 | 100 | BC001934 Similar to ubiquinol- | Homo sapiens |
| | | | | cytochrome c reductase hinge | |
| | | | | protein | |
| 1345 | AAH15177 | 482 | 100 | BC015177 Unknown (protein for | Homo sapiens |
| | | | | MGC: 10149) | |
| 1346 | AAH21173 | 429 | 100 | BC021173 normal mucosa of | Homo sapiens |
| | | | | esophagus specific 1 | |
| 1346 | AB026707 | 429 | 100 | FOAP-11 protein | Homo sapiens |
| 1346 | AF228422_1 | 429 | 100 | AF228422 normal mucosa of | Homo sapiens |
| | | | | esophagus specific 1 | |
| 1347 | AF274958_1 | 737 | 100 | AF274958 PNAS-101 | Homo sapiens |
| 1348 | AAH14908 | 1453 | 100 | BC014908 stem-loop (histone) | Homo sapiens |
| | | | | binding protein | |
| 1348 | AAH15703 | 1453 | 100 | BC015703 stem-loop (histone) | Homo sapiens |
| | | | | binding protein | |
| 1348 | Z71188 | 1453 | 100 | histone RNA hairpin-binding | Homo sapiens |
| | | | | protein | |
| 1349 | AB000491 | 2046 | 100 | proteasome p45/SUG | Rattus |
| | | | | | norvegicus |
| 1349 | D83521 | 2046 | 100 | proteasomal ATPase (rat SUG1) | Rattus |
| | | | | | norvegicus |
| 1349 | Z54219 | 2046 | 100 | mSUG1 protein | Mus musculus |
| 1350 | AK075215 | 831 | 100 | unnamed protein product | Homo sapiens |
| 1351 | AAH02481 | 480 | 100 | BC002481 HSPC162 protein | Homo sapiens |
| 1351 | AF132750_1 | 480 | 100 | AF132750 bithoraxoid-like protein | Homo sapiens |
| 1351 | AF178431_1 | 480 | 100 | AF178431 BITH | Homo sapiens |
| 1352 | AAH02559 | 3087 | 100 | BC002559 high-glucose-regulated | Homo sapiens |
| | | | | protein 8 | |
| 1352 | AK083882 | 3077 | 99 | unnamed protein product | Mus musculus |
| 1352 | BC014797 | 3077 | 99 | Unknown (protein for MGC: 11691) | Mus musculus |
| 1353 | AAH02589 | 2230 | 100 | BC002589 proteasome (prosome, | Homo sapiens |
| | | | | macropain) 26S subunit, ATPase, 2 | |
| 1353 | BC005462 | 2226 | 99 | proteasome (prosome, macropain) | Mus musculus |
| | | | | 26S subunit, ATPase 2 | |
| 1353 | D11094 | 2230 | 100 | MSS1 protein | Homo sapiens |
| 1354 | AAH02634 | 1769 | 100 | BC002634 Unknown (protein for | Homo sapiens |
| | | | | MGC: 4272) | |
| 1354 | AK003354 | 1732 | 96 | unnamed protein product | Mus musculus |
| 1354 | BC002128 | 1725 | 96 | Unknown (protein for MGC: 6737) | Mus musculus |
| 1355 | AAH02803 | 843 | 100 | BC002803 hypothetical protein | Homo sapiens |
| 1355 | AF151072_1 | 843 | 100 | AF151072 HSPC238 | Homo sapiens |
| 1355 | BC005559 | 711 | 78 | RIKEN cDNA 2500002L14 gene | Mus musculus |
| 1356 | AAH02911 | 856 | 100 | BC002911 Unknown (protein for | Homo sapiens |
| | | | | MGC: 11276) | |
| 1356 | AK003237 | 722 | 84 | unnamed protein product | Mus musculus |
| 1356 | BC031732 | 722 | 84 | DNA segment, Chr 7, Wayne State | Mus musculus |
| | | | | University 86, expressed | |
| 1357 | AAH02945 | 2197 | 100 | BC002945 Similar to hypothetical | Homo sapiens |
| | | | | protein FLJ10101 | |
| 1357 | AAH21095 | 1290 | 100 | BC021095 Unknown (protein for | Homo sapiens |
| | | | | MGC: 31800) | |
| 1357 | AK027586 | 1290 | 100 | unnamed protein product | Homo sapiens |
| 1358 | AAH02954 | 2552 | 100 | BC002954 UDP-glucose | Homo sapiens |
| | | | | pyrophosphorylase 2 | |
| 1358 | BC023810 | 2524 | 98 | UDP-glucose pyrophosphorylase 2 | Mus musculus |
| 1358 | U27460 | 2542 | 99 | uridine diphosphoglucose | Homo sapiens |
| | | | | pyrophosphorylase | |
| 1359 | AAH03005 | 886 | 100 | BC003005 unactive progesterone | Homo sapiens |
| | | | | receptor, 23 kD | |
| 1359 | BC003708 | 876 | 98 | telomerase binding protein, p23 | Mus musculus |
| 1359 | L24804 | 886 | 100 | p23 | Homo sapiens |
| 1360 | AAH03056 | 2132 | 100 | BC003056 HSPC028 protein | Homo sapiens |
| 1360 | AAH08453 | 2132 | 100 | BC008453 HSPC028 protein | Homo sapiens |
| 1360 | AAH09597 | 2132 | 100 | BC009597 HSPC028 protein | Homo sapiens |
| 1361 | L29075 | 151 | 24 | G-box binding factor | Dictyostelium |
| | | | | | discoideum |
| 1362 | AAH01773 | 591 | 100 | BC001773 Similar to ribosomal | Homo sapiens |
| | | | | protein L34 | |
| 1362 | AB061832 | 591 | 100 | ribosomal protein L34 | Homo sapiens |
| 1362 | BC028517 | 587 | 99 | Unknown (protein for MGC: 41239) | Mus musculus |
| 1363 | AAH01882 | 533 | 100 | BC001882 Similar to ribosomal | Homo sapiens |
| | | | | protein L5 | |
| 1363 | D10737 | 512 | 100 | ribosomal protein L5 | Gallus |
| | | | | | gallus |
| 1363 | X57016 | 512 | 100 | ribosomal protein L5 | Gallus |
| | | | | | gallus |
| 1364 | AAH01884 | 589 | 100 | BC001884 NADH dehydrogenase | Homo sapiens |
| | | | | (ubiquinone) Fe-S protein 5 | |
| | | | | (15 kD) (NADH-coenzyme Q | |
| | | | | reductase) | |
| 1364 | AF020352 | 589 | 100 | NADH: ubiquinone oxidoreductase 15 kDa | Homo sapiens |
| | | | | IP subunit | |
| 1364 | AF047434 | 589 | 100 | NADH-ubiquinone oxidoreductase | Homo sapiens |
| | | | | 15 kDa subunit; CI-15 protein | |
| 1365 | AAH01926 | 2197 | 100 | BC001926 creatine kinase, | Homo sapiens |
| | | | | mitochondrial 1 (ubiquitous) | |
| 1365 | AAH06467 | 2197 | 100 | BC006467 creatine kinase, | Homo sapiens |
| | | | | mitochondrial 1 (ubiquitous) | |
| 1365 | J04469 | 2197 | 100 | creatine kinase | Homo sapiens |
| 1366 | AAH03373 | 763 | 100 | BC003373 prefoldin 5 | Homo sapiens |
| 1366 | AB055803 | 763 | 100 | MM-1 alpha | Homo sapiens |
| 1366 | D89667 | 763 | 100 | c-myc binding protein | Homo sapiens |
| 1367 | AAH05939 | 998 | 100 | BC005939 prostaglandin D2 | Homo sapiens |
| | | | | synthase (21 kD, brain) | |
| 1367 | AY026356 | 998 | 100 | prostaglandin D synthase | Homo sapiens |
| 1367 | M98539 | 998 | 100 | prostaglandin D2 synthase | Homo sapiens |
| 1368 | AAH00045 | 1388 | 100 | BC000045 TONDU | Homo sapiens |
| 1368 | AAH03362 | 1388 | 100 | BC003362 TONDU | Homo sapiens |
| 1368 | Z97632 | 1388 | 100 | dJ196E23.1.1 (novel protein) | Homo sapiens |
| | | | | (isoform 1) | |
| 1369 | AAH03366 | 796 | 100 | BC003366 calcium-regulated heat- | Homo sapiens |
| | | | | stable protein (24 kD) | |
| 1369 | AF115345_1 | 787 | 99 | AF115345 calcium-regulated heat | Homo sapiens |
| | | | | stable protein CRHSP-24 | |
| 1369 | AF115346_1 | 785 | 97 | AF115346 calcium-regulated heat | Rattus sp. |
| | | | | stable protein CRHSP-24 | |
| 1370 | AAH03369 | 581 | 100 | BC003369 ribosomal protein, | Homo sapiens |
| | | | | large, P1 | |
| 1370 | AAH07590 | 581 | 100 | BC007590 ribosomal protein, | Homo sapiens |
| | | | | large, P1 | |
| 1370 | AB061836 | 581 | 100 | ribosomal protein P1 | Homo sapiens |
| 1371 | AAH03377 | 550 | 100 | BC003377 Similar to thioredoxin | Homo sapiens |
| 1371 | AF313911_1 | 550 | 100 | AF313911 thioredoxin | Homo sapiens |
| 1371 | AY004872 | 550 | 100 | thioredoxin | Homo sapiens |
| 1372 | BC032493 | 1086 | 100 | cysteine and glycine-rich protein 1 | Homo sapiens |
| 1372 | M33146 | 1086 | 100 | cysteine-rich protein | Homo sapiens |
| 1372 | M76378 | 1086 | 100 | cysteine-rich protein | Homo sapiens |
| 1373 | AAH03382 | 2620 | 100 | BC003382 sorting nexin 2 | Homo sapiens |
| 1373 | AF065482 | 2612 | 99 | sorting nexin 2 | Homo sapiens |
| 1373 | AK075929 | 2564 | 98 | unnamed protein product | Mus musculus |
| 1374 | AAH03394 | 1485 | 100 | BC003394 heterogeneous nuclear | Homo sapiens |
| | | | | ribonucleoprotein C (C1/C2) | |
| 1374 | AAH08364 | 1478 | 99 | BC008364 heterogeneous nuclear | Homo sapiens |
| | | | | ribonucleoprotein C (C1/C2) | |
| 1374 | AAH08423 | 1461 | 95 | BC008423 heterogeneous nuclear | Homo sapiens |
| | | | | ribonucleoprotein C (C1/C2) | |
| 1375 | AAH03501 | 2155 | 100 | BC003501 Similar to RIKEN cDNA | Homo sapiens |
| | | | | 2310001A20 gene | |
| 1375 | AB033767 | 2155 | 100 | brain-selective and closely | Homo sapiens |
| | | | | mapped on the counter allele of | |
| | | | | CMAP in cystatin cluster | |
| 1375 | AL035661 | 2155 | 100 | dJ568C11.2 (chromosome 20 open | Homo sapiens |
| | | | | reading frame 3) | |
| 1376 | AAH03512 | 3204 | 100 | BC003512 mesothelin | Homo sapiens |
| 1376 | AE006464_21 | 3189 | 99 | AE006464 pre-pro-megakarycyte | Homo sapiens |
| | | | | potentiating factor precursor | |
| 1376 | D49441 | 3192 | 99 | pre-pro-megakaryocyte | Homo sapiens |
| | | | | potentiating factor | |
| 1377 | AAH03077 | 5288 | 100 | BC003077 Similar to ATPase, Na+K+ | Homo sapiens |
| | | | | transporting, alpha 1 polypeptide | |
| 1377 | D00099 | 5288 | 100 | Na, K-ATPase alpha-subunit | Homo sapiens |
| 1377 | X04297 | 5288 | 100 | ATPase alpha subunit (aa 1-1023) | Homo sapiens |
| 1378 | AAH03079 | 786 | 100 | BC003079 16.7 Kd protein | Homo sapiens |
| 1378 | AAH15639 | 786 | 100 | BC015639 16.7 Kd protein | Homo sapiens |
| 1378 | AF078845 | 786 | 100 | 16.7 Kd protein | Homo sapiens |
| 1379 | AAH00161 | 1827 | 100 | BC000161 secretory carrier | Homo sapiens |
| | | | | membrane protein 3 | |
| 1379 | AAH05135 | 1827 | 100 | BC005135 secretory carrier | Homo sapiens |
| | | | | membrane protein 3 | |
| 1379 | AF005039 | 1817 | 99 | secretory carrier membrane | Homo sapiens |
| | | | | protein | |
| 1380 | AAH08704 | 887 | 100 | BC008704 cytochrome c oxidase | Homo sapiens |
| | | | | subunit IV | |
| 1380 | AAH21236 | 887 | 100 | BC021236 cytochrome c oxidase | Homo sapiens |
| | | | | subunit IV isoform 1 | |
| 1380 | X54802 | 887 | 100 | cytochrome-c oxidase subunit IV | Homo sapiens |
| 1381 | AAH00915 | 1731 | 100 | BC000915 PDZ and LIM domain 1 | Homo sapiens |
| | | | | (elfin) | |
| 1381 | AAH18755 | 1731 | 100 | BC018755 PDZ and LIM domain 1 | Homo sapiens |
| | | | | (elfin) | |
| 1381 | AJ310549 | 1731 | 100 | CLP-36 protein | Homo sapiens |
| 1382 | AF236636 | 1302 | 98 | uridine-cytidine kinase 2 | Mus musculus |
| 1382 | AF236637 | 1333 | 100 | uridine-cytidine kinase 2 | Homo sapiens |
| 1382 | BC023789 | 1302 | 98 | uridine-cytidine kinase 2 | Mus musculus |
| 1383 | AAH00176 | 940 | 100 | BC000176 RAP1B, member of RAS | Homo sapiens |
| | | | | oncogene family | |
| 1383 | AF493913_1 | 940 | 100 | AF493913 Ras family small GTP | Homo sapiens |
| | | | | binding protein RAP1B | |
| 1383 | BC033382 | 1016 | 91 | RAP1B, member of RAS oncogene | Mus musculus |
| | | | | family | |
| 1384 | D63519 | 870 | 100 | leptin | Homo sapiens |
| 1384 | D63710 | 870 | 100 | ob protein | Homo sapiens |
| 1384 | U43653 | 870 | 100 | obese protein | Homo sapiens |
| 1385 | BC002088 | 637 | 100 | ribosomal protein S25 | Mus musculus |
| 1385 | BC027208 | 637 | 100 | ribosomal protein S25 | Mus musculus |
| 1385 | X62482 | 637 | 100 | ribosomal protein S25 | Rattus |
| | | | | | Rattus |
| 1386 | AAH03662 | 2092 | 100 | BC003662 KIAA0111 gene product | Homo sapiens |
| 1386 | AAH04386 | 2092 | 100 | BC004386 KIAA0111 gene product | Homo sapiens |
| 1386 | AAH11151 | 2092 | 100 | BC011151 Similar to KIAA0111 gene | Homo sapiens |
| | | | | product | |
| 1387 | AF349038_1 | 1780 | 100 | AF349038 TFIID subunit TAFII55 | Homo sapiens |
| 1387 | BC032737 | 1780 | 100 | similar to TAF7 RNA polymerase | Homo sapiens |
| | | | | II, TATA box binding protein | |
| | | | | (TBP)-associated factor, 55 kD | |
| 1387 | X97999 | 1780 | 100 | transcription factor IID | Homo sapiens |
| 1388 | AAH02601 | 1673 | 100 | BC002601 nuclear factor of kappa | Hom sapiens |
| | | | | light polypeptide gene enhancer | |
| | | | | in B-cells inhibitor, alpha | |
| 1388 | AAH04983 | 1673 | 100 | BC004983 nuclear factor of kappa | Homo sapiens |
| | | | | light polypeptide gene enhancer | |
| | | | | in B-cells inhibitor, alpha | |
| 1388 | AY033600 | 1673 | 100 | NFKBIA | Homo sapiens |
| 1389 | AF211480_1 | 2102 | 100 | AF211480 CD001 | Homo sapiens |
| 1389 | AK002102 | 2086 | 100 | unnamed protein product | Homo sapiens |
| 1389 | AX191505 | 2086 | 100 | unnamed protein product | Homo sapiens |
| 1390 | AAH05110 | 4609 | 100 | BC005110 Unknown (protein for | Homo sapiens |
| | | | | MGC: 13217) | |
| 1390 | AK049371 | 4473 | 93 | unnamed protein product | Mus musculus |
| 1390 | AY044865 | 4609 | 100 | sorting nexin 14 | Homo sapiens |
| 1391 | AAH05118 | 592 | 100 | BC005118 Similar to putative | Homo sapiens |
| | | | | translation initiation factor | |
| 1391 | AAH08710 | 592 | 100 | BC008710 putative translation | Homo sapiens |
| | | | | initiation factor | |
| 1391 | AF083441_1 | 592 | 100 | AF083441 SUI1 isolog | Homo sapiens |
| 1392 | AAH05127 | 2190 | 100 | BC005127 adipose differentiation- | Homo sapiens |
| | | | | related protein | |
| 1392 | AF443203_1 | 2190 | 100 | AF443203 adipose differentiation- | Homo sapiens |
| | | | | related protein | |
| 1392 | AX025098 | 2181 | 99 | unnamed protein product | Homo sapiens |
| 1393 | AAH05143 | 964 | 100 | BC005143 vitamin A responsive; | Homo sapiens |
| | | | | cytoskeleton related | |
| 1393 | AAH20797 | 964 | 100 | BC020797 vitamin A responsive; | Homo sapiens |
| | | | | cytoskeleton related | |
| 1393 | AY102608 | 964 | 100 | JWA protein | Homo sapiens |
| 1394 | AAH05228 | 360 | 100 | BC005228 Unknown (protein for | Homo sapiens |
| | | | | MGC: 12250) | |
| 1395 | AF072506 | 2871 | 100 | envelope protein precursor | Homo sapiens |
| 1395 | AF208161 | 2868 | 99 | syncytin precursor | Homo sapiens |
| 1395 | AF513360_1 | 2868 | 99 | AF513360 enverin | Homo sapiens |
| 1396 | AAH05322 | 1866 | 100 | BC005322 decorin | Homo sapiens |
| 1396 | AF138300 | 1866 | 100 | decorin variant A | Homo sapiens |
| 1396 | AF491944_1 | 1866 | 100 | AF491944 decorin | Homo sapiens |
| 1397 | AAH01392 | 827 | 100 | BC001392 ribosomal protein S27a | Homo sapiens |
| 1397 | D83209 | 827 | 100 | ubiquitin extention protein | Cavia |
| | | | | | porcellus |
| 1397 | M24507 | 827 | 100 | ubiquitin | synthetic |
| | | | | | construct |
| 1398 | AAH05330 | 1306 | 100 | BC005330 tissue factor pathway | Homo sapiens |
| | | | | inhibitor 2 | |
| 1398 | AF217542 | 1306 | 100 | tissue factor pathway inhibitor 2 | Homo sapiens |
| 1398 | D29992 | 1306 | 100 | placental protein 5 (PP5) | Homo sapiens |
| 1399 | AAH05361 | 1334 | 100 | BC005361 proteasome (prosome, | Homo sapiens |
| | | | | macropain) subunit, alpha type, 4 | |
| 1399 | BC022445 | 1334 | 100 | proteasome (prosome, macropain) | Homo sapiens |
| | | | | subunit, alpha type, 4 | |
| 1399 | D00763 | 1334 | 100 | proteasome subunit C9 | Homo sapiens |
| 1400 | AAH05366 | 1298 | 100 | BC005366 ATP synthase, H+ | Homo sapiens |
| | | | | transporting, mitochondrial F0 | |
| | | | | complex, subunit b, isoform 1 | |
| 1400 | AAH16350 | 1298 | 100 | BC016350 Unknown (protein for | Homo sapiens |
| | | | | MGC: 24431) | |
| 1400 | AL390195 | 1298 | 100 | bA552M11.3 (ATP synthase, H+ | Homo sapiens |
| | | | | transporting, mitochondrial F0 | |
| | | | | complex, subunit b, isoform 1) | |
| 1401 | AAH05390 | 1993 | 100 | BC005390 Unknown (protein for | Homo sapiens |
| | | | | MGC: 12520) | |
| 1401 | AF006305 | 1993 | 100 | 26S proteasome regulatory subunit | Homo sapiens |
| 1401 | U36395 | 1993 | 100 | conserved ATPase domain protein | Spermophilus |
| | | | | 44 | tridecemlineatus |
| 1402 | AAH10370 | 1800 | 99 | BC010370 Putative prostate cancer | Homo sapiens |
| | | | | tumor suppressor | |
| 1402 | U42349 | 1826 | 100 | 39 kDa encoded by N33 | Homo sapiens |
| 1402 | U42360 | 1808 | 99 | N33 protein form 1 | Homo sapiens |
| 1403 | AAH05839 | 1492 | 100 | BC005839 follistatin-like 3 | Homo sapiens |
| | | | | (secreted glycoprotein) | |
| 1403 | BC033119 | 1492 | 100 | follistatin-like 3 (secreted | Homo sapiens |
| | | | | glycoprotein) | |
| 1403 | U76702 | 1492 | 100 | follistatin-related protein FLRG | Homo sapiens |
| 1404 | AAH05354 | 564 | 100 | BC005354 ribosomal protein, large | Homo sapiens |
| | | | | P2 | |
| 1404 | AAH05920 | 564 | 100 | BC005920 ribosomal protein, large | Homo sapiens |
| | | | | P2 | |
| 1404 | AAH07573 | 564 | 100 | BC007573 ribosomal protein, large | Homo sapiens |
| | | | | P2 | |
| 1405 | AAH17660 | 414 | 100 | BC017660 Unknown (protein for | Homo sapiens |
| | | | | MGC: 14608) | |
| 1405 | AJ249731 | 414 | 100 | putative G8.2 protein | Homo sapiens |
| 1405 | AP000503 | 414 | 100 | unknown function | Homo sapiens |
| 1406 | AAH05966 | 647 | 100 | BC005966 ring finger protein 7 | Homo sapiens |
| 1406 | AAH08627 | 647 | 100 | BC008627 ring finger protein 7 | Homo sapiens |
| 1406 | AF092878_1 | 647 | 100 | AF092878 zinc RING finger protein | Homo sapiens |
| | | | | SAG | |
| 1407 | AAH05975 | 1163 | 100 | BC005975 calcyclin binding | Homo sapiens |
| | | | | protein | |
| 1407 | AF314752_1 | 1163 | 100 | AF314752 calcyclin binding | Homo sapiens |
| | | | | protein | |
| 1407 | BC022352 | 1163 | 100 | Siah-interacting protein | Homo sapiens |
| 1408 | AAH06337 | 739 | 100 | BC006337 Unknown (protein for | Homo sapiens |
| | | | | MGC: 12798) | |
| 1408 | M37194 | 739 | 100 | clathrin-associated protein 17 | Rattus |
| | | | | | norvegicus |
| 1408 | X97074 | 729 | 98 | clathrin-associated protein | Homo sapiens |
| 1409 | AAH01928 | 3365 | 100 | BC001928 protein disulfide | Homo sapiens |
| | | | | isomerase related protein | |
| | | | | (calcium-binding protein, | |
| | | | | intestinal-related) | |
| 1409 | AAH06344 | 3365 | 100 | BC006344 protein disulfide | Homo sapiens |
| | | | | isomerase related protein | |
| | | | | (calcium-binding protein, | |
| | | | | intestinal-related) | |
| 1409 | AAH11754 | 3365 | 100 | BC011754 Similar to protein | Homo sapiens |
| | | | | disulfide isomerase related | |
| | | | | protein (calcium-binding protein, | |
| | | | | intestinal-related) | |
| 1410 | AF453478_1 | 1155 | 100 | AF453478 phosphopantetheine | Homo sapiens |
| | | | | adenylyltransferase/ | |
| | | | | dephosphocoenzyme A kinase | |
| 1410 | AY094602 | 1155 | 100 | bifunctional phosphopantetheine | Homo sapiens |
| | | | | adenylyl transferase/dephospho | |
| | | | | CoA kinase | |
| 1410 | BC020985 | 1155 | 100 | Unknown (protein for MGC: 9724) | Homo sapiens |
| 1411 | AAH06393 | 2797 | 100 | BC006393 Similar to | Homo sapiens |
| | | | | carboxypeptidase Z | |
| 1411 | AF017638 | 2419 | 86 | carboxypeptidase Z | Rattus |
| | | | | | norvegicus |
| 1411 | U83411 | 2787 | 99 | carboxypeptidase Z precursor | Homo sapiens |
| 1412 | AF126110_1 | 3913 | 100 | AF126110 fibulin-1 isoform D | Homo sapiens |
| | | | | precursor | |
| 1412 | U01244 | 3913 | 100 | fibulin-1D | Homo sapiens |
| 1412 | X70854 | 3392 | 84 | BH-90/fibulin | Mus musculus |
| 1413 | AAH02343 | 2494 | 100 | BC002343 Similar to nucleolin | Homo sapiens |
| 1413 | AAH06494 | 2494 | 100 | BC006494 Unknown (protein for | Homo sapiens |
| | | | | MGC: 1440) | |
| 1413 | AAH06516 | 2494 | 100 | BC006516 Unknown (protein for | Homo sapiens |
| | | | | MGC: 3588) | |
| 1414 | AAH20515 | 772 | 100 | BC020515 ribosomal protein S14 | Homo sapiens |
| 1414 | M11241 | 772 | 100 | ribosomal protein S14 | Cricetulus |
| | | | | | griseus |
| 1414 | M35008 | 772 | 100 | ribosomal protein S14 | Cricetulus |
| | | | | | griseus |
| 1415 | AAH08926 | 796 | 98 | BC008926 ribosomal protein L29 | Homo sapiens |
| 1415 | U10248 | 796 | 98 | ribosomal protein L29 | Homo sapiens |
| 1415 | U49083 | 796 | 98 | HIP | Homo sapiens |
| 1416 | AAH06791 | 1105 | 100 | BC006791 ribosomal protein L10a | Homo sapiens |
| 1416 | AAH11366 | 1105 | 100 | BC011366 Similar to ribosomal | Homo sapiens |
| | | | | protein L10a | |
| 1416 | X93352 | 1105 | 100 | ribosomal protein L10a | Rattus |
| | | | | | norvegicus |
| 1417 | AAH01418 | 1132 | 100 | BC001418 Similar to RIKEN cDNA | Homo sapiens |
| | | | | 1810017F10 gene | |
| 1417 | AAH13953 | 1132 | 100 | BC013953 Unknown (protein for | Homo sapiens |
| | | | | MGC: 2853) | |
| 1417 | AY027543 | 1132 | 100 | beta-casein-like protein | Homo sapiens |
| 1418 | AAH07038 | 1762 | 100 | BC007038 lumican | Homo sapiens |
| 1418 | BC035997 | 1762 | 100 | lumican | Homo sapiens |
| 1418 | U21128 | 1762 | 100 | lumican | Homo sapiens |
| 1419 | AAH03609 | 1441 | 100 | BC003609 thioredoxin peroxidase | Homo sapiens |
| | | | | (antioxidant enzyme) | |
| 1419 | AAH07107 | 1441 | 100 | BC007107 thioredoxin peroxidase | Homo sapiens |
| | | | | (antioxidant enzyme) | |
| 1419 | AAH16770 | 1441 | 100 | BC016770 thioredoxin peroxidase | Homo sapiens |
| | | | | (antioxidant enzyme) | |
| 1420 | AAH07282 | 952 | 100 | BC007282 Unknown (protein for | Homo sapiens |
| | | | | MGC: 15626) | |
| 1420 | AK014338 | 909 | 97 | unnamed protein product | Mus musculus |
| 1420 | M83751 | 937 | 98 | arginine-rich protein | Homo sapiens |
| 1421 | AAH07402 | 1005 | 100 | BC007402 apolipoprotein D | Homo sapiens |
| 1421 | J02611 | 1005 | 100 | apolipoprotein D precursor | Homo sapiens |
| 1421 | M16696 | 1005 | 100 | apolipoprotein D precursor | Homo sapiens |
| 1422 | AAH01603 | 849 | 100 | BC001603 Similar to ribosomal | Homo sapiens |
| | | | | protein L21 | |
| 1422 | AAH07505 | 849 | 100 | BC007505 Unknown (protein for | Homo sapiens |
| | | | | MGC: 4136) | |
| 1422 | X89401 | 849 | 100 | ribosomal protein L21 | Homo sapiens |
| 1423 | AAH07507 | 605 | 100 | BC007507 ribosomal protein S20 | Homo sapiens |
| 1423 | BC011323 | 605 | 100 | Similar to ribosomal protein S20 | Mus musculus |
| 1423 | X51537 | 605 | 100 | ribosomal protein S20 (AA 1-119) | Rattus |
| | | | | | Rattus |
| 1424 | AAH14459 | 791 | 100 | BC014459 Similar to ribosomal | Homo sapiens |
| | | | | protein L23a | |
| 1424 | BC029892 | 791 | 100 | ribosomal protein L23a | Mus musculus |
| 1424 | X65228 | 791 | 100 | ribosomal protein L23a | Rattus |
| | | | | | Rattus |
| 1425 | AJ420896 | 2114 | 99 | SPPL2a protein | Homo sapiens |
| 1425 | AK027446 | 2126 | 100 | unnamed protein product | Homo sapiens |
| 1425 | BC025740 | 2114 | 99 | Similar to hypothetical protein | Homo sapiens |
| | | | | FLJ14540 | |
| 1426 | AF036548 | 573 | 83 | RGC-32 | Rattus |
| | | | | | norvegicus |
| 1426 | AF036549_1 | 569 | 100 | AF036549 RGC32 | Homo sapiens |
| 1426 | AL354833 | 629 | 92 | bA157L14.2 (RGC32, a novel gene | Homo sapiens |
| | | | | induced by complement activation | |
| | | | | in oligodendrocytes) | |
| 1427 | AAH01024 | 2749 | 99 | BC001024 putative nucleotide | Homo sapiens |
| | | | | binding protein, estradiol- | |
| | | | | induced | |
| 1427 | AK027514 | 2756 | 100 | unnamed protein product | Homo sapiens |
| 1427 | AK027516 | 2753 | 99 | unnamed protein product | Homo sapiens |
| 1428 | AAH07834 | 563 | 100 | BC007834 Unknown (protein for | Homo sapiens |
| | | | | MGC: 14141) | |
| 1429 | AAH03061 | 2338 | 99 | BC003061 protease, cysteine, 1 | Homo sapiens |
| | | | | (legumain) | |
| 1429 | D55696 | 2335 | 99 | cysteine protease | Homo sapiens |
| 1429 | Y09862 | 2339 | 100 | legumain | Homo sapiens |
| 1430 | AAH08081 | 1095 | 100 | BC008081 Similar to KDEL (Lys- | Homo sapiens |
| | | | | Asp-Glu-Leu) endoplasmic | |
| | | | | reticulum protein retention | |
| | | | | receptor 2 | |
| 1430 | AAH14568 | 1095 | 100 | BC014568 Similar to KDEL (Lys- | Homo sapiens |
| | | | | Asp-Glu-Leu) endoplasmic | |
| | | | | reticulum protein retention | |
| | | | | receptor 2 | |
| 1430 | X63745 | 1095 | 100 | KDEL receptor | Homo sapiens |
| 1431 | AF004877 | 7574 | 99 | pro-alpha 2(I) collagen | Homo sapiens |
| 1431 | J03464 | 7554 | 99 | pre-pro-alpha-2 type I collagen | Homo sapiens |
| 1431 | Z74616 | 7596 | 100 | prepro-alpha2(I) collagen | Homo sapiens |
| 1432 | AAH08188 | 946 | 100 | BC008188 Unknown (protein for | Homo sapiens |
| | | | | MGC: 5243) | |
| 1432 | AF021819 | 946 | 100 | RNA-binding protein regulatory | Homo sapiens |
| | | | | subunit | |
| 1432 | AL034417 | 946 | 100 | bK215D11.1 (RNA-binding protein | Homo sapiens |
| | | | | regulatory subunit) | |
| 1433 | AAH08283 | 594 | 100 | BC008283 cholecystokinin | Homo sapiens |
| 1433 | L00354 | 594 | 100 | cholecystokinin | Homo sapiens |
| 1433 | M60458 | 569 | 95 | cholecystokinin | Macaca |
| | | | | | fascicularis |
| 1434 | AAH06794 | 693 | 99 | BC006794 Similar to interferon | Homo sapiens |
| | | | | induced transmembrane protein 3 | |
| | | | | (1-8U) | |
| 1434 | AAH08417 | 698 | 100 | BC008417 Similar to interferon | Homo sapiens |
| | | | | induced transmembrane protein 3 | |
| | | | | (1-8U) | |
| 1434 | BC022439 | 698 | 100 | interferon induced transmembrane | Homo sapiens |
| | | | | protein 3 (1-8U) | |
| 1435 | AAH05993 | 1421 | 100 | BC005993 Unknown (protein for | Homo sapiens |
| | | | | MGC: 14796) | |
| 1435 | AAH08691 | 1421 | 100 | BC008691 Unknown (protein for | Homo sapiens |
| | | | | MGC: 8886) | |
| 1435 | AAH15644 | 1421 | 100 | BC015644 Ras suppressor protein 1 | Homo sapiens |
| 1436 | AAH08938 | 1942 | 100 | BC008938 Similar to | Homo sapiens |
| | | | | histocompatibility 13 | |
| 1436 | AAH08959 | 1942 | 100 | BC008959 Similar to | Homo sapiens |
| | | | | histocompatibility 13 | |
| 1436 | AF483215_1 | 1934 | 99 | AF483215 minor histocompatibility | Homo sapiens |
| | | | | antigen H13 isoform 1 | |
| 1437 | AAH16320 | 2150 | 100 | BC016320 cathepsin D (lysosomal | Homo sapiens |
| | | | | aspartyl protease) | |
| 1437 | M11233 | 2150 | 100 | preprocathepsin D | Homo sapiens |
| 1437 | X05344 | 2150 | 100 | precursor polypeptide (AA −20 to | Homo sapiens |
| | | | | 392) | |
| 1438 | AAH08983 | 1364 | 100 | BC008983 complement component 1, | Homo sapiens |
| | | | | q subcomponent, beta polypeptide | |
| 1438 | X03084 | 1240 | 100 | C1q B-chain precursor | Homo sapiens |
| 1438 | X16874 | 1075 | 79 | precursor polypeptide (AA −25 to | Mus musculus |
| | | | | 228) | |
| 1439 | AAH09177 | 1014 | 100 | BC009177 ras homolog gene family, | Homo sapiens |
| | | | | member C | |
| 1439 | AF498972_1 | 1014 | 100 | AF498972 small GTP binding | Homo sapiens |
| | | | | protein RhoC | |
| 1439 | BC004627 | 1014 | 100 | ras homolog gene family, member C | Mus musculus |
| 1440 | AAH09200 | 1068 | 100 | BC009200 Rho GDP dissociation | Homo sapiens |
| | | | | inhibitor (GDI) beta | |
| 1440 | AF498927_1 | 1068 | 100 | AF498927 Rho GDP dissociation | Homo sapiens |
| | | | | inhibitor beta | |
| 1440 | X69549 | 1068 | 100 | Human rho GDP-dissociation | Homo sapiens |
| | | | | Inhibitor 2(IEF 8120) | |
| 1441 | AAH09201 | 1137 | 100 | BC009201 clathrin, light | Homo sapiens |
| | | | | polypeptide (Lca) | |
| 1441 | AAH19287 | 1137 | 100 | BC019287 clathrin, light | Homo sapiens |
| | | | | polypeptide (Lca) | |
| 1441 | AL158830 | 1137 | 100 | bA421H8.4.2 (clathrin, light | Homo sapiens |
| | | | | polypeptide (LCA)) | |
| 1442 | AAH09232 | 596 | 100 | BC009232 Similar to G antigen 8 | Homo sapiens |
| 1442 | AJ318880 | 596 | 100 | XAGE-2 protein | Homo sapiens |
| 1442 | AJ318891 | 596 | 100 | XAGE-2 protein | Homo sapiens |
| 1443 | AAH03378 | 1149 | 100 | BC003378 high-mobility group | Homo sapiens |
| | | | | (nonhistone chromosomal) protein 1 | |
| 1443 | BC030981 | 1149 | 100 | high-mobility group (nonhistone | Homo sapiens |
| | | | | chromosomal) protein 1 | |
| 1443 | X12597 | 1149 | 100 | HMG-1 protein (AA 1-215) | Homo sapiens |
| 1444 | AB002368 | 5586 | 100 | KIAA0370 | Homo sapiens |
| 1444 | AY026388 | 5765 | 100 | ran binding protein RanBP20 | Homo sapiens |
| 1444 | AY029528 | 5663 | 97 | RANBP20 | Mus musculus |
| 1445 | AAH09799 | 1308 | 100 | BC009799 amphiregulin | Homo sapiens |
| | | | | (schwannoma-derived growth | |
| | | | | factor) | |
| 1445 | M30703 | 1308 | 100 | amphiregulin | Homo sapiens |
| 1445 | M30704 | 1308 | 100 | amphiregulin | Homo sapiens |
| 1446 | AAH09869 | 511 | 100 | BC009869 Unknown (protein for | Homo sapiens |
| | | | | MGC: 16406) | |
| 1446 | AAH15491 | 511 | 100 | BC015491 Unknown (protein for | Homo sapiens |
| | | | | MGC: 8965) | |
| 1446 | BC022326 | 511 | 100 | Unknown (protein for MGC: 22741) | Homo sapiens |
| 1447 | AAH09898 | 1921 | 100 | BC009898 spermine synthase | Homo sapiens |
| 1447 | AD001528 | 1921 | 100 | spermidine aminopropyltransferase | Homo sapiens |
| 1447 | Z49099 | 1916 | 100 | spermine synthase | Homo sapiens |
| 1448 | AL365410 | 1055 | 100 | hypothetical protein | Homo sapiens |
| 1449 | AAH10016 | 1542 | 100 | BC010016 Similar to CD47 antigen | Homo sapiens |
| | | | | (Rh-related antigen, integrin- | |
| | | | | associated signal transducer) | |
| 1449 | AAH12884 | 1542 | 100 | BC012884 Unknown (protein for | Homo sapiens |
| | | | | MGC: 9240) | |
| 1449 | Z25521 | 1542 | 100 | integrin associated protein | Homo sapiens |
| 1450 | AAH10055 | 784 | 100 | BC010055 hypothetical protein | Homo sapiens |
| | | | | PRO2605 | |
| 1450 | AF116721_109 | 642 | 100 | AF116709 PRO2605 | Homo sapiens |
| 1451 | AAH04976 | 634 | 100 | BC004976 Unknown (protein for | Homo sapiens |
| | | | | IMAGE: 2958115) | |
| 1451 | AAH10076 | 634 | 100 | BC010076 Unknown (protein for | Homo sapiens |
| | | | | MGC: 19576) | |
| 1451 | AY061855 | 634 | 100 | mitochondrial ribosomal protein | Homo sapiens |
| | | | | S6 | |
| 1452 | AAH10129 | 907 | 100 | BC010129 Similar to hypothetical | Homo sapiens |
| | | | | protein R33729_1 | |
| 1452 | AAH14655 | 907 | 100 | BC014655 Unknown (protein for | Homo sapiens |
| | | | | MGC: 20383) | |
| 1452 | AL365374 | 894 | 100 | R33729_1 hypothetical protein | Homo sapiens |
| 1453 | AB028894 | 824 | 100 | ribosomal protein S11 | Mus musculus |
| 1453 | BC012641 | 824 | 100 | ribosomal protein S11 | Mus musculus |
| 1453 | U93864 | 824 | 100 | ribosomal protein S11 | Mus musculus |
| 1454 | BC002077 | 1058 | 100 | RAB1, member RAS oncogene family | Mus musculus |
| 1454 | X15744 | 1058 | 100 | GTP-binding protein | Mus musculus |
| 1454 | Y00094 | 1058 | 100 | Ypt1 protein (AA 1-205) | Mus musculus |
| 1455 | AAH02947 | 1482 | 100 | BC002947 folate receptor 1 | Homo sapiens |
| | | | | (adult) | |
| 1455 | U20391 | 1482 | 100 | folate receptor | Homo sapiens |
| 1455 | X62753 | 1482 | 100 | adult folate binding protein | Homo sapiens |
| 1456 | U65932 | 3016 | 100 | extracellular matrix protein 1 | Homo sapiens |
| 1456 | U65938 | 3016 | 100 | extracellular matrix protein 1 | Homo sapiens |
| 1456 | U68186 | 3016 | 100 | extracellular matrix protein 1 | Homo sapiens |
| 1457 | AAH10897 | 541 | 100 | BC010897 Similar to JM27 protein | Homo sapiens |
| 1457 | AF275258_1 | 541 | 100 | AF275258 PAGE-4 | Homo sapiens |
| 1457 | AJ005894 | 541 | 100 | JM27 | Homo sapiens |
| 1458 | AAH11171 | 2528 | 100 | BC011171 serine (or cysteine) | Homo sapiens |
| | | | | proteinase inhibitor, clade G (C1 | |
| | | | | inhibitor), member 1 | |
| 1458 | AF435921_1 | 2524 | 99 | AF435921 C1 esterase inhibitor | Homo sapiens |
| 1458 | X07427 | 2524 | 99 | C1 inhibitor | Homo sapiens |
| 1459 | D38112 | 1803 | 93 | cytochrome b | Homo sapiens |
| 1459 | U09500 | 1802 | 93 | cytochrome b | Homo sapiens |
| 1459 | V00662 | 1807 | 93 | cytochrome B | Homo sapiens |
| 1460 | AAH11514 | 696 | 100 | BC011514 Similar to ribosomal | Homo sapiens |
| | | | | protein L32 | |
| 1460 | K02060 | 696 | 100 | ribosomal protein L32-3A | Mus musculus |
| 1460 | X06483 | 696 | 100 | ribosomal protein L32 | Rattus |
| | | | | | norvegicus |
| 1461 | AAH11786 | 645 | 100 | BC011786 Unknown (protein for | Homo sapiens |
| | | | | MGC: 19839) | |
| 1461 | AF318382_1 | 645 | 100 | AF318382 unknown | Homo sapiens |
| 1461 | X07868 | 456 | 100 | 1.8 kb mRNA (AA 1-84) | Homo sapiens |
| 1462 | AAH11792 | 1649 | 100 | BC011792 Unknown (protein for | Homo sapiens |
| | | | | MGC: 19561) | |
| 1462 | AAH17408 | 1643 | 99 | BC017408 Unknown (protein for | Homo sapiens |
| | | | | MGC: 27221) | |
| 1462 | U16660 | 1603 | 97 | peroxisomal enoyl-CoA hydratase- | Homo sapiens |
| | | | | like protein | |
| 1463 | AAH00159 | 2163 | 100 | BC000159 keratin 17 | Homo sapiens |
| 1463 | AAH11901 | 2163 | 100 | BC01901 Similar to keratin 17 | Homo sapiens |
| 1463 | X62571 | 2163 | 100 | keratin related product | Homo sapiens |
| 1464 | AAH12132 | 3933 | 100 | BC012132 Similar to DEAD/H (Asp- | Homo sapiens |
| | | | | Glu-Ala-Asp/His) box polypeptide 1 | |
| 1464 | BC010624 | 3872 | 97 | Unknown (protein for MGC: 11570) | Mus musculus |
| 1464 | X70649 | 3933 | 100 | member of DEAD box protein family | Homo sapiens |
| 1465 | AF157623_1 | 2466 | 100 | AF157623 HTRA serine protease | Homo sapiens |
| 1465 | D87258 | 2466 | 100 | serin protease with IGF-binding | Homo sapiens |
| | | | | motif | |
| 1465 | Y07921 | 2466 | 100 | novel serine protease, PRSS11 | Homo sapiens |
| 1466 | AF242550_1 | 1030 | 100 | AF242550 cellular nucleic acid | Rattus |
| | | | | binding protein | norvegicus |
| 1466 | AF389887 | 1030 | 100 | zinc finger protein 9 | Homo sapiens |
| 1466 | D45254 | 1030 | 100 | Cellular Nucleic Acid Binding | Rattus |
| | | | | Protein | norvegicus |
| 1467 | AAH14277 | 1191 | 100 | BC014277 Similar to tissue | Homo sapiens |
| | | | | inhibitor of metalloproteinase 3 | |
| | | | | (Sorsby fundus dystrophy, | |
| | | | | pseudoinflammatory) | |
| 1467 | U33114 | 1191 | 100 | tissue inhibitor of | Homo sapiens |
| | | | | metalloproteinases-3 | |
| 1467 | X76227 | 1191 | 100 | tissue inhibitor of | Homo sapiens |
| | | | | metalloproteinases-3 | |
| 1468 | AAH12384 | 1017 | 100 | BC012384 Similar to programmed | Homo sapiens |
| | | | | cell death 6 | |
| 1468 | AF035606 | 1017 | 100 | calcium binding protein | Homo sapiens |
| 1468 | U58773_1 | 1017 | 100 | U58773 calcium binding protein | Homo sapiens |
| 1469 | AAH12464 | 755 | 100 | BC012464 prefoldin 2 | Homo sapiens |
| 1469 | AF117237_1 | 755 | 100 | AF117237 prefoldin subunit 2 | Homo sapiens |
| 1469 | BC026839 | 729 | 96 | Similar to prefoldin 2 | Mus musculus |
| 1470 | AAH08230 | 849 | 100 | BC008230 ribosomal protein L12 | Homo sapiens |
| 1470 | BC018321 | 848 | 99 | ribosomal protein L12 | Mus musculus |
| 1470 | L06505 | 849 | 100 | ribosomal protein L12 | Homo sapiens |
| 1471 | AAH12606 | 1665 | 100 | BC012606 Similar to proteasome | Homo sapiens |
| | | | | (prosome, macropain) 26S subunit, | |
| | | | | non-ATPase, 7 (Mov34 homolog) | |
| 1471 | D50063 | 1637 | 98 | proteasome subunit p40/Mov34 | Homo sapiens |
| | | | | protein | |
| 1471 | M64640 | 1597 | 96 | 36 kD protein | Mus musculus |
| 1472 | AAH11835 | 1485 | 100 | BC011835 Similar to ATPase, | Homo sapiens |
| | | | | Na+/K+ transporting, beta 3 | |
| | | | | polypeptide | |
| 1472 | AF005896 | 1485 | 100 | Na K-ATPase beta-3 subunit | Homo sapiens |
| 1472 | U51478 | 1485 | 100 | sodium/potassium-transporting | Homo sapiens |
| | | | | ATPase beta-3 subunit | |
| 1473 | AAH13041 | 5526 | 100 | BC013041 Unknown (protein for | Homo sapiens |
| | | | | MGC: 4781) | |
| 1473 | M58028 | 5526 | 100 | ubiquitin-activating enzyme E1 | Homo sapiens |
| 1473 | X56976 | 5516 | 99 | ubiquitin activating enzyme E1 | Homo sapiens |
| 1474 | AAH13162 | 491 | 100 | BC013162 Similar to heat shock | Homo sapiens |
| | | | | protein, 30 kDa | |
| 1474 | AF085359 | 491 | 100 | HSPC030 | Homo sapiens |
| 1474 | AF537132 | 491 | 100 | selenoprotein K | Homo sapiens |
| 1475 | AAH13175 | 992 | 100 | BC013175 Similar to novel RGD- | Homo sapiens |
| | | | | containing protein | |
| 1475 | BC029249 | 958 | 96 | dynactin 6 | Mus musculus |
| 1475 | D84145 | 992 | 100 | WS-3 | Homo sapiens |
| 1476 | BC003825 | 2344 | 100 | tubulin, beta 5 | Mus musculus |
| 1476 | X04663 | 2344 | 100 | beta-tubulin AA 1-444 (79 is 1st | Mus musculus |
| | | | | base in codon) | |
| 1476 | X07011 | 2344 | 100 | c(beta)7 tubulin (AA 1-444) | Gallus |
| | | | | | gallus |
| 1477 | A47413 | 3336 | 96 | CALPASTATINE HUMAINE | Homo sapiens |
| 1477 | AAH13579 | 3420 | 100 | BC013579 Similar to calpastatin | Homo sapiens |
| 1477 | D16217 | 3340 | 93 | calpastatin | Homo sapiens |
| 1478 | BC024378 | 567 | 100 | defender against cell death 1 | Mus musculus |
| 1478 | Y13335 | 567 | 100 | DAD-1 | Mus musculus |
| 1478 | Y13336 | 567 | 100 | DAD-1 | Rattus |
| | | | | | norvegicus |
| 1479 | AAH13975 | 3963 | 100 | BC013975 Similar to sema domain, | Homo sapiens |
| | | | | immunoglobulin domain (Ig), short | |
| | | | | basic domain, secreted, | |
| | | | | (semaphorin) 3B | |
| 1479 | BC024220 | 3963 | 100 | Unknown (protein for MGC: 1483) | Homo sapiens |
| 1479 | U28369 | 3951 | 99 | semaphorin V | Homo sapiens |
| 1480 | AAH14142 | 3503 | 100 | BC014142 Similar to | Homo sapiens |
| | | | | glucuronidase, beta | |
| 1480 | AX147652 | 3496 | 99 | unnamed protein product | Homo sapiens |
| 1480 | M15182 | 3496 | 99 | beta-glucuronidase precursor (EC | Homo sapiens |
| | | | | 3.2.1.31) | |
| 1481 | AB022163 | 2024 | 92 | mouse ortholog of the zebrafish | Mus musculus |
| | | | | hagoromo gene | |
| 1481 | AF281859 | 2217 | 100 | dactylin | Homo sapiens |
| 1481 | BC027031 | 2024 | 92 | f-box and WD-40 domain protein 4 | Mus musculus |
| 1482 | AAH01377 | 1114 | 100 | BC001377 DKFZP586G1722 protein | Homo sapiens |
| 1482 | AAH06514 | 1114 | 100 | BC006514 DKFZP586G1722 protein | Homo sapiens |
| 1482 | AAH14391 | 1114 | 100 | BC014391 DKFZP586G1722 protein | Homo sapiens |
| 1483 | AF159256_1 | 1147 | 100 | AF159256 Lps/Ran GTPase | Mus musculus |
| 1483 | AF306457_1 | 1147 | 100 | AF306457 GTPase | Rattus |
| | | | | | norvegicus |
| 1483 | BC014829 | 1147 | 100 | RAN, member RAS oncogene family | Mus musculus |
| 1484 | AAH15000 | 1347 | 100 | BC015000 Similar to major | Homo sapiens |
| | | | | histocompatibility complex, class | |
| | | | | II, DP beta 1 | |
| 1484 | M57466 | 1306 | 96 | light chain | Homo sapiens |
| 1484 | X01426 | 1301 | 96 | SB-2-beta precursor polypeptide | Homo sapiens |
| | | | | (aa −29 to 229) | |
| 1485 | AAH15039 | 1006 | 100 | BC015039 microfibrillar- | Homo sapiens |
| | | | | associated protein 2 | |
| 1485 | AL049569 | 1006 | 100 | dJ37C10.4 (microfibrillar- | Homo sapiens |
| | | | | associated protein 2 | |
| | | | | (microfibril-associated | |
| | | | | glycoprotein precursor, MGAP1)) | |
| 1485 | U19718 | 1006 | 100 | microfibril-associated | Homo sapiens |
| | | | | glycoprotein | |
| 1486 | AF117383_1 | 746 | 100 | AF117383 placental protein 13; | Homo sapiens |
| | | | | PP13 | |
| 1486 | AY055826 | 746 | 100 | placenta protein 13 | Homo sapiens |
| 1486 | BC022257 | 510 | 69 | Similar to placental protein 13- | Homo sapiens |
| | | | | like protein | |
| 1487 | AAH02387 | 2063 | 100 | BC002387 nucleosome assembly | Homo sapiens |
| | | | | protein 1-like 1 | |
| 1487 | AAH15599 | 2063 | 100 | BC015599 nucleosome assembly | Homo sapiens |
| | | | | protein 1-like 1 | |
| 1487 | AL162068 | 2063 | 100 | hypothetical protein | Homo sapiens |
| 1488 | A03911 | 2017 | 99 | glia-derived neurite-promoting | Homo sapiens |
| | | | | factor (GdNPF) | |
| 1488 | AAH15663 | 2040 | 100 | BC015663 Similar to serine (or | Homo sapiens |
| | | | | cysteine) proteinase inhibitor, | |
| | | | | clade E (nexin, plasminogen | |
| | | | | activator inhibitor type 1) | |
| | | | | member 2 | |
| 1488 | M17783 | 2016 | 99 | glia-derived nexin precursor | Homo sapiens |
| 1489 | AAH02403 | 3107 | 100 | BC002403 lectin, galactoside- | Homo sapiens |
| | | | | binding, soluble, 3 binding | |
| | | | | protein (galectin 6 binding | |
| | | | | protein) | |
| 1489 | AAH02998 | 3107 | 100 | BC002998 lectin, galactoside- | Homo sapiens |
| | | | | binding, soluble, 3 binding | |
| | | | | protein (galectin 6 binding | |
| | | | | protein) | |
| 1489 | AAH15761 | 3107 | 100 | BC015761 lectin, galactoside- | Homo sapiens |
| | | | | binding, soluble, 3 binding | |
| | | | | protein | |
| 1490 | AAH15032 | 2122 | 100 | BC015032 ribosomal protein L3 | Homo sapiens |
| 1490 | AAH15767 | 2122 | 100 | BC015767 ribosomal protein L3 | Homo sapiens |
| 1490 | BC008003 | 2122 | 100 | ribosomal protein L3 | Homo sapiens |
| 1491 | AF052694 | 2391 | 100 | alpha-tubulin | Meriones |
| | | | | | unguiculatus |
| 1491 | BC002219 | 2391 | 100 | Similar to tubulin alpha 1 | Mus musculus |
| 1491 | BC008117 | 2391 | 100 | tubulin alpha 1 | Mus musculus |
| 1492 | AAH21822 | 264 | 71 | BC021822 Unknown (protein for | Homo sapiens |
| | | | | MGC: 24986) | |
| 1492 | AK025116 | 265 | 71 | unnamed protein product | Homo sapiens |
| 1492 | AK090511 | 279 | 71 | unnamed protein product | Homo sapiens |
| 1493 | AAH02449 | 1196 | 99 | BC002449 Similar to CG10641 gene | Homo sapiens |
| | | | | product | |
| 1493 | AAH04128 | 1331 | 99 | BC004128 Unknown (protein for | Homo sapiens |
| | | | | IMAGE: 3940060) | |
| 1493 | AK023674 | 1199 | 100 | unnamed protein product | Homo sapiens |
| 1494 | AAH01537 | 2971 | 100 | BC001537 Unknown (protein for | Homo sapiens |
| | | | | MGC: 786) | |
| 1494 | AB021743 | 2968 | 99 | PR65 | Mus musculus |
| 1494 | 2C006606 | 2968 | 99 | protein phosphatase 2 (formerly | Mus musculus |
| | | | | 2A), regulatory subunit A (PR | |
| | | | | 65), alpha isoform | |
| 1495 | AAH09642 | 939 | 100 | BC009642 FXYD domain-containing | Homo sapiens |
| | | | | ion transport regulator 5 | |
| 1495 | AB072911 | 939 | 100 | dysadherin | Homo sapiens |
| 1495 | AF161462_1 | 923 | 98 | AF161462 HSPC113 | Homo sapiens |
| 1496 | AAH09687 | 869 | 100 | BC009687 epithelial membrane | Homo sapiens |
| | | | | protein 2 | |
| 1496 | AY057060 | 869 | 100 | epithelial membrane protein 2 | Homo sapiens |
| 1496 | U52100 | 869 | 100 | XMP | Homo sapiens |
| 1497 | AB012214 | 6727 | 78 | DNA cytosine 5 methyltransferase | Rattus |
| | | | | | Rattus |
| 1497 | AF180682 | 6869 | 100 | DNA (cytosine-5)- | Homo sapiens |
| | | | | methyltransferase | |
| 1497 | X63692 | 8587 | 100 | DNA (cytosine-5-)- | Homo sapiens |
| | | | | methyltransferase | |
| 1498 | AAH15961 | 961 | 100 | BC015961 adrenomedullin | Homo sapiens |
| 1498 | D14874 | 961 | 100 | adrenomedullin precursor | Homo sapiens |
| 1498 | S73906 | 961 | 100 | adrenomedullin; AM | Homo sapiens |
| 1499 | AAH15973 | 514 | 100 | BC015973 S100 calcium-binding | Homo sapiens |
| | | | | protein A10 (annexin II ligand, | |
| | | | | calpactin I, light polypeptide | |
| | | | | (p11)) | |
| 1499 | M38591 | 514 | 100 | cellular ligand of annexin II | Homo sapiens |
| 1499 | M81457 | 514 | 100 | calpactin I light chain | Homo sapiens |
| 1500 | AAH16056 | 1137 | 100 | BC016056 claudin 3 | Homo sapiens |
| 1500 | AB000714 | 1137 | 100 | RVP1 | Homo sapiens |
| 1500 | AF007189 | 1137 | 100 | claudin 3 | Homo sapiens |
| 1501 | AAH16142 | 1432 | 100 | BC016142 Similar to RIKEN cDNA | Homo sapiens |
| | | | | 2310032N20 gene | |
| 1501 | AAH20773 | 1432 | 100 | BC020773 Unknown (protein for | Homo sapiens |
| | | | | MGC: 22685) | |
| 1501 | AX405824 | 1432 | 100 | unnamed protein product | Homo sapiens |
| 1502 | AF315378_1 | 1955 | 98 | AF315378 suppressor of | Rattus |
| | | | | profilin/p41 of actin-related | norvegicus |
| | | | | complex 2/3 | |
| 1502 | BC039594 | 1964 | 99 | actin related protein 2/3 | Homo sapiens |
| | | | | complex, subunit 1A, 41 kDa | |
| 1502 | Y08999 | 1980 | 100 | Sop2p-like protein | Homo sapiens |
| 1503 | AF492677_1 | 383 | 100 | AF492677 odd homeobox 1 protein | Homo sapiens |
| | | | | isoform A | |
| 1503 | AF492680_1 | 383 | 100 | AF492680 odd homeobox 1 protein | Homo sapiens |
| | | | | isoform A | |
| 1503 | AF492681_1 | 383 | 100 | AF492681 odd homeobox 1 protein | Homo sapiens |
| | | | | isoform A | |
| 1504 | AK056992 | 2163 | 100 | unnamed protein product | Homo sapiens |
| 1504 | AX392121 | 2155 | 99 | unnamed protein product | Homo sapiens |
| 1504 | AY033237 | 2155 | 99 | alcohol dehydrogenase 8 | Homo sapiens |
| 1505 | AAH16748 | 485 | 100 | BC016748 ribosomal protein L37a | Homo sapiens |
| 1505 | X14069 | 485 | 100 | ribosomal protein L37a (AA 1-92 | Rattus |
| | | | | | Rattus |
| 1505 | X73331 | 485 | 100 | ribosomal protein L37a | Mus musculus |
| 1506 | AAH12807 | 3702 | 100 | BC012807 Unknown (protein for | Homo sapiens |
| | | | | MGC: 3483) | |
| 1506 | AAH14485 | 3702 | 100 | BC014485 Unknown (protein for | Homo sapiens |
| | | | | MGC: 23206) | |
| 1506 | AAH16753 | 3702 | 100 | BC016753 Unknown (protein for | Homo sapiens |
| | | | | MGC: 1138) | |
| 1507 | AAH15834 | 1724 | 100 | BC015834 annexin A2 | Homo sapiens |
| 1507 | AAH16774 | 1724 | 100 | BC016774 annexin A2 | Homo sapiens |
| 1507 | AAH21114 | 1724 | 100 | BC021114 annexin A2 | Homo sapiens |
| 1508 | AAH17343 | 644 | 100 | BC017343 ribosomal protein L31 | Homo sapiens |
| 1508 | BC008223 | 644 | 100 | ribosomal protein L31 | Mus musculus |
| 1508 | X04809 | 644 | 100 | ribosomal protein L31 (AA 1-125) | Rattus |
| | | | | | norvegicus |
| 1509 | AAH17378 | 2955 | 100 | BC017378 hexosaminidase B (beta | Homo sapiens |
| | | | | polypeptide) | |
| 1509 | AF378118_1 | 2955 | 100 | AF378118 cervical cancer proto- | Homo sapiens |
| | | | | oncogene 7 | |
| 1509 | M23294 | 2955 | 100 | beta-hexosaminidase beta-subunit | Homo sapiens |
| 1510 | AAH12168 | 1373 | 100 | BC012168 Similar to proteasome | Homo sapiens |
| | | | | (prosome, macropain) subunit, | |
| | | | | beta type, 4 | |
| 1510 | AAH17451 | 1373 | 100 | BC017451 proteasome (prosome, | Homo sapiens |
| | | | | macropain) subunit, beta type, 4 | |
| 1510 | AAH17486 | 1373 | 100 | BC017486 proteasome (prosome, | Homo sapiens |
| | | | | macropain) subunit, beta type, 4 | |
| 1511 | AAH06124 | 2618 | 100 | BC006124 IMP (inosine | Homo sapiens |
| | | | | monophosphate) dehydrogenase 2 | |
| 1511 | AAH12840 | 2618 | 100 | BC012840 IMP (inosine | Homo sapiens |
| | | | | monophosphate) dehydrogenase 2 | |
| 1511 | AAH15567 | 2618 | 100 | BC015567 IMP (inosine | Homo sapiens |
| | | | | monophosphate) dehydrogenase 2 | |
| 1512 | AAH07457 | 1103 | 100 | BC007457 hypothetical protein | Homo sapiens |
| 1512 | AAH20796 | 1103 | 100 | BC020796 hypothetical protein | Homo sapiens |
| | | | | HSPC177 | |
| 1512 | AAH21168 | 1103 | 100 | BC021168 hypothetical protein | Homo sapiens |
| | | | | HSPC177 | |
| 1513 | AAH04904 | 2894 | 99 | BC004904 nuclear RNA export | Homo sapiens |
| | | | | factor 1 | |
| 1513 | BC028041 | 2894 | 99 | nuclear RNA export factor 1 | Homo sapiens |
| 1513 | U80073 | 2905 | 100 | tip associating protein | Homo sapiens |
| 1514 | AF064238_1 | 4503 | 97 | AF064238 smoothelin large isoform | Homo sapiens |
| | | | | L2 | |
| 1514 | AY061971 | 4653 | 100 | smoothelin-B2 | Homo sapiens |
| 1514 | AY061972 | 4533 | 96 | smoothelin-B3 | Homo sapiens |
| 1515 | AAH17773 | 1214 | 100 | BC017773 triggering receptor | Homo sapiens |
| | | | | expressed on myeloid cells 1 | |
| 1515 | AF196329_1 | 1214 | 100 | AF196329 triggering receptor | Homo sapiens |
| | | | | expressed on monocytes 1 | |
| 1515 | AF287008_1 | 1214 | 100 | AF287008 triggering receptor | Homo sapiens |
| | | | | expressed on monocytes 1 | |
| 1516 | AAH17891 | 579 | 100 | BC017891 vesicle-associated | Homo sapiens |
| | | | | membrane protein 5 (myobrevin) | |
| 1516 | AF054825 | 579 | 100 | VAMP5 | Homo sapiens |
| 1516 | AF077197 | 579 | 100 | VAMP5-like protein | Homo sapiens |
| 1517 | AAH17931 | 819 | 100 | BC017931 Similar to RIKEN cDNA | Homo sapiens |
| | | | | 1110055A02 gene | |
| 1517 | AF400652_1 | 819 | 100 | AF400652 thyroid hormone receptor | Homo sapiens |
| | | | | interacting protein 3 | |
| 1517 | L40410 | 806 | 100 | thyroid receptor interactor | Homo sapiens |
| 1518 | AAH18732 | 1606 | 100 | BC018732 Unknown (protein for | Homo sapiens |
| | | | | MGC: 31847) | |
| 1518 | AF125533_1 | 1606 | 100 | AF125533 NADH-cytochrome b5 | Homo sapiens |
| | | | | reductase isoform | |
| 1518 | AX083421 | 1606 | 100 | unnamed protein product | Homo sapiens |
| 1519 | AAH02453 | 3263 | 100 | BC002453 heat shock 70 kD protein | Homo sapiens |
| | | | | 1A | |
| 1519 | AAH09322 | 3263 | 100 | BC009322 heat shock 70 kD protein | Homo sapiens |
| | | | | 1A | |
| 1519 | AAH18740 | 3263 | 100 | BC018740 heat shock 70 kD protein | Homo sapiens |
| | | | | 1A | |
| 1520 | 1680052_1 | 2856 | 100 | S62076 lysosomal enzyme beta-N- | Homo sapiens |
| | | | | acetylhexosaminidase A | |
| 1520 | AAH18927 | 2856 | 100 | BC018927 hexosaminidase A (alpha | Homo sapiens |
| | | | | polypeptide) | |
| 1520 | M16424 | 2856 | 100 | beta-hexosaminidase alpha chain | Homo sapiens |
| 1521 | AAH12992 | 2115 | 99 | BC012992 Similar to RNA binding | Homo sapiens |
| | | | | motif, single stranded | |
| | | | | interacting protein 1 | |
| 1521 | AAH12993 | 2115 | 99 | BC012993 Similar to RNA binding | Homo sapiens |
| | | | | motif, single stranded | |
| | | | | interacting protein 1 | |
| 1521 | AAH18951 | 2142 | 100 | BC018951 RNA binding motif, | Homo sapiens |
| | | | | single stranded interacting | |
| | | | | protein 1 | |
| 1522 | AAH16346 | 908 | 100 | BC016346 Unknown (protein for | Homo sapiens |
| | | | | MGC: 24392) | |
| 1522 | AAH16354 | 908 | 100 | BC016354 Unknown (protein for | Homo sapiens |
| | | | | MGC: 24480) | |
| 1522 | AAH18990 | 908 | 100 | BC018990 Unknown (protein for | Homo sapiens |
| | | | | MGC: 20176) | |
| 1523 | AAH01206 | 2235 | 99 | BC001206 Unknown (protein for | Homo sapiens |
| | | | | MGC: 3208) | |
| 1523 | AK025822 | 3505 | 99 | unnamed protein product | Homo sapiens |
| 1523 | AL833865 | 3414 | 100 | hypothetical protein | Homo sapiens |
| 1524 | AAH06772 | 769 | 100 | BC006772 ribosomal protein S13 | Homo sapiens |
| 1524 | BC029732 | 769 | 100 | ribosomal protein S13 | Homo sapiens |
| 1524 | X53378 | 769 | 100 | ribosomal protein S13 | Rattus |
| | | | | | Rattus |
| 1525 | J05192 | 1982 | 100 | alpha-actin | Homo sapiens |
| 1525 | X06801 | 1968 | 99 | alpha-actin (AA 1-377) | Rattus |
| | | | | | Rattus |
| 1525 | X13297 | 1968 | 99 | alpha-actin (AA 1-377) | Mus musculus |
| 1526 | AAH00260 | 1675 | 99 | BC000260 aldo-keto reductase | Homo sapiens |
| | | | | family 1, member B1 (aldose | |
| | | | | reductase) | |
| 1526 | AAH10391 | 1675 | 99 | BC010391 aldo-keto reductase | Homo sapiens |
| | | | | family 1, member B1 (aldose | |
| | | | | reductase) | |
| 1526 | J05017 | 1677 | 100 | aldose reductase | Homo sapiens |
| 1527 | M22246 | 2623 | 100 | aromatase precursor (EC | Homo sapiens |
| | | | | 1.14.14.1) | |
| 1527 | X13589 | 2623 | 100 | aromatase (AA 1-503) | Homo sapiens |
| 1527 | Y07508 | 2620 | 99 | aromatase (AA 1-503) | Homo sapiens |
| 1528 | M59916 | 3466 | 100 | acid sphingomyelinase | Homo sapiens |
| 1528 | M81780 | 3450 | 99 | acid sphingomyelinase | Homo sapiens |
| 1528 | X63600 | 3461 | 99 | acid sphingomyelinase | Homo sapiens |
| 1529 | AAH21993 | 1707 | 100 | BC021993 guanine nucleotide | Homo sapiens |
| | | | | binding protein (G protein), beta | |
| | | | | polypeptide 2-like 1 | |
| 1529 | M24193 | 1707 | 100 | MHC B complex protein 12.3 | Gallus |
| | | | | | gallus |
| 1529 | X75313 | 1707 | 100 | B complex protein mRNA 12-3 | Mus musculus |
| 1530 | AAH05358 | 642 | 100 | BC005358 non-histone chromosome | Homo sapiens |
| | | | | protein 2 (S. cerevisiae)-like 1 | |
| 1530 | AAH19282 | 642 | 100 | BC019282 non-histone chromosome | Homo sapiens |
| | | | | protein 2 (S. cerevisiae)-like 1 | |
| 1530 | BC026755 | 642 | 100 | Similar to sperm specific antigen 1 | Mus musculus |
| 1531 | AAH19296 | 2747 | 100 | BC019296 chaperonin containing | Homo sapiens |
| | | | | TCP1, subunit 7 (eta) | |
| 1531 | AF026292 | 2747 | 100 | chaperonin containing t-complex | Homo sapiens |
| | | | | polypeptide 1, eta subunit; CCT- | |
| | | | | eta | |
| 1531 | BC008255 | 2628 | 95 | chaperonin subunit 7 (eta) | Mus musculus |
| 1532 | BC035220 | 3879 | 99 | similar to complement component | Homo sapiens |
| 1532 | M14058 | 3885 | 100 | human complement C1r | Homo sapiens |
| 1532 | X04701 | 3879 | 99 | precursor of C1r (AA −17 to 688) | Homo sapiens |
| 1533 | J04080 | 3789 | 100 | complement component C1s | Homo sapiens |
| 1533 | M18767 | 3789 | 100 | complement subcomponent C1s | Homo sapiens |
| | | | | precursor | |
| 1533 | X06596 | 3789 | 100 | complement protein C1s precursor | Homo sapiens |
| 1534 | AAH03175 | 2072 | 100 | BC003175 N-myc downstream | Homo sapiens |
| | | | | regulated | |
| 1534 | AF004162 | 2072 | 100 | nickel-specific induction protein | Homo sapiens |
| 1534 | D87953 | 2072 | 100 | RTP | Homo sapiens |
| 1535 | AF085250 | 759 | 100 | calmodulin | Perca |
| | | | | | flavescens |
| 1535 | D83350 | 759 | 100 | calmodulin | Anas |
| | | | | | platyrhynchos |
| 1535 | K01945 | 759 | 100 | calmodulin (cDNA clone 71) | Xenopus |
| | | | | | laevis |
| 1536 | AAH07911 | 2282 | 100 | BC007911 calreticulin | Homo sapiens |
| 1536 | AAH20493 | 2282 | 100 | BC020493 calreticulin | Homo sapiens |
| 1536 | AY047586 | 2282 | 100 | calreticulin | Homo sapiens |
| 1537 | AAH16300 | 533 | 100 | BC016300 S100 calcium-binding | Homo sapiens |
| | | | | protein A4 (calcium protein, | |
| | | | | calvasculin, metastasin, murine | |
| | | | | placental homolog) | |
| 1537 | Z18950 | 533 | 100 | CAPL | Homo sapiens |
| 1537 | Z33457 | 533 | 100 | mts1 | Homo sapiens |
| 1538 | AAH01506 | 710 | 100 | BC001506 CD59 antigen p18-20 | Homo sapiens |
| | | | | (antigen identified by monoclonal | |
| | | | | antibodies 16.3A5, EJ16, EJ30, | |
| | | | | EL32 and G344) | |
| 1538 | X16447 | 710 | 100 | precursor polypeptide (AA −25 to | Homo sapiens |
| | | | | 103) | |
| 1538 | X17198 | 710 | 100 | CD59 antigen precursor | Homo sapiens |
| 1539 | AAH06290 | 898 | 100 | BC006290 chorionic gonadotropin, | Homo sapiens |
| | | | | beta polypeptide | |
| 1539 | BC022796 | 898 | 100 | Unknown (protein for MGC: 39080) | Homo sapiens |
| 1539 | BC030994 | 898 | 100 | chorionic gonadotropin, beta | Homo sapiens |
| | | | | polypeptide | |
| 1540 | J03225 | 1674 | 100 | lipoprotein-associated | Homo sapiens |
| | | | | coagulation inhibitor precursor | |
| 1540 | M58650 | 1674 | 100 | lipoprotein associated | Homo sapiens |
| | | | | coagulation inhibitor | |
| 1540 | M59499 | 1674 | 100 | lipoprotein-associated | Homo sapiens |
| | | | | coagulation inhibitor | |
| 1540 | M59499 | 1674 | 100 | lipoprotein-associated | Homo sapiens |
| | | | | coagulation inhibitor | |
| 1541 | AAH14167 | 1072 | 100 | BC014167 Unknown (protein for | Homo sapiens |
| | | | | MGC: 20892) | |
| 1541 | AAH20804 | 1072 | 100 | BC020804 ribosomal protein L13 | Homo sapiens |
| 1541 | BC027463 | 1072 | 100 | ribosomal protein L13 | Homo sapiens |
| 1542 | AAH21136 | 1333 | 100 | BC021136 Unknown (protein for | Homo sapiens |
| | | | | MGC: 32056) | |
| 1542 | AF097362_1 | 1333 | 100 | AF097362 gamma-interferon | Homo sapiens |
| | | | | inducible lysosomal thiol | |
| | | | | reductase | |
| 1542 | BC031020 | 1329 | 99 | interferon, gamma-inducible | Homo sapiens |
| | | | | protein 30 | |
| 1543 | AAH07008 | 929 | 100 | BC007008 crystallin, alpha B | Homo sapiens |
| 1543 | M28638 | 929 | 100 | alpha-B2-crystallin | Homo sapiens |
| 1543 | S45630 | 929 | 100 | alpha B-crystallin | Homo sapiens |
| 1544 | BC003775 | 1169 | 99 | casein kinase II, beta subunit | Mus musculus |
| 1544 | M30448 | 1174 | 100 | casein kinase II beta subunit | Homo sapiens |
| 1544 | M59458 | 1169 | 99 | casein kinase II beta subunit | Gallus |
| | | | | | gallus |
| 1545 | M77820 | 6209 | 50 | fibronectin | Xenopus |
| | | | | | laevis |
| 1545 | X02761 | 12570 | 99 | fibronectin precursor | Homo sapiens |
| 1545 | X15906 | 7305 | 65 | precursor polypeptide (AA −32 to | Rattus |
| | | | | 2445) | norvegicus |
| 1546 | BC032329 | 2740 | 99 | cytochrome P450, subfamily XIA | Homo sapiens |
| | | | | (cholesterol side chain cleavage) | |
| 1546 | M14565 | 2753 | 100 | cholesterol side-chain cleavage | Homo sapiens |
| | | | | enzyme P450scc (EC 1.14.15.67) | |
| 1546 | X05367 | 2734 | 99 | desmolase | Homo sapiens |
| 1547 | AF318372_1 | 592 | 99 | AF318372 unknown | Homo sapiens |
| 1547 | AJ318881 | 601 | 100 | XAGE-3 protein | Homo sapiens |
| 1547 | AJ318893 | 601 | 100 | XAGE-3 protein | Homo sapiens |
| 1548 | AAH18641 | 2406 | 100 | BC018641 eukaryotic translation | Homo sapiens |
| | | | | elongation factor 1 alpha 1 | |
| 1548 | AAH21686 | 2406 | 100 | BC021686 eukaryotic translation | Homo sapiens |
| | | | | elongation factor 1 alpha 1 | |
| 1548 | BC028674 | 2406 | 100 | eukaryotic translation elongation | Homo sapiens |
| | | | | factor 1 alpha 1 | |
| 1549 | AAH07044 | 2377 | 100 | BC007044 fibrinogen, gamma | Homo sapiens |
| | | | | polypeptide | |
| 1549 | AAH21674 | 2377 | 100 | BC021674 fibrinogen, gamma | Homo sapiens |
| | | | | polypeptide | |
| 1549 | AF350254_1 | 2377 | 100 | AF350254 fibrinogen gamma chain, | Homo sapiens |
| | | | | isoform gamma-A precursor | |
| 1550 | AAH07785 | 2357 | 100 | BC007785 Unknown (protein for | Homo sapiens |
| | | | | IMAGE: 2819608) | |
| 1550 | AAH21565 | 2387 | 100 | BC021565 Unknown (protein for | Homo sapiens |
| | | | | MGC: 31904) | |
| 1550 | AF121858_1 | 2387 | 100 | AF121858 sorting nexin 8 | Homo sapiens |
| 1551 | AAH05929 | 1222 | 100 | BC005929 proteoglycan 2, bone | Homo sapiens |
| | | | | narrow (natural killer cell | |
| | | | | activator, eosinophil granule | |
| | | | | major basic protein) | |
| 1551 | X14088 | 1222 | 100 | major basic protein precusor (AA | Homo sapiens |
| | | | | 1-222) | |
| 1551 | Y00809 | 1222 | 100 | major basic preproprotein (AA −15 | Homo sapiens |
| | | | | to 207) | |
| 1552 | AL050169 | 951 | 100 | hypothetical protein | Homo sapiens |
| 1552 | M34046 | 951 | 100 | placental protein 14 precursor | Homo sapiens |
| | | | | (PP14) | |
| 1552 | M61886 | 951 | 100 | pregnancy-associated endometrial | Homo sapiens |
| | | | | alpha2-globulin | |
| 1553 | AAH15641 | 2224 | 100 | BC015641 enolase 1, (alpha) | Homo sapiens |
| 1553 | BC022545 | 2224 | 100 | enolase 1, (alpha) | Homo sapiens |
| 1553 | BC027725 | 2224 | 100 | enolase 1, (alpha) | Homo sapiens |
| 1554 | AF272142 | 2649 | 100 | cytochrome P450 | Homo sapiens |
| 1554 | BC032594 | 2649 | 100 | cytochrome P450, subfamily IIJ | Homo sapiens |
| | | | | (arachidonic acid epoxygenase) | |
| | | | | polypeptide 2 | |
| 1554 | U37143 | 2649 | 100 | cytochrome P450 monooxygenase | Homo sapiens |
| | | | | CYP2J2 | |
| 1555 | AAH17123 | 1367 | 100 | BC017123 ribosomal protein S3A | Homo sapiens |
| 1555 | AAH19072 | 1367 | 100 | BC019072 ribosomal protein S3A | Homo sapiens |
| 1555 | BC030161 | 1367 | 100 | ribosomal protein S3A | Homo sapiens |
| 1556 | AB042200 | 2004 | 88 | low-density lipoprotein receptor- | Mus musculus |
| | | | | related protein 9 | |
| 1556 | AL834518 | 2154 | 99 | hypothetical protein | Homo sapiens |
| 1556 | AX359701 | 2268 | 99 | unnamed protein product | Homo sapiens |
| 1557 | BC040431 | 5104 | 99 | glucosidase, alpha; acid (Pompe | Homo sapiens |
| | | | | disease, glycogen storage disease | |
| | | | | type II) | |
| 1557 | M34424 | 5105 | 100 | acid alpha-glucosidase | Homo sapiens |
| 1557 | X55080 | 5105 | 100 | acid alpha-glucosidase | Homo sapiens |
| 1558 | AAH10914 | 768 | 100 | BC010914 Similar to hemoglobin, | Homo sapiens |
| | | | | gamma G | |
| 1558 | BC029387 | 768 | 100 | hemoglobin, gamma G | Homo sapiens |
| 1558 | M91037 | 768 | 100 | G-gamma globin | Homo sapiens |
| 1559 | AY148100 | 4568 | 100 | colony stimulating factor 3 | Homo sapiens |
| | | | | receptor (granulocyte) | |
| 1559 | M59818 | 4568 | 100 | granulocyte colony-stimulating | Homo sapiens |
| | | | | factor receptor | |
| 1559 | X55721 | 4568 | 100 | granulocyte colony stimulating | Homo sapiens |
| | | | | factor receptor 25-1 | |
| 1560 | AAH00013 | 1579 | 100 | BC000013 insulin-like growth | Homo sapiens |
| | | | | factor binding protein 3 | |
| 1560 | AAH18962 | 1579 | 100 | BC018962 insulin-like growth | Homo sapiens |
| | | | | factor binding protein 3 | |
| 1560 | M35878 | 1579 | 100 | growth factor-binding protein-3 | Homo sapiens |
| | | | | precursor | |
| 1561 | M23595 | 1413 | 100 | insulin-like growth factor | Homo sapiens |
| | | | | binding protein 1 | |
| 1561 | M59316 | 1413 | 100 | insulin-like growth factor | Homo sapiens |
| | | | | binding protein-1 | |
| 1561 | X12385 | 1413 | 100 | PP12 precorsor (AA −25 to 234) | Homo sapiens |
| 1562 | BC041218 | 676 | 100 | H3 histone, family 3B | Xenopus |
| | | | | | laevis |
| 1562 | M11393 | 676 | 100 | histone 3.3 | Gallus |
| | | | | | gallus |
| 1562 | Y00392 | 676 | 100 | histone H3.3B (AA 1-136) | Gallus |
| | | | | | gallus |
| 1563 | AF523281 | 1916 | 99 | MHC class Ib antigen | Homo sapiens |
| 1563 | AF523283 | 1916 | 99 | MHC class Ib antigen | Homo sapiens |
| 1563 | M20022 | 1922 | 100 | HLA-E class I protein precursor | Homo sapiens |
| 1564 | AAH03569 | 1980 | 100 | BC003569 E74-like factor 3 (ets | Homo sapiens |
| | | | | domain transcription factor, | |
| | | | | epithelial-specific) | |
| 1564 | AF017307 | 1980 | 100 | Ets-related transcription factor | Homo sapiens |
| 1564 | AF110184_1 | 1980 | 100 | AF110184 epithelium-restricted | Homo sapiens |
| | | | | Ets protein ESX | |
| 1565 | AF523305 | 1810 | 100 | MHC class Ib antigen | Homo sapiens |
| 1565 | AF523306 | 1810 | 100 | MHC class Ib antigen | Homo sapiens |
| 1565 | AF523309 | 1810 | 100 | MHC class Ib antigen | Homo sapiens |
| 1566 | AAH09507 | 836 | 99 | BC009507 Unknown (protein for | Homo sapiens |
| | | | | MGC: 3945) | |
| 1566 | AY168648 | 836 | 99 | ubiquitin-like protein ISG15 | Homo sapiens |
| 1566 | M13755 | 839 | 100 | 17-kDa protein | Homo sapiens |
| 1567 | AB033054 | 2567 | 94 | KIAA1228 protein | Homo sapiens |
| 1567 | AF099138 | 1352 | 50 | GLUT4 vesicle protein | Rattus |
| | | | | | norvegicus |
| 1567 | BC011482 | 1348 | 50 | Similar to membrane bound C2 | Mus musculus |
| | | | | domain containing protein | |
| 1568 | AAH10853 | 1129 | 100 | BC010853 Similar to integral type | Homo sapiens |
| | | | | I protein | |
| 1568 | AAH17495 | 1129 | 100 | BC017495 integral type I protein | Homo sapiens |
| 1568 | BC022232 | 1129 | 100 | integral type I protein | Homo sapiens |
| 1569 | AF357203_1 | 1832 | 97 | AF357203 MAP kinase phosphatase-1 | Rattus |
| | | | | | norvegicus |
| 1569 | BC022463 | 1886 | 100 | dual specificity phosphatase 1 | Homo sapiens |
| 1569 | X68277 | 1886 | 100 | protein-tyrosine phosphatase | Homo sapiens |
| 1570 | AAH09407 | 687 | 100 | BC009407 ribosomal protein S17 | Homo sapiens |
| 1570 | AAH19899 | 687 | 100 | BC019899 ribosomal protein S17 | Homo sapiens |
| 1570 | BC022370 | 687 | 100 | ribosomal protein S17 | Homo sapiens |
| 1571 | AAH15105 | 1370 | 100 | BC015105 proteasome (prosome, | Homo sapiens |
| | | | | macropain) subunit, alpha type, 1 | |
| 1571 | AAH15356 | 1370 | 100 | BC015356 proteasome (prosome, | Homo sapiens |
| | | | | macropain) subunit, alpha type, 1 | |
| 1571 | BC022372 | 1370 | 100 | proteasome (prosome, macropain) | Homo sapiens |
| | | | | subunit, alpha type, 1 | |
| 1572 | AAH03352 | 723 | 100 | BC003352 tumor protein, | Homo sapiens |
| | | | | translationally-controlled 1 | |
| 1572 | BC022436 | 723 | 100 | Similar to tumor protein, | Homo sapiens |
| | | | | translationally-controlled 1 | |
| 1572 | X16064 | 723 | 100 | tumor protein (AA 1-172) | Homo sapiens |
| 1573 | BC023006 | 3271 | 100 | Unknown (protein for MGC: 30059) | Homo sapiens |
| 1573 | M27024 | 3271 | 100 | heat shock protein | Homo sapiens |
| 1573 | X15183 | 3271 | 100 | 90 kDa heat-shock protein (AA 1-732) | Homo sapiens |
| 1574 | AAH08064 | 2806 | 100 | BC008064 monoamine oxidase A | Homo sapiens |
| 1574 | M68857 | 2806 | 100 | monoamine oxidase A | Homo sapiens |
| 1574 | M69226 | 2806 | 100 | monoamine oxidase A | Homo sapiens |
| 1575 | M84378 | 1952 | 100 | lymphocyte antigen | Homo sapiens |
| 1575 | M84379 | 1945 | 99 | MHC class I lymphocyte antigen | Homo sapiens |
| 1575 | Z27120 | 1946 | 99 | HLA-A2 SLU | Homo sapiens |
| 1576 | BC032350 | 1338 | 100 | major histocompatibility complex, | Homo sapiens |
| | | | | class II, DR alpha | |
| 1576 | M60334 | 1338 | 100 | cell surface glycoprotein | Homo sapiens |
| 1576 | Z84814 | 1338 | 100 | dJ172K2.4.1 (major | Homo sapiens |
| | | | | histocompatibility complex, class | |
| | | | | II, DR alpha, isoform 1) | |
| 1577 | AAH02476 | 803 | 100 | BC002476 non-metastatic cells 2, | Homo sapiens |
| | | | | protein (NM23B) expressed in | |
| 1577 | L16785 | 803 | 100 | c-myc transcription factor | Homo sapiens |
| 1577 | X58965 | 803 | 100 | NM23-H2 protein | Homo sapiens |
| 1578 | AAH11645 | 1585 | 100 | BC011645 Similar to Ras-related | Homo sapiens |
| | | | | associated with diabetes | |
| 1578 | L24564 | 1585 | 100 | Rad | Homo sapiens |
| 1578 | U46165 | 1565 | 99 | Rad GTPase | Homo sapiens |
| 1579 | AAH03358 | 1151 | 100 | BC003358 ribosonal protein L10 | Homo sapiens |
| 1579 | BC026276 | 1151 | 100 | ribosomal protein L10 | Homo sapiens |
| 1579 | L44140 | 1151 | 100 | QM | Homo sapiens |
| 1580 | A84527 | 2912 | 100 | unnamed protein product | unidentified |
| 1580 | AX024042 | 2912 | 100 | fusion between Aeguorea victoria | synthetic |
| | | | | and human | construct |
| 1580 | M62399 | 2912 | 100 | NF-kappa-B transcription factor | Homo sapiens |
| 1581 | AAH10860 | 2071 | 100 | BC010860 serine (or cysteine) | Homo sapiens |
| | | | | proteinase inhibitor, clade E | |
| | | | | (nexin, plasminogen activator | |
| | | | | inhibitor type 1), member 1 | |
| 1581 | AF386492_1 | 2071 | 100 | AF386492 serine-cysteine | Homo sapiens |
| | | | | proteinase inhibitor clade E | |
| | | | | member 1 | |
| 1581 | X04429 | 2071 | 100 | precursor polypeptide | Homo sapiens |
| 1582 | AAH00491 | 1316 | 100 | BC000491 proliferating cell | Homo sapiens |
| | | | | nuclear antigen | |
| 1582 | AF347680_1 | 1316 | 100 | AF347680 proliferating cell | Macaca |
| | | | | nuclear antigen | fascicularis |
| 1582 | AL121924 | 1316 | 100 | dJ746J20.2 (proliferating cell | Homo sapiens |
| | | | | nuclear antigen) | |
| 1583 | AC007165 | 2130 | 100 | interleukin-1 receptor type II | Homo sapiens |
| 1583 | AY124010 | 2130 | 100 | interleukin 1 receptor, type II | Homo sapiens |
| 1583 | X59770 | 2130 | 100 | type II interleukin-1 receptor | Homo sapiens |
| 1584 | BC041071 | 2366 | 100 | protein phosphatase 2 (formerly | Homo sapiens |
| | | | | 2A), regulatory subunit B (PR | |
| | | | | 52), alpha isoform | |
| 1584 | M64929 | 2366 | 100 | protein phosphatase-2A subunit- | Homo sapiens |
| | | | | alpha | |
| 1584 | U09356 | 2366 | 100 | protein phosphatase 2A1 B alpha | Oryctolagus |
| | | | | subunit | cuniculus |
| 1585 | M34421 | 2279 | 99 | pregnancy-specific beta-1 | Homo sapiens |
| | | | | glycoprotein precursor | |
| 1585 | M34481 | 2279 | 99 | pregnancy-specific beta-1- | Homo sapiens |
| | | | | glycoprotein 11 | |
| 1585 | M58591 | 2291 | 100 | PSG11 | Homo sapiens |
| 1586 | BC018254 | 703 | 97 | retinol binding protein 1, | Mus musculus |
| | | | | cellular | |
| 1586 | M11433 | 724 | 100 | retinol-binding protein | Homo sapiens |
| 1586 | X07437 | 724 | 100 | cellular retinol binding protein | Homo sapiens |
| 1587 | J03149 | 4237 | 83 | M-CSF receptor | Felis catus |
| 1587 | U63963 | 5158 | 100 | CSF-1 receptor | Homo sapiens |
| 1587 | X03663 | 5150 | 99 | put. c-fms precursor | Homo sapiens |
| 1588 | BC005580 | 902 | 100 | polymerase (RNA) II (DNA | Mus musculus |
| | | | | directed) polypeptide G | |
| 1588 | U52427 | 902 | 100 | RNA polymerase II seventh subunit | Homo sapiens |
| 1588 | Z71925 | 902 | 100 | RNA polymerase II RPB7 subunit- | Rattus |
| | | | | like protein | norvegicus |
| 1589 | AAH11601 | 658 | 100 | BC011601 interferon, alpha- | Homo sapiens |
| | | | | inducible protein (clone IFI-6- | |
| | | | | 16) | |
| 1589 | AAH15603 | 658 | 100 | BC015603 interferon, alpha- | Homo sapiens |
| | | | | inducible protein (clone IFI-6- | |
| | | | | 16) | |
| 1589 | D11384 | 652 | 98 | ORF | Pan |
| | | | | | troglodytes |
| 1590 | AF147083 | 1683 | 100 | gamma-glutamyl hydrolase | Homo sapiens |
| 1590 | BC025025 | 1683 | 100 | gamma-glutamyl hydrolase | Homo sapiens |
| | | | | (conjugase, | |
| | | | | folylpolygammaglutamyl hydrolase) | |
| 1590 | U55206 | 1683 | 100 | human gamma-glutamyl hydrolase | Homo sapiens |
| 1591 | AAH10418 | 1552 | 100 | BC010418 laminin receptor 1 | Homo sapiens |
| | | | | (67 kD, ribosomal protein SA) | |
| 1591 | AAH13827 | 1552 | 100 | BC013827 laminin receptor 1 | Homo sapiens |
| | | | | (67 kD, ribosomal protein SA) | |
| 1591 | U43901 | 1552 | 100 | 37 kD laminin receptor | Homo sapiens |
| | | | | precursor/p40 ribosome associated | |
| | | | | protein | |
| 1592 | BC026033 | 4101 | 100 | gelsolin (amyloidosis, Finnish | Homo sapiens |
| | | | | type) | |
| 1592 | X04412 | 4101 | 100 | plasma gelsolin | Homo sapiens |
| 1592 | X13871 | 3849 | 94 | gelsolin | Sus scrofa |
| 1593 | AF304463_1 | 2813 | 100 | AF304463 calcium transport | Homo sapiens |
| | | | | protein CaT1 | |
| 1593 | AF365927_1 | 2813 | 100 | AF365927 calcium transport | Homo sapiens |
| | | | | protein CaT1 | |
| 1593 | AF365928_1 | 2946 | 100 | AF365928 calcium transport | Homo sapiens |
| | | | | protein CaT1 | |
| 1594 | AY040542 | 2353 | 100 | sialic acid binding | Homo sapiens |
| | | | | immunoglobulin-like lectin 6 | |
| 1594 | D86358 | 2353 | 100 | CD33L1 | Homo sapiens |
| 1594 | U71382 | 2246 | 97 | OB binding protein-1 | Homo sapiens |
| 1595 | AF286534_1 | 1115 | 100 | AF286534 GTP-binding protein | Rattus |
| | | | | RAB11B | norvegicus |
| 1595 | AF498947_1 | 1115 | 100 | AF498947 small GTP binding | Homo sapiens |
| | | | | protein RAB11B | |
| 1595 | X79780 | 1110 | 99 | YPT3 | Homo sapiens |
| 1596 | BC010604 | 1253 | 99 | ribosomal protein S6 | Mus musculus |
| 1596 | BC027620 | 1256 | 100 | ribosomal protein S6 | Homo sapiens |
| 1596 | Z54209 | 1253 | 99 | rpS6 | Mus musculus |
| 1597 | AJ005654 | 703 | 100 | secondary lymphoid tissue | Homo sapiens |
| | | | | chemokine | |
| 1597 | BC027918 | 703 | 100 | small inducible cytokine | Homo sapiens |
| | | | | subfamily A (Cys—Cys), member 21 | |
| 1597 | U88320 | 703 | 100 | beta chemokine Exodus-2 | Homo sapiens |
| 1598 | AF148856_2 | 6613 | 98 | AF148856 unknown | Homo sapiens |
| 1598 | AF149422_2 | 6615 | 98 | AF149422 unknown | Homo sapiens |
| 1598 | U93564 | 6714 | 100 | putative p150 | Homo sapiens |
| 1599 | AK012013 | 1608 | 100 | unnamed protein product | Mus musculus |
| 1599 | BC003742 | 1608 | 100 | 26S proteasome-associated pad1 | Mus musculus |
| | | | | homolog | |
| 1599 | U86782 | 1608 | 100 | 26S proteasome-associated pad1 | Homo sapiens |
| | | | | homolog | |
| 1600 | BC041218 | 676 | 100 | H3 histone, family 3B | Xenopus |
| | | | | | laevis |
| 1600 | M11393 | 676 | 100 | histone 3.3 | Gallus |
| | | | | | gallus |
| 1600 | Y00392 | 676 | 100 | histone H3.3B (AA 1-136) | Gallus |
| | | | | | gallus |
| 1601 | AAH11262 | 2716 | 99 | BC011262 Unknown (protein for | Homo sapiens |
| | | | | MGC: 18226) | |
| 1601 | AF006043 | 2719 | 100 | 3-phosphoglycerate dehydrogenase | Homo sapiens |
| 1601 | AF171237_1 | 2719 | 100 | AF171237 3-phosphoglycerate | Homo sapiens |
| | | | | dehydrogenase | |
| 1602 | AF109197_1 | 1254 | 100 | AF109197 nuclear chloride channel | Homo sapiens |
| 1602 | AJ012008 | 1251 | 99 | RNCC protein | Homo sapiens |
| 1602 | U93205 | 1254 | 100 | nuclear chloride ion channel | Homo sapiens |
| | | | | protein | |
| 1603 | BC029402 | 1311 | 100 | proteasome (prosome, macropain) | Homo sapiens |
| | | | | subunit, alpha type, 3 | |
| 1603 | BC038990 | 1307 | 99 | Similar to proteasome (prosome, | Homo sapiens |
| | | | | macropain) subunit, alpha type, 3 | |
| 1603 | D00762 | 1307 | 99 | proteasome subunit C8 | Homo sapiens |
| 1604 | AB062400 | 671 | 100 | Similar to ribosomal protein S15a | Homo sapiens |
| 1604 | BC030569 | 671 | 100 | ribosomal protein S15a | Homo sapiens |
| 1604 | X77953 | 671 | 100 | ribosomal protein S15a | Rattus |
| | | | | | norvegicus |
| 1605 | AB062438 | 1926 | 100 | OK/SW-CL.30 | Homo sapiens |
| 1605 | BC025832 | 1581 | 90 | Unknown (protein for MGC: 37936) | Mus musculus |
| 1605 | BC036872 | 1912 | 99 | Unknown (protein for | Homo sapiens |
| | | | | IMAGE: 5225889) | |
| 1606 | AAH16706 | 2319 | 100 | BC016706 eukaryotic translation | Homo sapiens |
| | | | | initiation factor 3, subunit 6 | |
| | | | | (48 kD) | |
| 1606 | AAH21679 | 2319 | 100 | BC021679 eukaryotic translation | Homo sapiens |
| | | | | initiation factor 3, subunit 6 | |
| | | | | (48 kD) | |
| 1606 | BC029177 | 2319 | 100 | eukaryotic translation initiation | Mus musculus |
| | | | | factor 3, subunit 6 (48 kD) | |
| 1607 | AAH04138 | 1465 | 99 | BC004138 ribosomal protein L6 | Homo sapiens |
| 1607 | BC031009 | 1475 | 100 | ribosomal protein L6 | Homo sapiens |
| 1607 | BC032299 | 1465 | 99 | ribosomal protein L6 | Homo sapiens |
| 1608 | AAH15813 | 2331 | 100 | BC015813 eukaryotic translation | Homo sapiens |
| | | | | elongation factor 1 gamma | |
| 1608 | BC028179 | 2331 | 100 | eukaryotic translation elongation | Homo sapiens |
| | | | | factor 1 gamma | |
| 1608 | BC031012 | 2331 | 100 | eukaryotic translation elongation | Homo sapiens |
| | | | | factor 1 gamma | |
| 1609 | AAH04927 | 1051 | 100 | BC004927 Unknown (protein for | Homo sapiens |
| | | | | MGC: 10432) | |
| 1609 | AF013711 | 1051 | 100 | 22 kDa actin-binding protein | Homo sapiens |
| 1609 | D84342 | 1051 | 100 | SM22 alpha | Homo sapiens |
| 1610 | AB007510 | 12543 | 100 | PRP8 protein | Homo sapiens |
| 1610 | AB047391 | 12461 | 99 | pre-mRNA processing 8 protein | Mus musculus |
| 1610 | AF092565 | 12477 | 99 | splicing factor Prp8 | Homo sapiens |
| 1611 | AAH10034 | 3127 | 100 | BC010034 thyroid autoantigen 70 kD | Homo sapiens |
| | | | | (Ku antigen) | |
| 1611 | AAH12154 | 3127 | 100 | BC012154 Similar to thyroid | Homo sapiens |
| | | | | autoantigen 70 kD (Ku antigen) | |
| 1611 | AAH18259 | 3127 | 100 | BC018259 thyroid autoantigen 70 kD | Homo sapiens |
| | | | | (Ku antigen) | |
| 1612 | AL050369 | 2492 | 99 | hypothetical protein | Homo sapiens |
| 1612 | AY040822 | 2500 | 100 | U4/U6 snRNP-associated 61 KDa | Homo sapiens |
| | | | | protein | |
| 1612 | BC018376 | 2479 | 98 | Unknown (protein for MGC: 19247) | Mus musculus |
| 1613 | AF343440_1 | 454 | 98 | AF343440 lysosomal H+ | Canis |
| | | | | transporting-ATPase subunit M9.2 | familiaris |
| 1613 | AX400012 | 459 | 100 | unnamed protein product | Homo sapiens |
| 1613 | Y15286 | 459 | 100 | vacuolar proton-ATPase subunit | Homo sapiens |
| | | | | M9.2 | |
| 1614 | AAH01273 | 1831 | 99 | BC001273 galactose-4-epimerase, | Homo sapiens |
| | | | | UDP- | |
| 1614 | AF022382 | 1835 | 100 | UDP-galactose 4′ epimerase | Homo sapiens |
| 1614 | L41668 | 1835 | 100 | UDP-galactose-4-epimerase | Homo sapiens |
| 1615 | AAH05270 | 900 | 99 | BC005270 NADH dehydrogenase | Homo sapiens |
| | | | | (ubiquinone) Fe-S protein 4 | |
| | | | | (18 kD) (NADH-coenzyme Q | |
| | | | | reductase) | |
| 1615 | AF020351 | 904 | 100 | NADH: ubiquinone oxidoreductase 18 kDa | Homo sapiens |
| | | | | IP subunit | |
| 1615 | X63215 | 839 | 90 | NADH dehydrogenase | Bos taurus |
| 1616 | AAH04963 | 674 | 100 | BC004963 ATP synthase, H+ | Homo sapiens |
| | | | | transporting, mitochondrial F0 | |
| | | | | complex, subunit c (subunit 9), | |
| | | | | isoform 1 | |
| 1616 | AL080089 | 674 | 100 | hypothetical protein | Homo sapiens |
| 1616 | X69907 | 674 | 100 | P1 gene for c subunit of human | Homo sapiens |
| | | | | mitochondrial ATP synthase | |
| 1617 | AF100620_1 | 1492 | 100 | AF100620 transcription factor- | Homo sapiens |
| | | | | like protein MRGX | |
| 1617 | AF167174_1 | 1492 | 100 | AF167174 MSL3-2 protein | Homo sapiens |
| 1617 | AL049610 | 1492 | 100 | dJ1055C14.2 (KIAA0026 | Homo sapiens |
| | | | | (transcription factor-like | |
| | | | | protein MRGX)) | |
| 1618 | AAH15557 | 1854 | 99 | BC015557 Unknown (protein for | Homo sapiens |
| | | | | MGC: 1567) | |
| 1618 | BC021637 | 1140 | 66 | CD68 antigen | Mus musculus |
| 1618 | S57235 | 1858 | 100 | CD68 | Homo sapiens |
| 1619 | L27631 | 4010 | 100 | amyloid precursor-like protein 2 | Homo sapiens |
| 1619 | S60099 | 4010 | 100 | APPH | Homo sapiens |
| 1619 | Z22572 | 4010 | 100 | CDEI binding protein | Homo sapiens |
| 1620 | AAH08850 | 1273 | 99 | BC008850 Unknown (protein for | Homo sapiens |
| | | | | MGC: 14308) | |
| 1620 | AAH09599 | 1273 | 99 | BC009599 Unknown (protein for | Homo sapiens |
| | | | | MGC: 14690) | |
| 1620 | L16558 | 1276 | 100 | ribosomal protein L7 | Homo sapiens |
| 1621 | AF062482 | 845 | 99 | SDP3 | Mus musculus |
| 1621 | AF062483 | 852 | 100 | SDP3 | Homo sapiens |
| 1621 | AF520420 | 838 | 98 | sorting nexin 3 | Mus musculus |
| 1622 | AF063657 | 6995 | 100 | vascular endothelial growth | Homo sapiens |
| | | | | factor receptor | |
| 1622 | D28498 | 5882 | 82 | Fit-1 tyrosine kinase receptor | Rattus |
| | | | | | norvegicus |
| 1622 | X51602 | 6989 | 99 | flt gene product (AA 1-1338) | Homo sapiens |
| 1623 | AF149422_2 | 703 | 49 | AF149422 unknown | Homo sapiens |
| 1623 | U93572 | 710 | 50 | putative p150 | Homo sapiens |
| 1623 | U93574 | 709 | 49 | putative p150 | Homo sapiens |
| 1624 | AF029729 | 3066 | 100 | neuralized | Homo sapiens |
| 1624 | BC026336 | 3041 | 99 | neuralized-like (Drosophila) | Homo sapiens |
| 1624 | U87864 | 3066 | 100 | neuralized homolog | Homo sapiens |
| 1625 | AAH20782 | 643 | 100 | BC020782 glycoprotein hormones, | Homo sapiens |
| | | | | alpha polypeptide | |
| 1625 | J00152 | 643 | 100 | glycoprotein alpha subunit | Homo sapiens |
| 1625 | V00518 | 643 | 100 | chorionic gonadotropin | Homo sapiens |
| 1626 | AAH02722 | 2070 | 100 | BC002722 guanine nucleotide | Homo sapiens |
| | | | | binding protein (G protein), | |
| | | | | alpha stimulating activity | |
| | | | | polypeptide 1 | |
| 1626 | AF493897_1 | 2070 | 100 | AF493897 guanine nucleotide | Homo sapiens |
| | | | | binding protein alpha s long | |
| 1626 | X04408 | 2070 | 100 | alpha-S2 (aa 1-394) | Homo sapiens |
| 1627 | BC033714 | 1724 | 100 | heterogeneous nuclear | Homo sapiens |
| | | | | ribonucleoprotein A1 | |
| 1627 | D86729 | 1724 | 100 | TIS | Mus musculus |
| 1627 | M99167 | 1724 | 100 | RNA binding protein | Mus musculus |
| 1628 | AF072836 | 1827 | 100 | Sox-like transcriptional factor | Homo sapiens |
| 1628 | AF146223_1 | 620 | 100 | AF146223 HMG domain protein HMGX2 | Homo sapiens |
| 1628 | AF288679 | 620 | 100 | smarcel-related protein | Homo sapiens |
| 1629 | AAH21979 | 1360 | 100 | BC021979 ribosomal protein L7a | Homo sapiens |
| 1629 | BC032533 | 1360 | 100 | ribosomal protein L7a | Homo sapiens |
| 1629 | X15013 | 1360 | 100 | ribosomal protein L7a (AA 1-266) | Rattus |
| | | | | | Rattus |
| 1630 | X51538 | 693 | 100 | ribosomal protein S24 (AA 1-133) | Rattus |
| | | | | | Rattus |
| 1630 | X52445 | 693 | 100 | ribosomal protein S24 | Rattus |
| | | | | | norvegicus |
| 1630 | X52658 | 693 | 100 | ribosomal protein S19 (AA 1-133) | Mesocricetus |
| | | | | | auratus |
| 1631 | AAH01503 | 2789 | 100 | BC001503 prosaposin (variant | Homo sapiens |
| | | | | Gaucher disease and variant | |
| | | | | metachromatic leukodystrophy) | |
| 1631 | AAH04275 | 2789 | 100 | BC004275 prosaposin (variant | Homo sapiens |
| | | | | Gaucher disease and variant | |
| | | | | metachromatic leukodystrophy) | |
| 1631 | AAH07612 | 2789 | 100 | BC007612 prosaposin (variant | Homo sapiens |
| | | | | Gaucher disease and variant | |
| | | | | metachromatic leukodystrophy) | |
| 1632 | AAH11776 | 1369 | 100 | BC011776 Similar to tropomyosin 2 | Homo sapiens |
| | | | | (beta) | |
| 1632 | M74817 | 1369 | 100 | tropomyosin-1 | Homo sapiens |
| 1632 | M75165 | 1369 | 100 | tropomyosin | Homo sapiens |
| 1633 | AL023883 | 1173 | 99 | dJ404K8.1 (prolactin) | Homo sapiens |
| 1633 | BC015850 | 1185 | 100 | similar to prolactin precursor | Homo sapiens |
| 1633 | V00566 | 1185 | 100 | reading frame prolactin | Homo sapiens |
| 1634 | AK012601 | 247 | 64 | unnamed protein product | Mus musculus |
| 1634 | AK021409 | 286 | 69 | unnamed protein product | Mus musculus |
| 1634 | AK075801 | 246 | 64 | unnamed protein product | Mus musculus |
| 1635 | AF300943_1 | 9468 | 94 | AF300943 tyrosine phosphatase LAR | Mus musculus |
| 1635 | L11586 | 9484 | 95 | leukocyte common antigen-related | Rattus |
| | | | | phosphatase | norvegicus |
| 1635 | Y00815 | 9953 | 100 | put. LAR preprotein (AA −16 to | Homo sapiens |
| | | | | 1881) | |
| 1636 | AAH16046 | 2739 | 100 | BC016046 ATP synthase, H+ | Homo sapiens |
| | | | | transporting, mitochondrial F1 | |
| | | | | complex, alpha subunit, isoform | |
| | | | | 1, cardiac muscle | |
| 1636 | AAH19310 | 2739 | 100 | BC019310 ATP synthase, H+ | Homo sapiens |
| | | | | transporting, mitochondrial F1 | |
| | | | | complex, alpha subunit, isoform | |
| | | | | 1, cardiac muscle | |
| 1636 | X65460 | 2739 | 100 | ATP synthase alpha subunit | Homo sapiens |
| 1637 | AF237581_1 | 613 | 100 | AF237581 migration inhibitory | Homo sapiens |
| | | | | factor-related protein 14 variant P | |
| 1637 | M26311 | 613 | 100 | cystic fibrosis antigen | Homo sapiens |
| 1637 | X06233 | 613 | 100 | MRP-14 (AA 1-114) | Homo sapiens |
| 1638 | AAH15492 | 523 | 96 | BC015492 Unknown (protein for | Homo sapiens |
| | | | | MGC: 8967) | |
| 1638 | BC032626 | 280 | 64 | TLH29 protein precursor | Homo sapiens |
| 1638 | X67325 | 556 | 100 | ISG12 | Homo sapiens |
| 1639 | L00160 | 2135 | 100 | phosphoglycerate kinase | Homo sapiens |
| 1639 | M11968 | 2135 | 100 | phosphoglycerate kinase | Homo sapiens |
| 1639 | V00572 | 2135 | 100 | coding sequence | Homo sapiens |
| 1640 | AF075575 | 11112 | 100 | dysferlin | Homo sapiens |
| 1640 | AF188290_1 | 10355 | 93 | AF188290 dysferlin | Mus musculus |
| 1640 | AK074104 | 7939 | 98 | FLJ00175 protein | Homo sapiens |
| 1641 | AB052229 | 10414 | 100 | RNA polymerase II largest subunit | Cricetulus |
| | | | | | griseus |
| 1641 | D87294 | 10414 | 100 | RNA polymerase II largest subunit | Cricetulus |
| | | | | | griseus |
| 1641 | X63564 | 10414 | 100 | RNA polymerase II largest subunit | Homo sapiens |
| 1642 | AF070650 | 844 | 100 | F1F0-type ATP synthase subunit d | Homo sapiens |
| 1642 | AF087135 | 844 | 100 | F1FO-type ATPase subunit d | Homo sapiens |
| 1642 | BC038092 | 844 | 100 | ATP synthase, H+ transporting, | Homo sapiens |
| | | | | mitochondrial F0 complex, subunit d | |
| 1643 | U01153 | 4046 | 97 | GRP94 | Canis |
| | | | | | familiaris |
| 1643 | X15187 | 4112 | 100 | precursor polypeptide (AA −21 to | Homo sapiens |
| | | | | 782) | |
| 1643 | Y09136 | 4038 | 97 | gp96/GRP94 | Sus scrofa |
| 1644 | AF297036_1 | 670 | 100 | AF297036 ubiquitin fusion protein | Ophiophagus |
| | | | | | hannah |
| 1644 | BC014772 | 670 | 100 | ubiquitin A-52 residue ribosomal | Mus musculus |
| | | | | protein fusion product 1 | |
| 1644 | M24508 | 670 | 100 | ubiquitin | synthetic |
| | | | | | construct |
| 1645 | AK000385 | 211 | 44 | unnamed protein product | Homo sapiens |
| 1645 | AK097085 | 245 | 51 | unnamed protein product | Homo sapiens |
| 1645 | AK097214 | 201 | 59 | unnamed protein product | Homo sapiens |
| 1646 | AF100956 | 782 | 100 | ribosomal protein subunit S18 | Mus musculus |
| 1646 | AF110520 | 782 | 100 | RPS18 | Mus musculus |
| 1646 | M76763 | 782 | 100 | ribosomal protein | Mus musculus |
| 1647 | BC025077 | 930 | 100 | RIKEN cDNA 2010203J19 gene | Mus musculus |
| 1647 | L05092 | 930 | 100 | ribosomal protein L11 | Homo sapiens |
| 1647 | X62146 | 930 | 100 | ribosomal protein L11 | Rattus |
| | | | | | Rattus |
| 1648 | AB037890 | 6795 | 99 | pre-mRNA splicing factor SF3b 155 kDa | Mus musculus |
| | | | | subunit | |
| 1648 | AF054284 | 6808 | 100 | spliceosomal protein SAP 155 | Homo sapiens |
| 1648 | Y08997 | 6566 | 96 | 146 kDa nuclear protein | Xenopus |
| | | | | | laevis |
| 1649 | AF072097 | 624 | 100 | beta-2 microglobulin | Homo sapiens |
| 1649 | AY007153 | 624 | 100 | similar to Homo sapiens mRNA for | |
| | | | | beta 2-microglobulin with GenBank | |
| | | | | Accession Number AB021288 | |
| 1649 | BC032589 | 624 | 100 | beta-2-microglobulin | Homo sapiens |
| 1650 | AAH17839 | 1602 | 100 | BC017839 caspase 4, apoptosis- | Homo sapiens |
| | | | | related cysteine protease | |
| 1650 | U28977 | 1769 | 100 | Mih1/TX isoform beta | Homo sapiens |
| 1650 | U28978 | 1602 | 100 | Mih1/TX isoform gamma | Homo sapiens |
| 1651 | AAH07967 | 974 | 100 | BC007967 Unknown (protein for | Homo sapiens |
| | | | | MGC: 14460) | |
| 1651 | AAH12149 | 974 | 100 | BC012149 Unknown (protein for | Homo sapiens |
| | | | | MGC: 20365) | |
| 1651 | BC031906 | 974 | 100 | similar to ribosomal protein L9; | Homo sapiens |
| | | | | 60S ribosomal protein L9 | |
| 1652 | BC002145 | 745 | 100 | ribosomal protein S23 | Mus musculus |
| 1652 | D14530 | 745 | 100 | ribosomal protein | Homo sapiens |
| 1652 | X77398 | 745 | 100 | ribosomal protein S23 | Rattus |
| | | | | | norvegicus |
| 1653 | AF227256_1 | 405 | 100 | AF227256 NEDD8 | Bos taurus |
| 1653 | BC004625 | 398 | 98 | neural precursor cell expressed, | Mus musculus |
| | | | | developmentally down-regulated | |
| | | | | gene 8 | |
| 1653 | D23662 | 405 | 100 | ubiquitin-like protein | Homo sapiens |
| 1654 | U46034 | 2076 | 83 | stromelysin 3 | Rattus |
| | | | | | norvegicus |
| 1654 | X57766 | 2679 | 100 | stromelysin-3 precursor | Homo sapiens |
| 1654 | Z12604 | 2164 | 81 | stromelysin-3 | Mus musculus |
| 1655 | AAH01734 | 499 | 100 | BC001734 protein translocation | Homo sapiens |
| | | | | complex beta | |
| 1655 | AL137067 | 499 | 100 | bA13B9.2 (novel protein similar | Homo sapiens |
| | | | | to the beta subunit of transport | |
| | | | | protein SEC61) | |
| 1655 | L25085 | 499 | 100 | Sec61-complex beta-subunit | Homo sapiens |
| 1656 | AF165522_1 | 360 | 100 | AF165522 ras-related GTP-binding | Homo sapiens |
| | | | | protein 4b | |
| 1656 | AF217985_1 | 360 | 100 | AF217985 unknown | Homo sapiens |
| 1656 | AF498935_1 | 360 | 100 | AF498935 small GTP binding | Homo sapiens |
| | | | | protein RAB4B | |
| 1657 | AF006602 | 5436 | 94 | histone deacetylase mHDA1 | Mus musculus |
| 1657 | AF132608_1 | 5784 | 100 | AF132608 histone deacetylase 5 | Homo sapiens |
| 1657 | AF207748_1 | 5431 | 94 | AF207748 histone deacetylase 5 | Mus musculus |
| 1658 | AL050259 | 4009 | 100 | hypothetical protein | Homo sapiens |
| 1658 | BC032681 | 4009 | 100 | RAB2, member RAS oncogene family- | Home sapiens |
| | | | | like | |
| 1658 | Z97184 | 4009 | 100 | cICF0811.4.1 (RAB2, member RAS | Homo sapiens |
| | | | | oncogene family-like, isoform 1) | |
| 1659 | AF151855_1 | 1278 | 100 | AF151855 CGI-97 protein | Homo sapiens |
| 1659 | AK001779 | 1214 | 96 | unnamed protein product | Homo sapiens |
| 1659 | BC003849 | 1200 | 94 | RIKEN cDNA 4733401P19 gene | Mus musculus |
| 1660 | AAH00234 | 1377 | 100 | BC000234 nicotinamide N- | Homo sapiens |
| | | | | methyltransferase | |
| 1660 | U08021 | 1377 | 100 | nicotinamide N-methyltransferase | Homo sapiens |
| 1660 | U20971 | 1377 | 100 | nicotinamide N-methyltransferase | Homo sapiens |
| 1661 | AAH03137 | 1240 | 100 | BC003137 ribosomal protein S3 | Homo sapiens |
| 1661 | BC034149 | 1240 | 100 | ribosomal protein S3 | Homo sapiens |
| 1661 | U14992 | 1240 | 100 | ribosomal protein S3 | Homo sapiens |
| 1662 | AF090891_1 | 3913 | 99 | AF090891 PRO0105 | Homo sapiens |
| 1662 | AF268075_1 | 3913 | 99 | AF268075 TRAF6-binding protein | Homo sapiens |
| | | | | T6BP | |
| 1662 | U33821 | 3924 | 100 | tax1-binding protein TXBP151 | Homo sapiens |
| 1663 | AF186112_1 | 619 | 100 | AF186112 neurokinin B-like | Homo sapiens |
| | | | | protein ZNEUROK1 | |
| 1663 | AF216586_1 | 619 | 100 | AF216586 neurokinin B | Homo sapiens |
| 1663 | BC032145 | 619 | 100 | tachykinin 3 (neuromedin K, | Homo sapiens |
| | | | | neurokinin beta) | |
| 1664 | AAH08405 | 2044 | 90 | BC008405 Unknown (protein for | Homo sapiens |
| | | | | MGC: 14528) | |
| 1664 | M94891 | 2042 | 90 | pregnancy-specific beta-1 | Homo sapiens |
| | | | | glycoprotein | |
| 1664 | U18467 | 2252 | 100 | pregnancy-specific beta 1- | Homo sapiens |
| | | | | glycoprotein 7 precursor | |
| 1665 | AK002989 | 980 | 93 | unnamed protein product | Mus musculus |
| 1665 | D38076 | 1041 | 99 | Ran-BP1 (Ran-binding protein 1) | Homo sapiens |
| 1665 | X83617 | 1057 | 100 | RanBP1 | Homo sapiens |
| 1666 | AF152604 | 3398 | 100 | bromodomain-containing protein | Homo sapiens |
| 1666 | AF213969 | 3369 | 99 | bromodomain protein CELTIX1 | Homo sapiens |
| 1666 | AJ271881 | 3398 | 100 | bromodomain containing protein | Homo sapiens |
| 1667 | AF217973_1 | 329 | 68 | AF217973 unknown | Homo sapiens |
| 1667 | AK000496 | 330 | 66 | unnamed protein product | Homo sapiens |
| 1667 | AK090511 | 352 | 64 | unnamed protein product | Homo sapiens |
| 1668 | AK000917 | 2276 | 100 | unnamed protein product | Homo sapiens |
| 1668 | BC025560 | 2156 | 94 | Similar to hypothetical protein | Mus musculus |
| | | | | FLJ10055 | |
| 1668 | BC039867 | 2259 | 99 | hypothetical protein FLJ10055 | Homo sapiens |
| 1669 | AB039886 | 1071 | 100 | down-regulated in gastric cancer | Homo sapiens |
| 1669 | AY139182 | 995 | 100 | 18 kDa antrum mucosa protein | Homo sapiens |
| 1669 | AY139184 | 995 | 100 | 18 kDa antrum mucosa protein | Homo sapiens |
| 1670 | BC033721 | 3540 | 99 | Unknown (protein for MGC: 45264) | Homo sapiens |
| 1670 | X82157 | 3543 | 100 | hevin | Homo sapiens |
| 1670 | X86693 | 3504 | 99 | Hevin-like protein | Homo sapiens |
| 1671 | M84472 | 1675 | 100 | 17-beta-hydroxysteroid | Homo sapiens |
| | | | | dehydrogenase | |
| 1671 | U34879 | 1675 | 100 | 17-beta-hydroxysteroid | Homo sapiens |
| | | | | dehydrogenase | |
| 1671 | X13440 | 1675 | 100 | 17-HSD protein (AA 1-328) | Homo sapiens |
| 1672 | AAH12612 | 1812 | 99 | BC012612 Similar to cathepsin L | Homo sapiens |
| 1672 | M20496 | 1816 | 100 | preprocathepsin L precursor | Homo sapiens |
| 1672 | X12451 | 1816 | 100 | pro-(cathepsin L) | Homo sapiens |
| 1673 | AAH12355 | 3449 | 100 | BC012355 Similar to solute | Homo sapiens |
| | | | | carrier family 6 | |
| | | | | (neurotransmitter transporter, | |
| | | | | creatine), member 8 | |
| 1673 | U36341 | 3449 | 100 | creatine transporter | Homo sapiens |
| 1673 | Z66539 | 3449 | 100 | creatine transporter | Homo sapiens |
| 1674 | AF267852_1 | 749 | 100 | AF267852 placental protein 13- | Homo sapiens |
| | | | | like protein | |
| 1674 | AF367430 | 571 | 100 | placental protein 13-like | Homo sapiens |
| 1674 | BC022257 | 731 | 98 | Similar to placental protein 13- | Homo sapiens |
| | | | | like protein | |
| 1675 | AB001636 | 4072 | 99 | ATP-dependent RNA helicase #46 | Homo sapiens |
| 1675 | AF279891_1 | 4162 | 100 | AF279891 dead box protein 15 | Homo sapiens |
| 1675 | BC035974 | 4162 | 100 | DEAD/H (Asp-Glu-Ala-Asp/His) box | Homo sapiens |
| | | | | polypeptide 15 | |
| 1676 | AAH17321 | 687 | 100 | BC017321 Unknown (protein for | Homo sapiens |
| | | | | MGC: 29768) | |
| 1676 | BC002079 | 687 | 100 | Similar to ribosomal protein S12 | Mus musculus |
| 1676 | BC018362 | 687 | 100 | Unknown (protein for MGC: 19264) | Mus musculus |
| 1677 | AAH20619 | 1123 | 99 | BC020619 glutathione S- | Homo sapiens |
| | | | | transferase A3 | |
| 1677 | AF508266_1 | 1127 | 100 | AF508266 glutathione transferase | Homo sapiens |
| | | | | A3-3 | |
| 1677 | AL121969 | 1127 | 100 | dJ214M20.1 (glutathione S- | Homo sapiens |
| | | | | transferase A3) | |
| 1678 | AAH00359 | 923 | 100 | BC000359 signal peptidase complex | Homo sapiens |
| | | | | (18 kD) | |
| 1678 | AAH14508 | 923 | 100 | BC014508 Similar to signal | Homo sapiens |
| | | | | peptidase complex (18 kD) | |
| 1678 | AF061737 | 923 | 100 | microsomal signal peptidase | Homo sapiens |
| 1679 | AF179890_1 | 598 | 100 | AF179890 DNA polymerase delta | Homo sapiens |
| | | | | smallest subunit p12 | |
| 1679 | AF515709_1 | 492 | 83 | AF515709 small subunit DNA | Mus musculus |
| | | | | polymerase delta p12 | |
| 1679 | BC028520 | 492 | 83 | Unknown (protein for MGC: 41275) | Mus musculus |
| 1680 | AC005067_2 | 1340 | 73 | AC005067 Supported by Human EST | Homo sapiens |
| | | | | H08032.1 (NID: g872854), mouse EST | |
| | | | | AA870042.1 (NID: g2965487), and | |
| | | | | genscan | |
| 1680 | AF226732_1 | 2286 | 100 | AF226732 NPD007 | Homo sapiens |
| 1680 | BC018360 | 1199 | 68 | Unknown (protein for MGC: 18730) | Mus musculus |
| 1681 | AAH19040 | 897 | 100 | BC019040 Unknown (protein for | Homo sapiens |
| | | | | MGC: 20769) | |
| 1682 | AK023767 | 960 | 100 | unnamed protein product | Homo sapiens |
| 1682 | AL080169 | 979 | 100 | hypothetical protein | Homo sapiens |
| 1682 | BC016647 | 960 | 100 | Unknown (protein for MGC: 16844) | Homo sapiens |
| 1683 | AF309646_1 | 1147 | 88 | AF309646 Rab6-like protein WTH3 | Homo sapiens |
| 1683 | AF498941_1 | 1058 | 100 | AF498941 small GTP binding | Homo sapiens |
| | | | | protein RAB6C | |
| 1683 | AL136727 | 1147 | 88 | hypothetical protein | Homo sapiens |
| 1684 | AC005095_1 | 1373 | 100 | AC005095 pantophysin | Homo sapiens |
| 1684 | S72481 | 1373 | 100 | pantophysin | Homo sapiens |
| 1684 | X68194 | 1373 | 100 | h-Sp1 | Homo sapiens |
| 1685 | D14665 | 3850 | 99 | KIAA0021 protein | Homo sapiens |
| 1685 | U41765 | 3814 | 83 | metalloprotease/disintegrin/cysteine | Mus musculus |
| | | | | rich protein precursor | |
| 1685 | U41766 | 4476 | 100 | metalloprotease/disintegrin/cysteine- | Homo sapiens |
| | | | | rich protein precursor | |
| 1686 | U20770 | 1412 | 100 | cell surface glycoprotein | Homo sapiens |
| 1686 | U67274 | 1412 | 100 | metastasis suppressor | Homo sapiens |
| 1686 | X53795 | 1412 | 100 | inducible nembrane protein | Homo sapiens |
| 1687 | AF517934_1 | 2980 | 100 | AF517934 interleukin 2 receptor, | Homo sapiens |
| | | | | beta | |
| 1687 | AL022314 | 2980 | 100 | dJ1170K4.3 (Interleukin 2 | Homo sapiens |
| | | | | Receptor, Beta (IL-2 Receptor, | |
| | | | | CD122 antigen)) | |
| 1687 | BC025691 | 2980 | 100 | interleukin 2 receptor, beta | Homo sapiens |
| 1688 | AF072242 | 2167 | 100 | methyl-CpG binding protein MBD2 | Homo sapiens |
| 1688 | AF120994 | 2167 | 100 | methyl-CpG binding protein 2 | Homo sapiens |
| 1688 | BC032638 | 2167 | 100 | nethyl-CpG binding domain protein 2 | Homo sapiens |
| 1689 | AAH00486 | 607 | 100 | BC000486 small nuclear | Homo sapiens |
| | | | | ribonucleoprotein D2 polypeptide | |
| | | | | (16.5 kD) | |
| 1689 | AAH01930 | 607 | 100 | BC001930 small nuclear | Homo sapiens |
| | | | | ribonucleoprotein D2 polypeptide | |
| | | | | (16.5 kD) | |
| 1689 | AC00719_1 | 607 | 100 | AC007191 SMD2_HUMAN; SNRNP CORE | Homo sapiens |
| | | | | PROTEIN D2; SM-D2 | |
| 1690 | AAH18180 | 870 | 100 | BC018180 CGI-121 protein | Homo sapiens |
| 1690 | AF151879_1 | 870 | 100 | AF151879 CGI-121 protein | Homo sapiens |
| 1690 | BC029492 | 870 | 100 | CGI-121 protein | Homo sapiens |
| 1691 | U52373 | 4063 | 99 | MNB | Homo sapiens |
| 1691 | U58497 | 4037 | 99 | mp86 | Mus musculus |
| 1691 | X79769 | 4052 | 99 | Dual Specificity Yak1-related | Rattus |
| | | | | Kinase (Dyrk) | norvegicus |

### Example 3

### Initial Determination of Differential Regulation of Polynucleotides of the Invention in Pre-Eclampsia

[0279] A plurality of polynucleotide sequences were obtained from cDNA libraries obtained from both normal and pre-eclamptic placental tissues, us9ing SBH sequence signature analysis and Sanger sequencing techniques. The inserts of the library were amplified with PCR using primers specific for the vector sequences which flank the inserts. Clones from cDNA libraries were spotted on nylon membrane filters and screened with oligonucleotide probes (for example, 7-mers) to obtain signature sequences. The clones were clustered into groups of similar or identical sequences. Representative clones were selected for sequencing.

[0280] In some cases, the 5′ sequences of the amplified inserts was then deduced using a typical Sanger sequencing protocol. PCR products were purified and subjected to fluorescent dye terminator cycle sequencing. Single pass gel sequencing was done using a 377 Applied Biosystems (ABI) sequencer to obtain the novel nucleic acid sequences. In some cases, RACE (Rapid Amplification of cDNA Ends) was performed to further extend the sequence in the 5′ direction.

[0281] Relative expression of the gene may be approximated by a relative abundance of a transcript (number of copies of mRNA) of the gene in question in the cytoplasm of the cells of the tissues in question. Relative abundance of a transcript is calculated as an absolute number of cDNA clones from that transcript in the library created from the total mRNAs of the analyzed tissue over a total number of cDNA clones analyzed per tissue (e.g. 100,000 was the total number of cDNA clones analyzed per tissue. For example, if a gene was represented by 25,000 clones in a given placental library—i.e. it's cDNA cluster comprised 25,000 clones, relative expression of that gene is 25%, since 25% of all clones analyzed belong to that one gene.

[0282] Differential expression may be calculated for heterogeneous cDNA clusters which are clusters obtained through clustering of clones from two or more different libraries together. A cluster may be heterogeneous even if it's made up of clones from one library only, provided clustering was done for more than one library. More precisely, heterogeneity is the qualifier of the clustering experiment, rather that the qualifier of the cluster. For example, if two or more libraries were used in the clustering experiment, and a cluster comprises clones from only one of the two libraries, it can still be characterized as heterogeneous, with zero clones from all but one libraries. In this case pairwise comparisons were performed where two libraries were clustered at a time. For given initial conditions (100,000 clones per library, 200,000 total per clustering experiment), clusters of a size of 8 clones or greater were selected for further consideration. Out of these only those showing a differential ratio of clones of 2 times and above were selected as of statistically significant differential expression, thus keeping the confidence level at greater than or equal to 90%. This number measures the probability that the given cluster shows real differential expression. Note that since both libraries in the pair at hand were of the same initial size, therefore, no normalization of the cluster size on the total library size was necessary.

[0283] The following table shows the results of this process, indicating which polynucleotides of the invention are designated as up-regulated in pre-eclamptic placental tissues, and which are down-regulated in pre-eclamptic placental tissues.

TABLE 2

| | | | | Expression |
|---|---|---|---|---|
| | | | Expression | in Pre- |
| SEQ ID | | | in Normal | eclamptic |
| NO: | REGULATION | Cluster_ID | Placenta | Placenta |
| 1 | UP | 434 | 7 | 11 |
| 2 | UP | 376 | 108 | 148 |
| 3 | UP | 6623 | 6 | 10 |
| 4 | UP | 1996 | 6 | 15 |
| 5 | UP | 12951 | 17 | 32 |
| 6 | UP | 4704 | 18 | 23 |
| 7 | UP | 3930 | 0 | 8 |
| 8 | UP | 12138 | 25 | 29 |
| 9 | UP | 703 | 126 | 212 |
| 10 | DOWN | 305 | 190 | 180 |
| 11 | DOWN | 8 | 2878 | 1125 |
| 12 | UP | 2498 | 20 | 40 |
| 13 | DOWN | 12700 | 8 | 0 |
| 14 | DOWN | 6779 | 28 | 10 |
| 15 | DOWN | 1037 | 9 | 3 |
| 16 | UP | 8238 | 1 | 8 |
| 17 | UP | 11051 | 10 | 12 |
| 18 | DOWN | 9165 | 22 | 1 |
| 19 | DOWN | 8265 | 9 | 2 |
| 20 | DOWN | 39852 | 8 | 0 |
| 21 | DOWN | 13238 | 16 | 1 |
| 22 | UP | 3184 | 2 | 9 |
| 23 | DOWN | 15366 | 43 | 2 |
| 24 | DOWN | 32470 | 8 | 1 |
| 25 | DOWN | 6195 | 16 | 1 |
| 26 | UP | 69 | 3 | 14 |
| 27 | DOWN | 1550 | 14 | 4 |
| 28 | DOWN | 1544 | 9 | 3 |
| 29 | DOWN | 3129 | 23 | 18 |
| 30 | DOWN | 39826 | 11 | 0 |
| 31 | DOWN | 39825 | 11 | 0 |
| 32 | DOWN | 12237 | 42 | 26 |
| 33 | DOWN | 39614 | 14 | 0 |
| 34 | DOWN | 22223 | 8 | 1 |
| 35 | DOWN | 8274 | 8 | 2 |
| 36 | DOWN | 8993 | 16 | 1 |
| 37 | DOWN | 16337 | 11 | 1 |
| 38 | DOWN | 5959 | 18 | 16 |
| 39 | DOWN | 39367 | 10 | 1 |
| 40 | DOWN | 7336 | 23 | 4 |
| 41 | UP | 1052 | 22 | 73 |
| 42 | DOWN | 6260 | 18 | 1 |
| 43 | DOWN | 7782 | 8 | 0 |
| 44 | DOWN | 14057 | 8 | 0 |
| 45 | UP | 5438 | 14 | 27 |
| 46 | DOWN | 9433 | 15 | 2 |
| 47 | DOWN | 9442 | 18 | 8 |
| 48 | DOWN | 1722 | 36 | 10 |
| 49 | DOWN | 2710 | 31 | 9 |
| 50 | DOWN | 10245 | 14 | 11 |
| 51 | DOWN | 24399 | 15 | 2 |
| 52 | UP | 4592 | 2 | 10 |
| 53 | DOWN | 9466 | 23 | 3 |
| 54 | DOWN | 40893 | 9 | 0 |
| 55 | DOWN | 9639 | 9 | 1 |
| 56 | DOWN | 7143 | 10 | 1 |
| 57 | UP | 571 | 20 | 45 |
| 58 | UP | 396 | 2 | 30 |
| 59 | UP | 1195 | 10 | 17 |
| 60 | UP | 6656 | 2 | 9 |
| 61 | UP | 2970 | 2 | 10 |
| 62 | DOWN | 2929 | 21 | 18 |
| 63 | DOWN | 10556 | 37 | 17 |
| 64 | DOWN | 1033 | 55 | 42 |
| 65 | UP | 115 | 28 | 62 |
| 66 | UP | 1907 | 18 | 22 |
| 67 | UP | 326 | 5 | 32 |
| 68 | UP | 4657 | 12 | 30 |
| 69 | UP | 2228 | 78 | 145 |
| 70 | UP | 3061 | 2 | 8 |
| 71 | UP | 2145 | 55 | 154 |
| 72 | UP | 4072 | 21 | 31 |
| 73 | DOWN | 101 | 77 | 15 |
| 74 | DOWN | 1307 | 19 | 18 |
| 75 | UP | 2602 | 1 | 23 |
| 76 | UP | 2675 | 16 | 55 |
| 77 | UP | 5131 | 28 | 39 |
| 78 | DOWN | 2663 | 20 | 16 |
| 79 | DOWN | 3485 | 56 | 12 |
| 80 | UP | 4189 | 30 | 43 |
| 81 | DOWN | 2880 | 19 | 7 |
| 82 | UP | 3514 | 8 | 35 |
| 83 | UP | 1184 | 24 | 92 |
| 84 | DOWN | 1047 | 20 | 5 |
| 85 | UP | 37 | 33 | 76 |
| 86 | DOWN | 2085 | 17 | 4 |
| 87 | UP | 2655 | 1 | 16 |
| 88 | DOWN | 13007 | 8 | 1 |
| 89 | UP | 920 | 3 | 25 |
| 90 | DOWN | 50 | 71 | 11 |
| 91 | DOWN | 3413 | 97 | 25 |
| 92 | UP | 3610 | 5 | 17 |
| 93 | DOWN | 3705 | 10 | 2 |
| 94 | DOWN | 303 | 18 | 1 |
| 95 | DOWN | 6875 | 14 | 1 |
| 96 | UP | 4791 | 29 | 33 |
| 97 | UP | 1514 | 5 | 10 |
| 98 | UP | 848 | 6 | 29 |
| 99 | DOWN | 1305 | 27 | 7 |
| 100 | UP | 2659 | 29 | 79 |
| 101 | DOWN | 4498 | 37 | 14 |
| 102 | UP | 14168 | 13 | 18 |
| 103 | DOWN | 3391 | 8 | 1 |
| 104 | UP | 3013 | 10 | 15 |
| 105 | UP | 1182 | 2 | 32 |
| 106 | DOWN | 1177 | 103 | 7 |
| 107 | UP | 5258 | 4 | 11 |
| 108 | DOWN | 1739 | 20 | 1 |
| 109 | UP | 95 | 10 | 30 |
| 110 | UP | 664 | 19 | 20 |
| 111 | UP | 12341 | 1 | 8 |
| 112 | UP | 99 | 14 | 119 |
| 113 | UP | 168 | 23 | 53 |
| 114 | DOWN | 1492 | 32 | 11 |
| 115 | DOWN | 769 | 26 | 23 |
| 116 | UP | 87 | 6 | 16 |
| 117 | UP | 1314 | 1 | 27 |
| 118 | DOWN | 1147 | 126 | 100 |
| 119 | UP | 4205 | 6 | 23 |
| 120 | DOWN | 2994 | 19 | 9 |
| 121 | UP | 843 | 21 | 36 |
| 122 | UP | 1220 | 4 | 12 |
| 123 | DOWN | 482 | 23 | 3 |
| 124 | UP | 1061 | 2 | 9 |
| 125 | UP | 2205 | 10 | 42 |
| 126 | DOWN | 1730 | 21 | 18 |
| 127 | DOWN | 5983 | 51 | 11 |
| 128 | UP | 10559 | 23 | 94 |
| 129 | DOWN | 2158 | 28 | 5 |
| 130 | UP | 252 | 13 | 135 |
| 131 | DOWN | 4956 | 38 | 27 |
| 132 | DOWN | 7031 | 17 | 2 |
| 133 | DOWN | 1670 | 9 | 1 |
| 134 | DOWN | 30049 | 23 | 2 |
| 135 | DOWN | 27955 | 8 | 0 |
| 136 | DOWN | 7679 | 8 | 1 |
| 137 | UP | 2741 | 9 | 15 |
| 138 | DOWN | 7542 | 11 | 4 |
| 139 | UP | 8179 | 6 | 9 |
| 140 | UP | 7089 | 4 | 14 |
| 141 | UP | 6968 | 13 | 17 |
| 142 | UP | 7166 | 3 | 34 |
| 143 | UP | 7378 | 9 | 34 |
| 144 | DOWN | 6954 | 25 | 5 |
| 145 | DOWN | 3051 | 16 | 1 |
| 146 | DOWN | 5485 | 14 | 5 |
| 147 | UP | 5128 | 6 | 25 |
| 148 | UP | 6749 | 4 | 18 |
| 149 | DOWN | 5070 | 15 | 11 |
| 150 | UP | 1059 | 8 | 10 |
| 151 | UP | 4885 | 18 | 21 |
| 152 | UP | 4643 | 30 | 100 |
| 153 | DOWN | 5058 | 15 | 9 |
| 154 | UP | 5980 | 5 | 21 |
| 155 | UP | 2089 | 6 | 11 |
| 156 | DOWN | 5490 | 28 | 22 |
| 157 | UP | 4821 | 52 | 95 |
| 158 | UP | 61 | 13 | 27 |
| 159 | UP | 4710 | 7 | 37 |
| 160 | DOWN | 8083 | 8 | 1 |
| 161 | UP | 4878 | 9 | 43 |
| 162 | DOWN | 1857 | 25 | 21 |
| 163 | DOWN | 5346 | 11 | 3 |
| 164 | UP | 5124 | 21 | 55 |
| 165 | UP | 4804 | 41 | 123 |
| 166 | DOWN | 6555 | 10 | 3 |
| 167 | DOWN | 6869 | 8 | 2 |
| 168 | DOWN | 7961 | 13 | 8 |
| 169 | DOWN | 6854 | 58 | 13 |
| 170 | UP | 13272 | 3 | 15 |
| 171 | UP | 4796 | 66 | 85 |
| 172 | UP | 258 | 12 | 13 |
| 173 | UP | 5334 | 1 | 9 |
| 174 | UP | 10290 | 0 | 24 |
| 175 | DOWN | 5245 | 37 | 5 |
| 176 | DOWN | 12521 | 8 | 2 |
| 177 | UP | 1382 | 79 | 148 |
| 178 | DOWN | 12566 | 9 | 0 |
| 179 | UP | 6354 | 7 | 10 |
| 180 | UP | 4945 | 14 | 65 |
| 181 | DOWN | 5491 | 72 | 25 |
| 182 | DOWN | 10400 | 22 | 2 |
| 183 | UP | 5702 | 7 | 25 |
| 184 | DOWN | 3050 | 22 | 17 |
| 185 | DOWN | 6201 | 20 | 9 |
| 186 | UP | 4884 | 3 | 27 |
| 187 | DOWN | 7725 | 8 | 1 |
| 188 | UP | 5988 | 43 | 71 |
| 189 | UP | 11831 | 3 | 16 |
| 190 | DOWN | 4855 | 16 | 3 |
| 191 | UP | 786 | 25 | 27 |
| 192 | UP | 5263 | 4 | 19 |
| 193 | UP | 5556 | 16 | 20 |
| 194 | UP | 7758 | 1 | 8 |
| 195 | UP | 9188 | 1 | 17 |
| 196 | DOWN | 4698 | 18 | 16 |
| 197 | UP | 5654 | 0 | 8 |
| 198 | UP | 4937 | 3 | 10 |
| 199 | UP | 5890 | 2 | 18 |
| 200 | UP | 3983 | 5 | 46 |
| 201 | DOWN | 7240 | 45 | 19 |
| 202 | UP | 5555 | 3 | 8 |
| 203 | UP | 5276 | 4 | 9 |
| 204 | DOWN | 6687 | 49 | 22 |
| 205 | UP | 3547 | 31 | 93 |
| 206 | UP | 3513 | 14 | 54 |
| 207 | DOWN | 10446 | 8 | 1 |
| 208 | UP | 10774 | 8 | 13 |
| 209 | UP | 10793 | 1 | 7 |
| 210 | DOWN | 10988 | 26 | 1 |
| 211 | UP | 4366 | 1 | 8 |
| 212 | DOWN | 6243 | 119 | 96 |
| 213 | DOWN | 7248 | 8 | 0 |
| 214 | UP | 8984 | 2 | 10 |
| 215 | UP | 561 | 5 | 26 |
| 216 | DOWN | 10657 | 13 | 11 |
| 217 | UP | 9847 | 5 | 12 |
| 218 | UP | 10184 | 9 | 14 |
| 219 | UP | 5279 | 6 | 16 |
| 220 | UP | 12109 | 8 | 22 |
| 221 | UP | 3955 | 7 | 16 |
| 222 | UP | 8885 | 2 | 10 |
| 223 | UP | 10365 | 2 | 21 |
| 224 | UP | 1178 | 5 | 30 |
| 225 | UP | 4066 | 5 | 17 |
| 226 | UP | 1760 | 11 | 11 |
| 227 | UP | 5969 | 12 | 45 |
| 228 | DOWN | 4883 | 8 | 1 |
| 229 | UP | 5163 | 17 | 38 |
| 230 | UP | 10739 | 3 | 8 |
| 231 | DOWN | 12507 | 52 | 17 |
| 232 | DOWN | 1812 | 35 | 30 |
| 233 | UP | 134 | 0 | 18 |
| 234 | DOWN | 3197 | 10 | 2 |
| 235 | UP | 9077 | 8 | 12 |
| 236 | DOWN | 10016 | 21 | 17 |
| 237 | UP | 3788 | 3 | 11 |
| 238 | DOWN | 10011 | 8 | 1 |
| 239 | UP | 9599 | 3 | 9 |
| 240 | DOWN | 6566 | 64 | 1 |
| 241 | DOWN | 9865 | 19 | 1 |
| 242 | UP | 10885 | 17 | 26 |
| 243 | UP | 12292 | 5 | 22 |
| 244 | DOWN | 12390 | 45 | 22 |
| 245 | DOWN | 13573 | 49 | 4 |
| 246 | DOWN | 1203 | 35 | 4 |
| 247 | UP | 9768 | 19 | 33 |
| 248 | UP | 6552 | 3 | 12 |
| 249 | DOWN | 10363 | 9 | 4 |
| 250 | UP | 649 | 15 | 27 |
| 251 | UP | 12635 | 0 | 10 |
| 252 | DOWN | 464 | 17 | 6 |
| 253 | DOWN | 12809 | 21 | 2 |
| 254 | UP | 2868 | 11 | 34 |
| 255 | DOWN | 6423 | 136 | 7 |
| 256 | UP | 8249 | 6 | 13 |
| 257 | DOWN | 4665 | 24 | 14 |
| 258 | DOWN | 3521 | 18 | 17 |
| 259 | UP | 3001 | 18 | 25 |
| 260 | DOWN | 11740 | 8 | 2 |
| 261 | UP | 13122 | 5 | 16 |
| 262 | UP | 2177 | 48 | 72 |
| 263 | UP | 8444 | 11 | 24 |
| 264 | DOWN | 2187 | 57 | 5 |
| 265 | UP | 6962 | 61 | 148 |
| 266 | DOWN | 12538 | 7 | 2 |
| 267 | UP | 443 | 44 | 67 |
| 268 | DOWN | 13257 | 14 | 5 |
| 269 | DOWN | 13549 | 19 | 0 |
| 270 | DOWN | 4087 | 11 | 2 |
| 271 | UP | 45 | 3 | 20 |
| 272 | DOWN | 12290 | 13 | 9 |
| 273 | UP | 3570 | 11 | 49 |
| 274 | UP | 7142 | 2 | 9 |
| 275 | DOWN | 13596 | 37 | 12 |
| 276 | UP | 1975 | 34 | 251 |
| 277 | DOWN | 901 | 16 | 6 |
| 278 | UP | 5652 | 77 | 107 |
| 279 | DOWN | 10591 | 11 | 2 |
| 280 | DOWN | 11910 | 9 | 2 |
| 281 | UP | 12090 | 6 | 26 |
| 282 | DOWN | 4495 | 167 | 33 |
| 283 | UP | 3739 | 5 | 32 |
| 284 | UP | 5064 | 2 | 18 |
| 285 | DOWN | 10511 | 23 | 2 |
| 286 | UP | 1750 | 2 | 9 |
| 287 | DOWN | 2968 | 16 | 4 |
| 288 | UP | 12172 | 7 | 31 |
| 289 | UP | 11685 | 9 | 13 |
| 290 | UP | 12822 | 4 | 14 |
| 291 | UP | 4732 | 9 | 12 |
| 292 | UP | 12971 | 1 | 8 |
| 293 | UP | 12180 | 4 | 8 |
| 294 | UP | 6618 | 8 | 13 |
| 295 | DOWN | 12247 | 23 | 4 |
| 296 | UP | 9086 | 10 | 23 |
| 297 | UP | 11765 | 20 | 33 |
| 298 | UP | 12767 | 2 | 38 |
| 299 | DOWN | 2136 | 13 | 12 |
| 300 | UP | 1110 | 1 | 8 |
| 301 | UP | 10099 | 26 | 75 |
| 302 | DOWN | 4800 | 10 | 2 |
| 303 | DOWN | 13652 | 8 | 1 |
| 304 | UP | 4762 | 3 | 13 |
| 305 | UP | 1519 | 0 | 8 |
| 306 | UP | 223 | 1 | 17 |
| 307 | UP | 13680 | 1 | 8 |
| 308 | UP | 11884 | 1 | 8 |
| 309 | DOWN | 1681 | 16 | 13 |
| 310 | UP | 11800 | 16 | 36 |
| 311 | UP | 6565 | 111 | 125 |
| 312 | UP | 13555 | 9 | 11 |
| 313 | DOWN | 7878 | 15 | 4 |
| 314 | DOWN | 11630 | 12 | 3 |
| 315 | DOWN | 8596 | 29 | 12 |
| 316 | DOWN | 8005 | 17 | 8 |
| 317 | DOWN | 5037 | 29 | 12 |
| 318 | UP | 644 | 29 | 38 |
| 319 | UP | 7190 | 1 | 7 |
| 320 | UP | 12055 | 9 | 26 |
| 321 | DOWN | 4714 | 44 | 9 |
| 322 | UP | 4330 | 2 | 10 |
| 323 | UP | 6773 | 14 | 53 |
| 324 | DOWN | 9057 | 81 | 26 |
| 325 | DOWN | 2907 | 9 | 1 |
| 326 | UP | 2910 | 3 | 17 |
| 327 | DOWN | 9989 | 10 | 3 |
| 328 | UP | 1713 | 2 | 8 |
| 329 | UP | 3618 | 23 | 67 |
| 330 | UP | 2252 | 6 | 17 |
| 331 | DOWN | 12013 | 13 | 2 |
| 332 | UP | 6673 | 24 | 38 |
| 333 | DOWN | 2091 | 64 | 11 |
| 334 | DOWN | 11539 | 43 | 28 |
| 335 | DOWN | 14305 | 8 | 1 |
| 336 | UP | 8835 | 14 | 53 |
| 337 | DOWN | 12824 | 15 | 5 |
| 338 | DOWN | 13661 | 14 | 5 |
| 339 | UP | 8290 | 22 | 24 |
| 340 | DOWN | 12559 | 8 | 1 |
| 341 | UP | 10192 | 21 | 34 |
| 342 | UP | 8540 | 3 | 17 |
| 343 | DOWN | 563 | 18 | 8 |
| 344 | UP | 5319 | 3 | 11 |
| 345 | DOWN | 1131 | 19 | 13 |
| 346 | DOWN | 10034 | 25 | 18 |
| 347 | UP | 10644 | 0 | 8 |
| 348 | DOWN | 6564 | 15 | 10 |
| 349 | UP | 656 | 5 | 10 |
| 350 | DOWN | 13465 | 16 | 11 |
| 351 | DOWN | 13564 | 20 | 8 |
| 352 | UP | 9110 | 26 | 61 |
| 353 | DOWN | 6594 | 80 | 42 |
| 354 | UP | 1637 | 13 | 44 |
| 355 | UP | 13262 | 3 | 26 |
| 356 | UP | 484 | 16 | 69 |
| 357 | DOWN | 10314 | 63 | 11 |
| 358 | DOWN | 9880 | 8 | 0 |
| 359 | DOWN | 10993 | 17 | 4 |
| 360 | UP | 5788 | 7 | 18 |
| 361 | DOWN | 9892 | 109 | 54 |
| 362 | UP | 1602 | 38 | 83 |
| 363 | UP | 1191 | 21 | 44 |
| 364 | DOWN | 128 | 125 | 47 |
| 365 | UP | 239 | 166 | 949 |
| 366 | DOWN | 1202 | 111 | 90 |
| 367 | DOWN | 3724 | 22 | 3 |
| 368 | UP | 1080 | 1 | 9 |
| 369 | UP | 2376 | 33 | 94 |
| 370 | UP | 190 | 508 | 774 |
| 371 | UP | 3866 | 11 | 65 |
| 372 | DOWN | 27995 | 12 | 1 |
| 373 | UP | 4199 | 1 | 7 |
| 374 | UP | 311 | 2 | 21 |
| 375 | DOWN | 3585 | 20 | 14 |
| 376 | DOWN | 6583 | 9 | 2 |
| 377 | UP | 5646 | 9 | 33 |
| 378 | UP | 4746 | 1 | 27 |
| 379 | DOWN | 8891 | 33 | 2 |
| 380 | UP | 13605 | 8 | 13 |
| 381 | UP | 4479 | 16 | 118 |
| 382 | UP | 7523 | 2 | 9 |
| 383 | UP | 7575 | 1 | 16 |
| 384 | DOWN | 4842 | 18 | 3 |
| 385 | UP | 2071 | 31 | 72 |
| 386 | UP | 6828 | 1 | 24 |
| 387 | UP | 9973 | 18 | 38 |
| 388 | DOWN | 2141 | 104 | 61 |
| 389 | UP | 9003 | 10 | 16 |
| 390 | DOWN | 12691 | 25 | 2 |
| 391 | DOWN | 13237 | 19 | 6 |
| 392 | UP | 220 | 1 | 8 |
| 393 | UP | 5371 | 10 | 33 |
| 394 | UP | 12723 | 25 | 39 |
| 395 | DOWN | 9954 | 31 | 13 |
| 396 | UP | 1461 | 48 | 51 |
| 397 | DOWN | 10742 | 10 | 2 |
| 398 | UP | 5189 | 23 | 54 |
| 399 | UP | 2862 | 21 | 97 |
| 400 | UP | 12888 | 1 | 9 |
| 401 | UP | 8225 | 4 | 21 |
| 402 | DOWN | 5829 | 16 | 5 |
| 403 | DOWN | 1238 | 36 | 31 |
| 404 | UP | 2234 | 50 | 55 |
| 405 | UP | 10464 | 5 | 13 |
| 406 | UP | 1439 | 16 | 19 |
| 407 | DOWN | 6353 | 39 | 17 |
| 408 | UP | 8356 | 8 | 12 |
| 409 | UP | 12863 | 3 | 18 |
| 410 | UP | 5391 | 14 | 17 |
| 411 | DOWN | 660 | 29 | 3 |
| 412 | UP | 12828 | 3 | 19 |
| 413 | DOWN | 6367 | 16 | 1 |
| 414 | UP | 7641 | 16 | 30 |
| 415 | UP | 10503 | 2 | 10 |
| 416 | UP | 3687 | 10 | 17 |
| 417 | DOWN | 5524 | 37 | 15 |
| 418 | DOWN | 15 | 2577 | 450 |
| 419 | DOWN | 6087 | 11 | 7 |
| 420 | DOWN | 337 | 56 | 13 |
| 421 | UP | 38 | 11 | 24 |
| 422 | UP | 1940 | 55 | 67 |
| 423 | DOWN | 1002 | 22 | 7 |
| 424 | DOWN | 1922 | 22 | 10 |
| 425 | DOWN | 6192 | 58 | 24 |
| 426 | UP | 2041 | 33 | 60 |
| 427 | DOWN | 9351 | 31 | 1 |
| 428 | UP | 1758 | 10 | 16 |
| 429 | UP | 2954 | 8 | 35 |
| 430 | UP | 4097 | 34 | 66 |
| 431 | DOWN | 487 | 82 | 7 |
| 432 | DOWN | 6228 | 25 | 8 |
| 433 | UP | 235 | 45 | 99 |
| 434 | UP | 690 | 24 | 48 |
| 435 | UP | 1362 | 4 | 28 |
| 436 | UP | 1978 | 48 | 93 |
| 437 | UP | 691 | 2 | 8 |
| 438 | DOWN | 3805 | 11 | 1 |
| 439 | UP | 3639 | 98 | 115 |
| 440 | DOWN | 6919 | 8 | 1 |
| 441 | DOWN | 585 | 84 | 35 |
| 442 | DOWN | 4436 | 18 | 1 |
| 443 | UP | 8923 | 27 | 31 |
| 444 | UP | 24 | 226 | 377 |
| 445 | UP | 1211 | 67 | 106 |
| 446 | DOWN | 5473 | 8 | 0 |
| 447 | UP | 380 | 218 | 454 |
| 448 | DOWN | 2785 | 13 | 6 |
| 449 | UP | 6090 | 16 | 16 |
| 450 | UP | 177 | 23 | 34 |
| 451 | DOWN | 3632 | 25 | 11 |
| 452 | UP | 6400 | 2 | 10 |
| 453 | DOWN | 1660 | 49 | 13 |
| 454 | UP | 1934 | 24 | 95 |
| 455 | UP | 2680 | 1 | 12 |
| 456 | UP | 136 | 10 | 91 |
| 457 | DOWN | 9445 | 306 | 47 |
| 458 | DOWN | 4763 | 82 | 43 |
| 459 | DOWN | 1068 | 40 | 33 |
| 460 | DOWN | 1797 | 32 | 19 |
| 461 | DOWN | 8275 | 56 | 2 |
| 462 | UP | 265 | 0 | 8 |
| 463 | UP | 6547 | 2 | 11 |
| 464 | UP | 9244 | 12 | 36 |
| 465 | UP | 5676 | 9 | 15 |
| 466 | UP | 96 | 43 | 67 |
| 467 | UP | 6047 | 3 | 26 |
| 468 | UP | 3559 | 1 | 9 |
| 469 | UP | 6182 | 4 | 9 |
| 470 | DOWN | 8377 | 139 | 58 |
| 471 | UP | 1265 | 13 | 48 |
| 472 | DOWN | 12747 | 15 | 5 |
| 473 | DOWN | 14061 | 21 | 5 |
| 474 | UP | 365 | 89 | 367 |
| 475 | UP | 2363 | 68 | 88 |
| 476 | UP | 10195 | 14 | 18 |
| 477 | DOWN | 4520 | 42 | 12 |
| 478 | DOWN | 12435 | 12 | 3 |
| 479 | UP | 884 | 9 | 22 |
| 480 | UP | 4138 | 5 | 18 |
| 481 | UP | 1154 | 3 | 19 |
| 482 | UP | 2778 | 47 | 71 |
| 483 | DOWN | 852 | 16 | 15 |
| 484 | DOWN | 7188 | 110 | 20 |
| 485 | DOWN | 12168 | 9 | 1 |
| 486 | UP | 11591 | 1 | 15 |
| 487 | UP | 10039 | 2 | 12 |
| 488 | UP | 5194 | 11 | 32 |
| 489 | UP | 10061 | 1 | 7 |
| 490 | DOWN | 1994 | 30 | 20 |
| 491 | UP | 11941 | 8 | 78 |
| 492 | DOWN | 5733 | 12 | 8 |
| 493 | DOWN | 1299 | 12 | 4 |
| 494 | UP | 86 | 9 | 25 |
| 495 | UP | 292 | 123 | 155 |
| 496 | UP | 3644 | 1 | 19 |
| 497 | DOWN | 11458 | 19 | 13 |
| 498 | UP | 12641 | 1 | 7 |
| 499 | DOWN | 11674 | 75 | 9 |
| 500 | UP | 3089 | 0 | 8 |
| 501 | DOWN | 8552 | 9 | 3 |
| 502 | DOWN | 4808 | 25 | 1 |
| 503 | UP | 6540 | 16 | 33 |
| 504 | UP | 3966 | 13 | 33 |
| 505 | DOWN | 886 | 10 | 2 |
| 506 | UP | 3167 | 23 | 25 |
| 507 | UP | 1246 | 4 | 12 |
| 508 | UP | 3018 | 23 | 25 |
| 509 | UP | 506 | 2 | 8 |
| 510 | UP | 4683 | 4 | 20 |
| 511 | UP | 1165 | 41 | 78 |
| 512 | DOWN | 8148 | 8 | 0 |
| 513 | UP | 5746 | 4 | 9 |
| 514 | DOWN | 865 | 83 | 74 |
| 515 | UP | 3235 | 18 | 37 |
| 516 | DOWN | 5271 | 61 | 5 |
| 517 | DOWN | 4605 | 38 | 22 |
| 518 | UP | 517 | 64 | 95 |
| 519 | UP | 1341 | 23 | 35 |
| 520 | DOWN | 8858 | 32 | 13 |
| 521 | DOWN | 8205 | 10 | 1 |
| 522 | UP | 6977 | 12 | 22 |
| 523 | DOWN | 12678 | 15 | 9 |
| 524 | DOWN | 931 | 24 | 8 |
| 525 | DOWN | 12947 | 38 | 11 |
| 526 | UP | 8955 | 17 | 39 |
| 527 | DOWN | 9418 | 8 | 1 |
| 528 | UP | 1113 | 29 | 129 |
| 529 | DOWN | 3617 | 25 | 23 |
| 530 | UP | 5243 | 10 | 14 |
| 531 | UP | 4246 | 22 | 49 |
| 532 | UP | 8909 | 5 | 31 |
| 533 | UP | 1213 | 18 | 49 |
| 534 | UP | 13318 | 2 | 10 |
| 535 | UP | 574 | 1 | 7 |
| 536 | DOWN | 9166 | 9 | 1 |
| 537 | UP | 6211 | 5 | 37 |
| 538 | UP | 2771 | 1 | 15 |
| 539 | UP | 341 | 38 | 74 |
| 540 | DOWN | 4688 | 204 | 84 |
| 541 | UP | 3219 | 1 | 7 |
| 542 | UP | 6056 | 14 | 32 |
| 543 | DOWN | 6739 | 97 | 65 |
| 544 | UP | 629 | 172 | 487 |
| 545 | UP | 3239 | 62 | 106 |
| 546 | DOWN | 4958 | 1096 | 5 |
| 547 | DOWN | 2735 | 14 | 3 |
| 548 | UP | 6224 | 4 | 40 |
| 549 | UP | 3142 | 6 | 23 |
| 550 | DOWN | 2098 | 57 | 34 |
| 551 | UP | 1554 | 25 | 128 |
| 552 | UP | 2424 | 2 | 13 |
| 553 | UP | 127 | 2 | 8 |
| 554 | DOWN | 212 | 28 | 3 |
| 555 | UP | 4776 | 4 | 10 |
| 556 | DOWN | 327 | 18 | 1 |
| 557 | UP | 12520 | 1 | 10 |
| 558 | DOWN | 4604 | 11 | 4 |
| 559 | DOWN | 9810 | 16 | 1 |
| 560 | UP | 360 | 0 | 11 |
| 561 | DOWN | 10867 | 9 | 1 |
| 562 | UP | 1912 | 97 | 214 |
| 563 | DOWN | 751 | 123 | 120 |
| 564 | UP | 175 | 33 | 250 |
| 565 | DOWN | 5049 | 16 | 6 |
| 566 | UP | 65 | 115 | 329 |
| 567 | UP | 2609 | 17 | 42 |
| 568 | UP | 11967 | 5 | 16 |
| 569 | UP | 9230 | 12 | 30 |
| 570 | UP | 3946 | 33 | 96 |
| 571 | UP | 752 | 21 | 58 |
| 572 | UP | 4767 | 12 | 127 |
| 573 | DOWN | 9958 | 8 | 1 |
| 574 | UP | 1133 | 91 | 100 |
| 575 | UP | 5087 | 1 | 8 |
| 576 | UP | 12332 | 9 | 12 |
| 577 | UP | 383 | 11 | 45 |
| 578 | UP | 10259 | 4 | 18 |
| 579 | DOWN | 524 | 51 | 21 |
| 580 | DOWN | 11813 | 46 | 9 |
| 581 | DOWN | 6060 | 8 | 1 |
| 582 | DOWN | 923 | 196 | 162 |
| 583 | DOWN | 6619 | 8 | 1 |
| 584 | DOWN | 4150 | 16 | 10 |
| 585 | UP | 4185 | 25 | 30 |
| 586 | UP | 3764 | 16 | 19 |
| 587 | DOWN | 11835 | 47 | 8 |
| 588 | UP | 222 | 16 | 39 |
| 589 | UP | 393 | 7 | 37 |
| 590 | UP | 4352 | 26 | 90 |
| 591 | UP | 5384 | 30 | 50 |
| 592 | DOWN | 3019 | 20 | 16 |
| 593 | UP | 5001 | 4 | 17 |
| 594 | UP | 3370 | 14 | 31 |
| 595 | DOWN | 7069 | 24 | 19 |
| 596 | DOWN | 5126 | 59 | 33 |
| 597 | UP | 3532 | 2 | 10 |
| 598 | UP | 12 | 1645 | 2225 |
| 599 | UP | 193 | 21 | 22 |
| 600 | UP | 8086 | 20 | 24 |
| 601 | UP | 2586 | 47 | 299 |
| 602 | UP | 8780 | 23 | 72 |
| 603 | DOWN | 13928 | 45 | 22 |
| 604 | DOWN | 11269 | 24 | 1 |
| 605 | DOWN | 7070 | 58 | 37 |
| 606 | UP | 1557 | 42 | 97 |
| 607 | UP | 11999 | 5 | 19 |
| 608 | UP | 11661 | 22 | 33 |
| 609 | DOWN | 70 | 650 | 611 |
| 610 | DOWN | 498 | 20 | 16 |
| 611 | DOWN | 917 | 16 | 13 |
| 612 | UP | 8974 | 8 | 11 |
| 613 | UP | 2067 | 105 | 268 |
| 614 | UP | 2443 | 8 | 17 |
| 615 | UP | 91 | 53 | 98 |
| 616 | UP | 1585 | 9 | 34 |
| 617 | DOWN | 1283 | 14 | 10 |
| 618 | UP | 1977 | 59 | 112 |
| 619 | DOWN | 6535 | 8 | 1 |
| 620 | UP | 9417 | 19 | 32 |
| 621 | DOWN | 8959 | 18 | 17 |
| 622 | UP | 8095 | 3 | 22 |
| 623 | DOWN | 10468 | 8 | 1 |
| 624 | UP | 6664 | 13 | 18 |
| 625 | DOWN | 2971 | 15 | 4 |
| 626 | UP | 4386 | 19 | 50 |
| 627 | DOWN | 3843 | 321 | 16 |
| 628 | UP | 6223 | 2 | 9 |
| 629 | DOWN | 9914 | 12 | 4 |
| 630 | DOWN | 3261 | 8 | 1 |
| 631 | UP | 12511 | 12 | 48 |
| 632 | UP | 1883 | 2 | 8 |
| 633 | UP | 1918 | 3 | 32 |
| 634 | DOWN | 9695 | 63 | 4 |
| 635 | UP | 8882 | 10 | 28 |
| 636 | DOWN | 2315 | 300 | 277 |
| 637 | UP | 1286 | 33 | 46 |
| 638 | UP | 6004 | 81 | 149 |
| 639 | UP | 2236 | 44 | 83 |
| 640 | UP | 12400 | 2 | 9 |
| 641 | DOWN | 6716 | 130 | 7 |
| 642 | UP | 3715 | 9 | 9 |
| 643 | DOWN | 6931 | 20 | 14 |
| 644 | DOWN | 5278 | 82 | 13 |
| 645 | UP | 7811 | 1 | 15 |
| 646 | DOWN | 3783 | 124 | 76 |
| 647 | DOWN | 724 | 42 | 34 |
| 648 | UP | 13530 | 1 | 7 |
| 649 | UP | 666 | 1 | 9 |
| 650 | UP | 741 | 3 | 23 |
| 651 | DOWN | 7002 | 402 | 1 |
| 652 | DOWN | 9722 | 14 | 7 |
| 653 | DOWN | 8831 | 11 | 1 |
| 654 | UP | 100 | 25 | 63 |
| 655 | UP | 185 | 101 | 105 |
| 656 | UP | 13050 | 2 | 8 |
| 657 | UP | 1215 | 161 | 339 |
| 658 | UP | 1493 | 27 | 42 |
| 659 | UP | 2647 | 0 | 11 |
| 660 | UP | 11865 | 2 | 9 |
| 661 | UP | 335 | 2 | 29 |
| 662 | DOWN | 9974 | 9 | 1 |
| 663 | UP | 4325 | 0 | 8 |
| 664 | UP | 5859 | 9 | 25 |
| 665 | DOWN | 10755 | 7 | 2 |
| 666 | DOWN | 8227 | 27 | 7 |
| 667 | UP | 3716 | 7 | 46 |
| 668 | UP | 3304 | 5 | 24 |
| 669 | UP | 3045 | 3 | 12 |
| 670 | DOWN | 2017 | 13 | 2 |
| 671 | DOWN | 12994 | 8 | 0 |
| 672 | UP | 2386 | 54 | 111 |
| 673 | DOWN | 8884 | 98 | 11 |
| 674 | UP | 3949 | 30 | 58 |
| 675 | DOWN | 11971 | 21 | 19 |
| 676 | DOWN | 8080 | 8 | 1 |
| 677 | UP | 1932 | 37 | 71 |
| 678 | UP | 1735 | 1 | 8 |
| 679 | UP | 10004 | 5 | 14 |
| 680 | UP | 2313 | 2 | 8 |
| 681 | UP | 413 | 12 | 25 |
| 682 | UP | 824 | 51 | 102 |
| 683 | UP | 5494 | 87 | 133 |
| 684 | UP | 11842 | 11 | 49 |
| 685 | UP | 888 | 17 | 38 |
| 686 | DOWN | 9904 | 27 | 13 |
| 687 | UP | 6 | 141 | 4273 |
| 688 | DOWN | 4933 | 180 | 33 |
| 689 | DOWN | 4859 | 12 | 5 |
| 690 | DOWN | 7568 | 55 | 35 |
| 691 | DOWN | 10505 | 44 | 27 |
| 692 | DOWN | 2383 | 34 | 20 |
| 693 | UP | 182 | 2065 | 3955 |
| 694 | DOWN | 6129 | 143 | 40 |
| 695 | UP | 10187 | 9 | 21 |
| 696 | UP | 3 | 647 | 666 |
| 697 | UP | 3315 | 8 | 10 |
| 698 | DOWN | 12014 | 17 | 4 |
| 699 | UP | 1 | 2954 | 7028 |
| 700 | UP | 1206 | 16 | 233 |
| 701 | UP | 2821 | 30 | 83 |
| 702 | UP | 11882 | 2 | 9 |
| 703 | UP | 608 | 89 | 201 |
| 704 | DOWN | 2261 | 20 | 2 |
| 705 | UP | 7728 | 25 | 26 |
| 706 | UP | 5 | 3558 | 3991 |
| 707 | DOWN | 5075 | 66 | 0 |
| 708 | DOWN | 1709 | 8 | 0 |
| 709 | UP | 2058 | 10 | 19 |
| 710 | UP | 8913 | 14 | 33 |
| 711 | DOWN | 2605 | 23 | 3 |
| 712 | DOWN | 6388 | 8 | 0 |
| 713 | UP | 398 | 29 | 125 |
| 714 | UP | 146 | 17 | 54 |
| 715 | UP | 4 | 257 | 812 |
| 716 | UP | 5626 | 14 | 21 |
| 717 | UP | 2099 | 31 | 123 |
| 718 | UP | 9142 | 24 | 25 |
| 719 | UP | 11744 | 14 | 29 |
| 720 | UP | 123 | 198 | 1192 |
| 721 | UP | 2775 | 33 | 83 |
| 722 | UP | 2949 | 2 | 9 |
| 723 | UP | 3244 | 53 | 97 |
| 724 | UP | 153 | 3 | 16 |
| 725 | UP | 1034 | 11 | 48 |
| 726 | DOWN | 3515 | 14 | 6 |
| 727 | UP | 143 | 138 | 265 |
| 728 | DOWN | 9234 | 10 | 3 |
| 729 | DOWN | 60 | 264 | 83 |
| 730 | UP | 5906 | 9 | 26 |
| 731 | UP | 1288 | 13 | 23 |
| 732 | UP | 915 | 1 | 9 |
| 733 | DOWN | 9891 | 9 | 2 |
| 734 | UP | 33 | 40 | 272 |
| 735 | DOWN | 11571 | 74 | 13 |
| 736 | UP | 1023 | 2 | 20 |
| 737 | DOWN | 670 | 61 | 59 |
| 738 | UP | 5187 | 9 | 29 |
| 739 | UP | 2096 | 80 | 87 |
| 740 | DOWN | 5360 | 62 | 17 |
| 741 | DOWN | 12680 | 36 | 10 |
| 742 | UP | 5239 | 3 | 29 |
| 743 | DOWN | 6926 | 11 | 4 |
| 744 | UP | 4793 | 73 | 144 |
| 745 | UP | 167 | 2 | 10 |
| 746 | UP | 7706 | 5 | 11 |
| 747 | DOWN | 4344 | 20 | 9 |
| 748 | UP | 2896 | 57 | 115 |
| 749 | UP | 2766 | 6 | 15 |
| 750 | UP | 1652 | 20 | 45 |
| 751 | UP | 1295 | 5 | 15 |
| 752 | UP | 1733 | 11 | 17 |
| 753 | UP | 1728 | 65 | 176 |
| 754 | UP | 1958 | 3 | 25 |
| 755 | UP | 1092 | 32 | 225 |
| 756 | UP | 5222 | 27 | 59 |
| 757 | DOWN | 8928 | 130 | 10 |
| 758 | UP | 7681 | 14 | 15 |
| 759 | DOWN | 3953 | 21 | 6 |
| 760 | DOWN | 9050 | 7 | 1 |
| 761 | DOWN | 3793 | 72 | 53 |
| 762 | DOWN | 10133 | 8 | 1 |
| 763 | UP | 584 | 5 | 8 |
| 764 | DOWN | 12494 | 9 | 2 |
| 765 | UP | 4129 | 58 | 78 |
| 766 | UP | 3727 | 9 | 20 |
| 767 | DOWN | 5730 | 9 | 2 |
| 768 | UP | 2340 | 45 | 198 |
| 769 | UP | 4532 | 16 | 22 |
| 770 | UP | 1198 | 94 | 277 |
| 771 | DOWN | 10387 | 39 | 7 |
| 772 | DOWN | 12955 | 15 | 7 |
| 773 | UP | 10 | 4481 | 8914 |
| 774 | DOWN | 2895 | 69 | 50 |
| 775 | UP | 3498 | 21 | 25 |
| 776 | UP | 8557 | 11 | 26 |
| 777 | UP | 6368 | 53 | 105 |
| 778 | UP | 2195 | 53 | 143 |
| 779 | UP | 716 | 84 | 203 |
| 780 | DOWN | 3192 | 42 | 10 |
| 781 | UP | 215 | 33 | 284 |
| 782 | UP | 3858 | 11 | 26 |
| 783 | UP | 9024 | 22 | 24 |
| 784 | UP | 497 | 5 | 38 |
| 785 | DOWN | 503 | 102 | 93 |
| 786 | UP | 449 | 56 | 83 |
| 787 | UP | 789 | 26 | 34 |
| 788 | DOWN | 11806 | 28 | 16 |
| 789 | DOWN | 1262 | 11 | 6 |
| 790 | UP | 4113 | 17 | 30 |
| 791 | UP | 1638 | 108 | 330 |
| 792 | UP | 985 | 18 | 38 |
| 793 | DOWN | 4070 | 21 | 8 |
| 794 | UP | 109 | 177 | 272 |
| 795 | UP | 1561 | 55 | 135 |
| 796 | UP | 3164 | 17 | 47 |
| 797 | UP | 31 | 448 | 557 |
| 798 | DOWN | 1397 | 20 | 14 |
| 799 | UP | 2 | 550 | 1174 |
| 800 | UP | 5322 | 11 | 78 |
| 801 | DOWN | 4813 | 36 | 6 |
| 802 | DOWN | 7099 | 105 | 12 |
| 803 | UP | 10758 | 6 | 32 |
| 804 | DOWN | 4950 | 22 | 7 |
| 805 | UP | 9211 | 9 | 11 |
| 806 | UP | 4718 | 6 | 30 |
| 807 | DOWN | 2581 | 11 | 2 |
| 808 | UP | 338 | 21 | 28 |
| 809 | UP | 2850 | 69 | 161 |
| 810 | UP | 5703 | 0 | 17 |
| 811 | UP | 1736 | 102 | 110 |
| 812 | DOWN | 9390 | 10 | 3 |
| 813 | UP | 7952 | 14 | 19 |
| 814 | DOWN | 3792 | 10 | 3 |
| 815 | DOWN | 9887 | 31 | 6 |
| 816 | DOWN | 27 | 12 | 4 |
| 817 | DOWN | 3451 | 9 | 0 |
| 818 | UP | 3047 | 2 | 34 |
| 819 | DOWN | 5186 | 145 | 24 |
| 820 | UP | 34 | 67 | 81 |
| 821 | UP | 1508 | 7 | 38 |
| 822 | DOWN | 11292 | 211 | 13 |
| 823 | UP | 2430 | 6 | 19 |
| 824 | UP | 2554 | 55 | 63 |
| 825 | DOWN | 10869 | 9 | 0 |
| 826 | UP | 9553 | 16 | 25 |
| 827 | DOWN | 8832 | 19 | 4 |
| 828 | DOWN | 5761 | 22 | 2 |
| 829 | DOWN | 2378 | 7 | 1 |
| 830 | DOWN | 8304 | 8 | 1 |
| 831 | UP | 4823 | 11 | 19 |
| 832 | DOWN | 4229 | 8 | 1 |
| 833 | UP | 2722 | 2 | 7 |
| 834 | UP | 13325 | 4 | 8 |
| 835 | UP | 1114 | 1 | 22 |
| 836 | UP | 6459 | 1 | 7 |
| 837 | UP | 2953 | 3 | 11 |
| 838 | UP | 807 | 31 | 73 |
| 839 | UP | 2040 | 1 | 9 |
| 840 | UP | 1336 | 58 | 290 |
| 841 | UP | 6796 | 6 | 15 |
| 842 | UP | 1455 | 7 | 22 |
| 843 | UP | 2576 | 29 | 145 |
| 844 | UP | 1293 | 19 | 117 |
| 845 | DOWN | 3518 | 18 | 1 |
| 846 | DOWN | 3819 | 10 | 9 |
| 847 | UP | 4734 | 22 | 38 |
| 848 | UP | 10265 | 0 | 9 |
| 849 | UP | 10344 | 4 | 23 |
| 850 | DOWN | 12491 | 18 | 11 |
| 851 | UP | 11621 | 2 | 18 |
| 852 | UP | 8384 | 7 | 20 |

### Example 4

### Pfam Annotation of Polypeptides of the Invention

[0284] Using the Pfam software program (Sonnhammer et al., Nucleic Acids Res., Vol. 26(1) pp. 320-322 (1998) herein incorporated by reference), the polypeptides of the invention (SEQ ID NO: 853 through 1704) we determined. Further description of the Pfam models can be found at http://pfam.wustl.edu/.

[0285] The following table lists the polypeptides of SEQ ID NO 853 through 1704 that had significant Pfam model hits:

TABLE 3

| SEQ ID | | | | | | |
|---|---|---|---|---|---|---|
| NO: | Model | Repeats | Position | Score | E_value | Description |
| 853 | TPR | 1/1 | 297-330 | 14.0 | 0.036 | TPR Domain |
| 854 | Sterol_desat | 1/1 | 24-214 | 268.2 | 2.9e−81 | Sterol |
| | | | | | | desaturase |
| 856 | ras | 1/1 | 8-194 | 335.5 | 1.4e−98 | Ras family |
| 857 | thyroglobulin_1 | 1/1 | 7-86 | 140.8 | 2.5e−38 | Thyroglobulin |
| | | | | | | type-1 repeat |
| 860 | thiored | 2/2 | 65-173 | 131.1 | 3.3e−38 | Thioredoxin |
| 861 | GP120 | 1/1 | 21-44 | 5.6 | 0.81 | Envelope |
| | | | | | | glycoprotein |
| | | | | | | GP120 |
| 861 | TIMP | 1/1 | 69-246 | 484.3 | 1.9e−176 | Tissue |
| | | | | | | inhibitor of |
| | | | | | | metalloproteinase |
| 863 | globin | 1/1 | 20-160 | 203.0 | 4.6e−57 | Globin |
| 864 | COX1 | 1/1 | 5-461 | 867.8 | 3.4e−257 | Cytochrome C |
| | | | | | | and Quinol |
| | | | | | | oxidase |
| | | | | | | polypeptide |
| 866 | PGAM | 1/1 | 13-241 | 436.5 | 2.3e−127 | Phosphoglycerate |
| | | | | | | mutase family |
| 869 | 2OG-FeII_Oxy | 1/1 | 117-146 | 15.5 | 0.005 | 2OG-Fe(II) |
| | | | | | | oxygenase |
| | | | | | | superfamily |
| 870 | LIM | 1/1 | 281-337 | 78.5 | 8.5e−21 | LIM domain |
| 870 | PDZ | 1/1 | 30-109 | 86.7 | 3e−23 | PDZ domain |
| | | | | | | (Also known as |
| | | | | | | DHR or GLGF) |
| 873 | GDPD | 1/1 | 243-324 | 73.6 | 4.1e−21 | Glycerophosphoryl |
| | | | | | | diester |
| | | | | | | phosphodiest |
| 874 | rrm | 1/3 | 204-274 | 48.1 | 1.1e−12 | RNA recognition |
| | | | | | | motif. (a.k.a. |
| | | | | | | RRM, RBD, |
| 874 | rrm | 2/3 | 301-372 | 112.3 | 1.3e−31 | RNA recognition |
| | | | | | | motif. (a.k.a. |
| | | | | | | RRM, RBD, |
| 874 | rrm | 3/3 | 496-552 | 20.9 | 0.00011 | RNA recognition |
| | | | | | | motif. (a.k.a. |
| | | | | | | RRM, RBD, |
| 875 | DUF232 | 1/1 | 396-433 | 9.7 | 0.36 | Putative |
| | | | | | | transcriptional |
| | | | | | | regulator |
| 875 | bZIP | 1/2 | 233-274 | 9.9 | 0.27 | bZIP |
| | | | | | | transcription |
| | | | | | | factor |
| 875 | bZIP | 2/2 | 408-430 | 9.2 | 0.44 | bZIP |
| | | | | | | transcription |
| | | | | | | factor |
| 875 | filament | 1/1 | 181-496 | 550.9 | 8.8e−162 | Intermediate |
| | | | | | | filament |
| | | | | | | protein |
| 878 | Zip | 1/1 | 209-354 | 168.7 | 9.9e−47 | ZIP Zinc |
| | | | | | | transporter |
| 879 | OATP_C | 1/1 | 78-445 | 669.4 | 1.9e−197 | Organic Anion |
| | | | | | | Transporter |
| | | | | | | Polypeptide |
| | | | | | | (OATP |
| 879 | OATP_N | 1/1 | 520-662 | 180.8 | 2.2e−50 | Organic Anion |
| | | | | | | Transporter |
| | | | | | | Polypeptide |
| | | | | | | (OATP |
| 879 | kazal | 1/1 | 471-498 | 14.8 | 0.051 | Kazal-type |
| | | | | | | serine protease |
| | | | | | | inhibitor |
| | | | | | | domain |
| 880 | G-gamma | 1/1 | 13-67 | 98.2 | 1.1e−30 | GGL domain |
| 881 | JNK | 1/1 | 55-311 | 495.0 | 1.1e−156 | Jun-like |
| | | | | | | transcription |
| | | | | | | factor |
| 881 | PspA_IM30 | 1/1 | 344-382 | 9.1 | 0.32 | PspA/IM30 |
| | | | | | | family |
| 881 | bZIP | 1/1 | 320-384 | 77.5 | 1.6e−20 | bZIP |
| | | | | | | transcription |
| | | | | | | factor |
| 882 | chloroa_b-bind | 1/1 | 69-93 | 28.3 | 5.6e−07 | Chlorophyll A-B |
| | | | | | | binding protein |
| 883 | chloroa_b-bind | 1/1 | 82-133 | 103.6 | 1.1e−28 | Chlorophyll A-B |
| | | | | | | binding protein |
| 884 | Glyco_transf_25 | 1/1 | 35-219 | 252.2 | 7.1e−72 | Glycosyltransferase |
| | | | | | | family 25 |
| | | | | | | (LPS bi |
| 885 | chloroa_b-bind | 1/1 | 78-120 | 84.7 | 3.1e−23 | Chlorophyll A-B |
| | | | | | | binding protein |
| 888 | DEP | 1/1 | 454-528 | 120.9 | 2.4e−32 | Domain found in |
| | | | | | | Dishevelled, |
| | | | | | | Egl-10, and |
| 888 | DIX | 1/1 | 33-114 | 196.2 | 5.1e−55 | DIX domain |
| 888 | Dishevelled | 1/1 | 174-245 | 138.7 | 1.7e−46 | Dishevelled |
| | | | | | | specific domain |
| 888 | PDZ | 1/1 | 281-368 | 87.8 | 1.5e−23 | PDZ domain |
| | | | | | | (Also known as |
| | | | | | | DHR or GLGF) |
| 889 | DUF232 | 1/2 | 282-316 | 8.5 | 0.72 | Putative |
| | | | | | | transcriptional |
| | | | | | | regulator |
| 889 | K-box | 1/1 | 176-193 | 7.8 | 0.52 | K-box region |
| 889 | filament | 1/1 | 158-474 | 527.7 | 8.2e−155 | Intermediate |
| | | | | | | filament |
| | | | | | | protein |
| 890 | ank | 2/3 | 84-116 | 11.9 | 0.14 | Ankyrin repeat |
| 890 | ank | 3/3 | 117-149 | 20.6 | 0.00046 | Ankyrin repeat |
| 891 | Herpes_HEPA | 1/1 | 85-99 | 3.4 | 0.86 | Herpesvirus DNA |
| | | | | | | helicase/primase |
| | | | | | | complex |
| 891 | actin | 1/1 | 77-279 | 440.8 | 9.4e−134 | Actin |
| 892 | ig | 1/4 | 41-100 | 36.7 | 1.6e−08 | Immunoglobulin |
| | | | | | | domain |
| 892 | ig | 2/4 | 175-236 | 30.1 | 1.1e−06 | Immunoglobulin |
| | | | | | | domain |
| 892 | ig | 3/4 | 274-333 | 19.2 | 0.0012 | Immunoglobulin |
| | | | | | | domain |
| 893 | Ribosomal_L14 | 1/1 | 32-153 | 218.5 | 9.7e−62 | Ribosomal |
| | | | | | | protein |
| | | | | | | L14p/L23e |
| 894 | PMP22_Claudin | 1/1 | 73-223 | 278.8 | 6.8e−80 | PMP- |
| | | | | | | 22/EMP/MP20/Claudin |
| | | | | | | family |
| 895 | alk_phosphatase | 1/1 | 41-512 | 1065.8 | 0 | Alkaline |
| | | | | | | phosphatase |
| 897 | CPSF_A | 1/1 | 821-1105 | 508.3 | 5.8e−149 | CPSF A subunit |
| | | | | | | region |
| 898 | Neur_chan_memb | 1/2 | 29-124 | 93.3 | 1.2e−26 | Neurotransmitter- |
| | | | | | | gated ion- |
| | | | | | | channel tra |
| 898 | Neur_chan_memb | 2/2 | 220-245 | 20.5 | 3.4e−05 | Neurotransmitter- |
| | | | | | | gated ion- |
| | | | | | | channel tra |
| 899 | G-patch | 1/1 | 2311-2355 | 70.7 | 3.9e−19 | G-patch domain |
| 899 | dsrm | 1/1 | 2378-2414 | 38.2 | 2.9e−09 | Double-stranded |
| | | | | | | RNA binding |
| | | | | | | motif |
| 900 | serpin | 1/1 | 9-423 | 515.3 | 1e−151 | Serpin (serine |
| | | | | | | protease |
| | | | | | | inhibitor) |
| 901 | Lipoprotein_X | 1/21 | 224-246 | 10.2 | 0.086 | Mycoplasma |
| | | | | | | MG185/MG260 |
| | | | | | | protein |
| 901 | Lipoprotein_X | 10/21 | 477-501 | 11.6 | 0.035 | Mycoplasma |
| | | | | | | MG185/MG260 |
| | | | | | | protein |
| 901 | Lipoprotein_X | 11/21 | 502-521 | 13.8 | 0.0086 | Mycoplasma |
| | | | | | | MG185/MG260 |
| | | | | | | protein |
| 901 | Lipoprotein_X | 12/21 | 523-541 | 12.8 | 0.017 | Mycoplasma |
| | | | | | | MG185/MG260 |
| | | | | | | protein |
| 901 | Lipoprotein_X | 13/21 | 543-566 | 18.6 | 0.00042 | Mycoplasma |
| | | | | | | MG185/MG260 |
| | | | | | | protein |
| 901 | Lipoprotein_X | 14/21 | 567-596 | 21.7 | 5.8e−05 | Mycoplasma |
| | | | | | | MG185/MG260 |
| | | | | | | protein |
| 901 | Lipoprotein_X | 15/21 | 597-621 | 13.7 | 0.0092 | Mycoplasma |
| | | | | | | MG185/MG260 |
| | | | | | | protein |
| 901 | Lipoprotein_X | 16/21 | 622-649 | 21.5 | 6.5e−05 | Mycoplasma |
| | | | | | | MG185/MG260 |
| | | | | | | protein |
| 901 | Lipoprotein_X | 17/21 | 652-671 | 12.5 | 0.021 | Mycoplasma |
| | | | | | | MG185/MG260 |
| | | | | | | protein |
| 901 | Lipoprotein_X | 18/21 | 672-696 | 15.6 | 0.0027 | Mycoplasma |
| | | | | | | MG185/MG260 |
| | | | | | | protein |
| 901 | Lipoprotein_X | 2/21 | 247-271 | 11.9 | 0.03 | Mycoplasma |
| | | | | | | MG185/MG260 |
| | | | | | | protein |
| 901 | Lipoprotein_X | 20/21 | 725-754 | 8.5 | 0.25 | Mycoplasma |
| | | | | | | MG185/MG260 |
| | | | | | | protein |
| 901 | Lipoprotein_X | 3/21 | 273-298 | 20.2 | 0.00015 | Mycoplasma |
| | | | | | | MG185/MG260 |
| | | | | | | protein |
| 901 | Lipoprotein_X | 4/21 | 303-329 | 17.8 | 0.0007 | Mycoplasma |
| | | | | | | MG185/MG260 |
| | | | | | | protein |
| 901 | Lipoprotein_X | 5/21 | 332-356 | 16.5 | 0.0016 | Mycoplasma |
| | | | | | | MG185/MG260 |
| | | | | | | protein |
| 901 | Lipoprotein_X | 6/21 | 357-386 | 19.5 | 0.00023 | Mycoplasma |
| | | | | | | MG185/MG260 |
| | | | | | | protein |
| 901 | Lipoprotein_X | 7/21 | 387-419 | 23.1 | 2.3e−05 | Mycoplasma |
| | | | | | | MG185/MG260 |
| | | | | | | protein |
| 901 | Lipoprotein_X | 8/21 | 422-446 | 17.8 | 0.0007 | Mycoplasma |
| | | | | | | MG185/MG260 |
| | | | | | | protein |
| 901 | Lipoprotein_X | 9/21 | 447-476 | 18.8 | 0.00035 | Mycoplasma |
| | | | | | | MG185/MG260 |
| | | | | | | protein |
| 902 | Seryl_tRNA_N | 1/1 | 27-78 | 76.9 | 4.2e−19 | Seryl-tRNA |
| | | | | | | synthetase N- |
| | | | | | | terminal domain |
| 902 | tRNA-synt_2b | 1/1 | 224-391 | 201.2 | 9e−59 | tRNA synthetase |
| | | | | | | class II core |
| | | | | | | domain (G, |
| 903 | CH | 1/1 | 81-196 | 41.3 | 5.2e−10 | Calponin |
| | | | | | | homology (CH) |
| | | | | | | domain |
| 903 | IQ | 1/3 | 730-750 | 23.4 | 0.00011 | IQ calmodulin- |
| | | | | | | binding motif |
| 903 | IQ | 2/3 | 760-780 | 22.6 | 0.00018 | IQ calmodulin- |
| | | | | | | binding motif |
| 903 | IQ | 3/3 | 790-810 | 13.7 | 0.063 | IQ calmodulin- |
| | | | | | | binding motif |
| 903 | Peptidase_C57 | 1/1 | 1233-1240 | 5.8 | 0.74 | Vaccinia virus |
| | | | | | | I7 processing |
| | | | | | | peptidase |
| 903 | RasGAP | 1/1 | 977-1190 | 341.7 | 8.1e−99 | GTPase- |
| | | | | | | activator |
| | | | | | | protein for |
| | | | | | | Ras-like G |
| 903 | RasGAP_C | 1/1 | 1405-1540 | 227.6 | 1.8e−64 | RasGAP C- |
| | | | | | | terminus |
| 903 | WW | 1/1 | 650-664 | 13.9 | 0.041 | WW domain |
| 904 | Alpha_L_fucos | 1/1 | 20-414 | 1057.3 | 0 | Alpha-L- |
| | | | | | | fucosidase |
| 906 | hormone | 1/1 | 19-106 | 61.2 | 2.3e−22 | Somatotropin |
| | | | | | | hormone family |
| 907 | rrm | 1/1 | 307-378 | 84.1 | 2.8e−23 | RNA recognition |
| | | | | | | motif. (a.k.a. |
| | | | | | | RRM, RBD, or |
| 911 | cyclin | 1/1 | 75-202 | 169.3 | 6.5e−47 | Cyclin, N- |
| | | | | | | terminal domain |
| 911 | cyclin_C | 1/1 | 204-332 | 78.7 | 6.1e−20 | Cyclin, C- |
| | | | | | | terminal domain |
| 912 | RIIa | 1/1 | 54-91 | 63.4 | 3.5e−16 | Regulatory |
| | | | | | | subunit of type |
| | | | | | | II PKA R-subu |
| 912 | cNMP_binding | 1/2 | 181-269 | 106.8 | 7.1e−29 | Cyclic |
| | | | | | | nucleotide- |
| | | | | | | binding domain |
| 912 | cNMP_binding | 2/2 | 299-393 | 117.7 | 5.9e−32 | Cyclic |
| | | | | | | nucleotide- |
| | | | | | | binding domain |
| 913 | DSBA | 1/1 | 61-76 | 12.5 | 0.023 | DSBA |
| | | | | | | oxidoreductase |
| 913 | RNA_pol_L | 1/1 | 35-127 | 200.3 | 4.6e−60 | RNA polymerases |
| | | | | | | L/13 to 16 kDa |
| | | | | | | subunit |
| 914 | Collagen | 1/21 | 602-650 | 37.1 | 1.1e−08 | Collagen triple |
| | | | | | | helix repeat |
| | | | | | | (20 copies) |
| 914 | Collagen | 10/21 | 941-971 | 19.6 | 0.00068 | Collagen triple |
| | | | | | | helix repeat |
| | | | | | | (20 copies) |
| 914 | Collagen | 11/21 | 984-1012 | 14.7 | 0.015 | Collagen triple |
| | | | | | | helix repeat |
| | | | | | | (20 copies) |
| 914 | Collagen | 17/21 | 1249-1269 | 8.0 | 1 | Collagen triple |
| | | | | | | helix repeat |
| | | | | | | (20 copies) |
| 914 | Collagen | 21/21 | 1473-1517 | 34.0 | 7.4e−08 | 20/21 1434 |
| | | | | | | 1446 . . . 113 |
| 914 | Collagen | 3/21 | 676-735 | 49.9 | 3.2e−12 | Collagen triple |
| | | | | | | helix repeat |
| | | | | | | (20 copies) |
| 914 | Collagen | 4/21 | 736-780 | 39.1 | 3e−09 | Collagen triple |
| | | | | | | helix repeat |
| | | | | | | (20 copies) |
| 914 | Collagen | 5/21 | 781-840 | 51.4 | 1.2e−12 | Collagen triple |
| | | | | | | helix repeat |
| | | | | | | (20 copies) |
| 914 | Collagen | 6/21 | 854-885 | 17.1 | 0.0033 | Collagen triple |
| | | | | | | helix repeat |
| | | | | | | (20 copies) |
| 914 | Seryl_tRNA_N | 1/1 | 520-537 | 12.5 | 0.13 | Seryl-tRNA |
| | | | | | | synthetase N- |
| | | | | | | terminal domain |
| 915 | GNT-I | 1/1 | 45-477 | 1084.9 | 0 | GNT-I family |
| 916 | CBM_14 | 2/6 | 922-942 | 9.2 | 0.14 | Chitin binding |
| | | | | | | Peritrophin-A |
| | | | | | | domain |
| 916 | CBM_14 | 4/6 | 1763-1783 | 10.7 | 0.047 | 3/6 1643 |
| | | | | | | 1665 . . . 3558 |
| 916 | CBM_14 | 5/6 | 1923-1943 | 11.4 | 0.028 | 3/6 1643 |
| | | | | | | 1665 . . . 3558 |
| 916 | EGF | 10/47 | 748-783 | 31.4 | 3.7e−07 | EGF-like domain |
| 916 | EGF | 11/47 | 858-894 | 41.8 | 4.1e−10 | EGF-like domain |
| 916 | EGF | 12/47 | 900-936 | 37.7 | 5.9e−09 | EGF-like domain |
| 916 | EGF | 13/47 | 942-976 | 27.1 | 6e−06 | EGF-like domain |
| 916 | EGF | 14/47 | 1045-1081 | 37.0 | 9.4e−09 | EGF-like domain |
| 916 | EGF | 15/47 | 1163-1199 | 31.6 | 3.1e−07 | EGF-like domain |
| 916 | EGF | 16/47 | 1205-1242 | 17.7 | 0.0026 | EGF-like domain |
| 916 | EGF | 17/47 | 1248-1284 | 28.1 | 3.1e−06 | EGF-like domain |
| 916 | EGF | 18/47 | 1290-1326 | 27.1 | 6e−06 | EGF-like domain |
| 916 | EGF | 19/47 | 1332-1367 | 22.5 | 0.00012 | EGF-like domain |
| 916 | EGF | 2/47 | 250-276 | 18.0 | 0.0021 | EGF-like domain |
| 916 | EGF | 20/47 | 1373-1409 | 31.9 | 2.5e−07 | EGF-like domain |
| 916 | EGF | 21/47 | 1415-1446 | 29.2 | 1.5e−06 | EGF-like domain |
| 916 | EGF | 22/47 | 1457-1492 | 26.5 | 8.7e−06 | EGF-like domain |
| 916 | EGF | 23/47 | 1498-1533 | 27.5 | 4.6e−06 | EGF-like domain |
| 916 | EGF | 24/47 | 1539-1575 | 33.4 | 1e−07 | EGF-like domain |
| 916 | EGF | 25/47 | 1581-1616 | 25.9 | 1.3e−05 | EGF-like domain |
| 916 | EGF | 26/47 | 1622-1657 | 25.6 | 1.6e−05 | EGF-like domain |
| 916 | EGF | 27/47 | 1741-1777 | 36.3 | 1.5e−08 | EGF-like domain |
| 916 | EGF | 28/47 | 1783-1818 | 15.9 | 0.0086 | EGF-like domain |
| 916 | EGF | 29/47 | 1901-1937 | 30.4 | 6.8e−07 | EGF-like domain |
| 916 | EGF | 3/47 | 281-308 | 16.9 | 0.0045 | EGF-like domain |
| 916 | EGF | 30/47 | 1943-1976 | 29.5 | 1.3e−06 | EGF-like domain |
| 916 | EGF | 31/47 | 1984-2020 | 21.0 | 0.00031 | EGF-like domain |
| 916 | EGF | 32/47 | 2026-2059 | 17.6 | 0.0029 | EGF-like domain |
| 916 | EGF | 33/47 | 2065-2102 | 37.8 | 5.5e−09 | EGF-like domain |
| 916 | EGF | 34/47 | 2108-2142 | 25.1 | 2.2e−05 | EGF-like domain |
| 916 | EGF | 35/47 | 2148-2184 | 32.8 | 1.4e−07 | EGF-like domain |
| 916 | EGF | 36/47 | 2262-2295 | 22.9 | 9e−05 | EGF-like domain |
| 916 | EGF | 37/47 | 2301-2335 | 23.8 | 5.1e−05 | EGF-like domain |
| 916 | EGF | 38/47 | 2341-2376 | 26.0 | 1.2e−05 | EGF-like domain |
| 916 | EGF | 39/47 | 2382-2420 | 20.0 | 0.00061 | EGF-like domain |
| 916 | EGF | 4/47 | 381-417 | 20.2 | 0.00051 | EGF-like domain |
| 916 | EGF | 40/47 | 2426-2462 | 25.7 | 1.5e−05 | EGF-like domain |
| 916 | EGF | 41/47 | 2537-2573 | 30.4 | 6.9e−07 | EGF-like domain |
| 916 | EGF | 42/47 | 2579-2614 | 33.5 | 9e−08 | EGF-like domain |
| 916 | EGF | 43/47 | 2620-2650 | 18.0 | 0.0022 | EGF-like domain |
| 916 | EGF | 44/47 | 2659-2696 | 32.4 | 1.9e−07 | EGF-like domain |
| 916 | EGF | 45/47 | 2702-2736 | 16.6 | 0.0054 | EGF-like domain |
| 916 | EGF | 46/47 | 2742-2777 | 20.6 | 0.00041 | EGF-like domain |
| 916 | EGF | 47/47 | 2783-2817 | 13.8 | 0.034 | EGF-like domain |
| 916 | EGF | 5/47 | 423-459 | 30.1 | 8.6e−07 | EGF-like domain |
| 916 | EGF | 6/47 | 584-614 | 24.5 | 3.2e−05 | EGF-like domain |
| 916 | EGF | 7/47 | 625-659 | 23.3 | 6.8e−05 | EGF-like domain |
| 916 | EGF | 8/47 | 665-701 | 38.3 | 4e−09 | EGF-like domain |
| 916 | EGF | 9/47 | 707-742 | 42.0 | 3.7e−10 | EGF-like domain |
| 916 | TB | 1/10 | 324-366 | 72.5 | 2.4e−21 | TB domain |
| 916 | TB | 10/10 | 2477-2520 | 76.0 | 1.9e−22 | TB domain |
| 916 | TB | 2/10 | 474-519 | 69.6 | 2e−20 | TB domain |
| 916 | TB | 3/10 | 799-841 | 75.9 | 2e−22 | TB domain |
| 916 | TB | 4/10 | 991-1032 | 59.3 | 3.6e−17 | TB domain |
| 916 | TB | 6/10 | 1096-1138 | 71.2 | 6.2e−21 | TB domain |
| 916 | TB | 7/10 | 1678-1719 | 79.2 | 1.8e−23 | TB domain |
| 916 | TB | 8/10 | 1835-1878 | 79.5 | 1.5e−23 | TB domain |
| 916 | TB | 9/10 | 2199-2241 | 73.0 | 1.7e−21 | TB domain |
| 916 | wnt | 1/1 | 434-445 | 3.4 | 0.78 | wnt family |
| 917 | Fragilysin | 1/1 | 448-495 | 6.8 | 0.39 | Fragilysin |
| | | | | | | metallopeptidase |
| | | | | | | (M10C) en |
| 917 | Peptidase_M10 | 1/1 | 160-266 | 276.2 | 4.1e−79 | Matrixin |
| 917 | Peptidase_M10_N | 1/1 | 80-154 | 141.4 | 1.3e−48 | Matrix |
| | | | | | | metalloprotease, |
| | | | | | | N-terminal do |
| 917 | UPF0143 | 1/1 | 540-560 | 6.2 | 0.89 | Uncharacterised |
| | | | | | | protein family |
| | | | | | | (UPF01 |
| 917 | fn2 | 1/3 | 281-322 | 92.4 | 3.9e−34 | Fibronectin |
| | | | | | | type II domain |
| 917 | fn2 | 2/3 | 339-380 | 91.9 | 6.1e−34 | Fibronectin |
| | | | | | | type II domain |
| 917 | fn2 | 3/3 | 397-438 | 104.0 | 1.4e−38 | Fibronectin |
| | | | | | | type II domain |
| 917 | hemopexin | 1/4 | 523-566 | 42.4 | 2.7e−11 | Hemopexin |
| 917 | hemopexin | 2/4 | 568-611 | 54.2 | 6.8e−15 | Hemopexin |
| 917 | hemopexin | 3/4 | 616-663 | 73.0 | 1.3e−20 | Hemopexin |
| 917 | hemopexin | 4/4 | 665-708 | 31.9 | 4.4e−08 | Hemopexin |
| 918 | CD36 | 1/1 | 28-468 | 797.9 | 3.8e−236 | CD36 family |
| 920 | TSC22 | 1/1 | 141-200 | 146.4 | 4.8e−46 | TSC-22/dip/bun |
| | | | | | | family |
| 921 | AMOP | 1/1 | 483-646 | 319.0 | 7e−96 | AMOP domain |
| 921 | tsp_1 | 1/1 | 417-457 | 25.2 | 4.8e−06 | Thrombospondin |
| | | | | | | type 1 domain |
| 923 | Peptidase_C1 | 1/1 | 85-334 | 393.4 | 3.7e−117 | Papain family |
| | | | | | | cysteine |
| | | | | | | protease |
| 926 | secY | 1/3 | 87-108 | 11.6 | 0.013 | eubacterial |
| | | | | | | secY protein |
| 926 | secY | 3/3 | 278-472 | 28.2 | 1.7e−07 | eubacterial |
| | | | | | | secY protein |
| 927 | DUF173 | 1/1 | 583-629 | 16.4 | 0.0014 | Uncharacterized |
| | | | | | | ACR, COG1354 |
| 928 | arf | 1/1 | 24-202 | 423.3 | 2.1e−123 | ADP- |
| | | | | | | ribosylation |
| | | | | | | factor family |
| 930 | EF1BD | 1/1 | 175-261 | 198.7 | 1.5e−56 | EF-1 guanine |
| | | | | | | nucleotide |
| | | | | | | exchange domain |
| 931 | Myc-LZ | 1/1 | 360-390 | 8.5 | 0.75 | Myc leucine |
| | | | | | | zipper domain |
| 931 | bZIP | 1/1 | 327-391 | 21.5 | 0.00014 | bZIP |
| | | | | | | transcription |
| | | | | | | factor |
| 933 | CAP | 1/1 | 13-483 | 1121.9 | 0 | CAP protein |
| 934 | 7tm_1 | 1/1 | 179-431 | 255.5 | 4.1e−82 | 7 transmembrane |
| | | | | | | receptor |
| | | | | | | (rhodopsin |
| | | | | | | family) |
| 935 | NadA | 1/1 | 18-38 | 7.9 | 0.78 | Quinolinate |
| | | | | | | synthetase A |
| | | | | | | protein |
| 935 | RrnaAD | 1/1 | 133-169 | 5.2 | 0.78 | Ribosomal RNA |
| | | | | | | adenine |
| | | | | | | dimethylase |
| 935 | efhand | 1/4 | 34-62 | 39.6 | 4.8e−09 | EF hand |
| 935 | efhand | 2/4 | 70-98 | 38.4 | 1e−08 | EF hand |
| 935 | efhand | 3/4 | 107-135 | 42.1 | 9.8e−10 | EF hand |
| 935 | efhand | 4/4 | 143-171 | 41.2 | 1.7e−09 | EF hand |
| 936 | rrm | 1/2 | 107-176 | 59.4 | 5e−16 | RNA recognition |
| | | | | | | motif. (a.k.a. |
| | | | | | | RRM, RBD, or |
| 936 | rrm | 2/2 | 194-237 | 43.0 | 3.4e−11 | RNA recognition |
| | | | | | | motif. (a.k.a. |
| | | | | | | RRM, RBD, or |
| 939 | Vps55 | 1/1 | 26-154 | 54.2 | 2.2e−14 | Vacuolar |
| | | | | | | protein sorting |
| | | | | | | 55 |
| 940 | SH2 | 1/1 | 110-191 | 53.8 | 2.3e−17 | SH2 domain |
| 943 | CH | 1/1 | 57-169 | 79.5 | 1.4e−20 | Calponin |
| | | | | | | homology (CH) |
| | | | | | | domain |
| 943 | calponin | 1/1 | 206-231 | 51.5 | 2e−14 | Calponin family |
| | | | | | | repeat |
| 946 | PSI_PsaJ | 1/1 | 185-220 | 7.8 | 0.76 | Photosystem I |
| | | | | | | reaction centre |
| | | | | | | subunit IX/P |
| 947 | YT521-B | 1/1 | 436-526 | 210.7 | 2.2e−59 | YT521-B-like |
| | | | | | | family |
| 950 | HSP20 | 1/1 | 80-176 | 73.5 | 4.9e−19 | Hsp20/alpha |
| | | | | | | crystallin |
| | | | | | | family |
| 951 | CH | 1/2 | 55-158 | 99.5 | 4.2e−26 | Calponin |
| | | | | | | homology (CH) |
| | | | | | | domain |
| 951 | CH | 2/2 | 168-273 | 127.8 | 2e−34 | Calponin |
| | | | | | | homology (CH) |
| | | | | | | domain |
| 951 | efhand | 1/2 | 777-805 | 22.5 | 0.00025 | EF hand |
| 951 | efhand | 2/2 | 818-846 | 20.1 | 0.0012 | EF hand |
| 951 | spectrin | 1/4 | 299-409 | 62.5 | 7.6e−16 | Spectrin repeat |
| 951 | spectrin | 2/4 | 419-524 | 108.6 | 1.2e−28 | Spectrin repeat |
| 951 | spectrin | 3/4 | 535-646 | 56.3 | 4.1e−14 | Spectrin repeat |
| 951 | spectrin | 4/4 | 657-760 | 56.3 | 4.2e−14 | Spectrin repeat |
| 952 | abhydrolase | 1/1 | 172-407 | 50.2 | 2.1e−14 | alpha/beta |
| | | | | | | hydrolase fold |
| 953 | NIF | 1/1 | 164-338 | 358.8 | 1.4e−104 | NLI interacting |
| | | | | | | factor |
| 954 | PMP22_Claudin | 1/1 | 12-127 | 149.3 | 5.1e−42 | PMP- |
| | | | | | | 22/EMP/MP20/Claudin |
| | | | | | | family |
| 955 | Exo_endo_phos | 1/1 | 400-699 | 140.8 | 2.4e−38 | Endonuclease/Ex |
| | | | | | | onuclease/phosphatase |
| | | | | | | fa |
| 956 | rrm | 1/1 | 49-115 | 78.6 | 1.1e−21 | RNA recognition |
| | | | | | | motif. (a.k.a. |
| | | | | | | RRM, RBD, or |
| 956 | zf-CCHC | 1/1 | 140-157 | 20.4 | 0.00095 | Zinc knuckle |
| 958 | SH3 | 1/1 | 365-413 | 52.4 | 9.2e−13 | SH3 domain |
| 959 | ELH | 1/1 | 247-273 | 4.4 | 0.71 | Egg-laying |
| | | | | | | hormone |
| | | | | | | precursor |
| 959 | TGF-beta | 1/1 | 337-445 | 218.2 | 1.3e−62 | Transforming |
| | | | | | | growth factor |
| | | | | | | beta like |
| 959 | TGFb_propeptide | 1/1 | 61-293 | 194.0 | 2.3e−54 | TGF-beta |
| | | | | | | propeptide |
| 959 | Tub | 1/1 | 255-264 | 2.3 | 0.33 | Tub family |
| 960 | Hydrolase | 2/3 | 347-379 | 13.2 | 0.026 | haloacid |
| | | | | | | dehalogenase- |
| | | | | | | like hydrolase |
| 961 | PABP | 1/1 | 544-615 | 166.7 | 3.8e−46 | Poly-adenylate |
| | | | | | | binding |
| | | | | | | protein, unique |
| 961 | rrm | 1/4 | 14-85 | 98.4 | 1.7e−27 | RNA recognition |
| | | | | | | motif. (a.k.a. |
| | | | | | | RRM, RBD |
| 961 | rrm | 2/4 | 102-171 | 90.8 | 2.8e−25 | RNA recognition |
| | | | | | | motif. (a.k.a. |
| | | | | | | RRM, RBD |
| 961 | rrm | 3/4 | 194-264 | 110.9 | 3.6e−31 | RNA recognition |
| | | | | | | motif. (a.k.a. |
| | | | | | | RRM, RBD |
| 961 | rrm | 4/4 | 297-366 | 86.5 | 5.3e−24 | RNA recognition |
| | | | | | | motif. (a.k.a. |
| | | | | | | RRM, RBD |
| 962 | bZIP | 1/1 | 672-735 | 17.2 | 0.0023 | bZIP |
| | | | | | | transcription |
| | | | | | | factor |
| 964 | COLFI | 1/1 | 948-1165 | 561.6 | 5.7e−219 | Fibrillar |
| | | | | | | collagen C- |
| | | | | | | terminal domain |
| 964 | Collagen | 1/13 | 105-142 | 20.6 | 0.00035 | Collagen triple |
| | | | | | | helix repeat |
| | | | | | | (20 copies |
| 964 | Collagen | 10/13 | 657-716 | 44.5 | 9.7e−11 | Collagen triple |
| | | | | | | helix repeat |
| | | | | | | (20 copies |
| 964 | Collagen | 11/13 | 717-776 | 56.8 | 4e−14 | Collagen triple |
| | | | | | | helix repeat |
| | | | | | | (20 copies |
| 964 | Collagen | 12/13 | 780-839 | 56.3 | 5.6e−14 | Collagen triple |
| | | | | | | helix repeat |
| | | | | | | (20 copies |
| 964 | Collagen | 13/13 | 840-896 | 58.7 | 1.2e−14 | Collagen triple |
| | | | | | | helix repeat |
| | | | | | | (20 copies |
| 964 | Collagen | 2/13 | 171-230 | 64.5 | 3e−16 | Collagen triple |
| | | | | | | helix repeat |
| | | | | | | (20 copies |
| 964 | Collagen | 3/13 | 237-296 | 76.5 | 1.6e−19 | Collagen triple |
| | | | | | | helix repeat |
| | | | | | | (20 copies |
| 964 | Collagen | 4/13 | 297-356 | 66.3 | 9.5e−17 | Collagen triple |
| | | | | | | helix repeat |
| | | | | | | (20 copies |
| 964 | Collagen | 5/13 | 357-416 | 65.2 | 1.9e−16 | Collagen triple |
| | | | | | | helix repeat |
| | | | | | | (20 copies |
| 964 | Collagen | 6/13 | 417-476 | 65.6 | 1.5e−16 | Collagen triple |
| | | | | | | helix repeat |
| | | | | | | (20 copies |
| 964 | Collagen | 7/13 | 477-536 | 61.9 | 1.6e−15 | Collagen triple |
| | | | | | | helix repeat |
| | | | | | | (20 copies |
| 964 | Collagen | 8/13 | 537-596 | 67.3 | 5.2e−17 | Collagen triple |
| | | | | | | helix repeat |
| | | | | | | (20 copies |
| 964 | Collagen | 9/13 | 597-656 | 47.1 | 1.8e−11 | Collagen triple |
| | | | | | | helix repeat |
| | | | | | | (20 copies |
| 964 | DNA_po13_beta | 1/1 | 925-947 | 9.3 | 0.39 | DNA polymerase |
| | | | | | | III beta |
| | | | | | | subunit, N-term |
| 965 | DEAD | 1/1 | 205-430 | 273.3 | 4.3e−83 | DEAD/DEAH box |
| | | | | | | helicase |
| 965 | helicase_C | 1/1 | 477-548 | 130.3 | 1.4e−35 | Helicase |
| | | | | | | conserved c- |
| | | | | | | terminal domain |
| 966 | zf-RanBP | 1/1 | 85-114 | 32.7 | 2.8e−07 | Zn-finger in |
| | | | | | | Ran binding |
| | | | | | | protein and |
| | | | | | | others |
| 967 | DUF343 | 1/1 | 12-131 | 158.7 | 3.2e−44 | Protein of |
| | | | | | | unknown |
| | | | | | | function |
| | | | | | | (DUF343) |
| 969 | UPF0005 | 1/1 | 281-347 | 19.4 | 0.00018 | Uncharacterized |
| | | | | | | protein family |
| | | | | | | UPF0005 |
| 970 | GSHPx | 1/1 | 45-159 | 245.6 | 7e−70 | Glutathione |
| | | | | | | peroxidase |
| 970 | RTX | 1/1 | 48-57 | 5.2 | 0.22 | RTX N-terminal |
| | | | | | | domain |
| 971 | Insulin | 1/1 | 122-179 | 84.7 | 1.8e−21 | Insulin/IGF/Rel |
| | | | | | | axin family |
| 972 | 2OG-FeII_Oxy | 1/1 | 353-451 | 52.8 | 1.7e−13 | 2OG-Fe(II) |
| | | | | | | oxygenase |
| | | | | | | superfamily |
| 975 | ank | 2/7 | 61-93 | 33.7 | 8.2e−08 | Ankyrin repeat |
| 975 | ank | 3/7 | 94-126 | 22.1 | 0.00017 | Ankyrin repeat |
| 975 | ank | 4/7 | 127-159 | 29.4 | 1.4e−06 | Ankyrin repeat |
| 975 | ank | 5/7 | 160-192 | 44.2 | 8.8e−11 | Ankyrin repeat |
| 975 | ank | 6/7 | 193-225 | 38.0 | 4.9e−09 | Ankyrin repeat |
| 979 | Glyco_transf_29 | 1/1 | 86-373 | 419.0 | 4.3e−122 | Glycosyltransferase |
| | | | | | | family 29 |
| | | | | | | (sialyl |
| 980 | TIM | 1/1 | 82-254 | 383.9 | 3.8e−124 | Triosephosphate |
| | | | | | | isomerase |
| 981 | adh_short | 1/1 | 60-308 | 297.7 | 1.4e−85 | short chain |
| | | | | | | dehydrogenase |
| 982 | Ribosomal_L24e | 1/1 | 40-110 | 177.5 | 2.5e−51 | Ribosomal |
| | | | | | | protein L24e |
| 985 | annexin | 1/4 | 63-130 | 116.8 | 4.1e−31 | Annexin |
| 985 | annexin | 2/4 | 135-202 | 109.0 | 9e−29 | Annexin |
| 985 | annexin | 3/4 | 219-287 | 88.8 | 1.1e−22 | Annexin |
| 985 | annexin | 4/4 | 295-362 | 106.8 | 4.2e−28 | Annexin |
| 989 | Fz | 1/1 | 147-266 | 213.2 | 6.3e−72 | Fz domain |
| 989 | NTR | 1/1 | 298-402 | 80.9 | 1.2e−20 | NTR/C345C |
| | | | | | | module |
| 990 | WW | 1/1 | 151-180 | 48.0 | 1e−11 | WW domain |
| 991 | Glyco_hydro_35 | 1/1 | 6-66 | 89.4 | 4.7e−26 | Glycosyl |
| | | | | | | hydrolases |
| | | | | | | family 35 |
| 993 | PKI | 1/1 | 15-84 | 98.0 | 1.2e−27 | cAMP-dependent |
| | | | | | | protein kinase |
| | | | | | | inhibitor |
| 994 | RWP-RK | 1/1 | 63-74 | 8.4 | 0.71 | RWP-RK domain |
| 994 | Stathmin | 1/1 | 26-165 | 311.6 | 9.2e−90 | Stathmin family |
| 999 | Peptidase_M1 | 1/1 | 235-619 | 659.8 | 6.6e−228 | Peptidase |
| | | | | | | family M1 |
| 1000 | Peptidase_C1 | 1/1 | 256-483 | 323.3 | 3.8e−96 | Papain family |
| | | | | | | cysteine |
| | | | | | | protease |
| 1001 | IF-2B | 1/1 | 15-298 | 436.2 | 3e−127 | Initiation |
| | | | | | | factor 2 |
| | | | | | | subunit family |
| 1002 | Cu_amine_oxid | 1/2 | 315-722 | 751.6 | 3.3e−222 | Copper amine |
| | | | | | | oxidase, enzyme |
| | | | | | | domain |
| 1002 | Cu_amine_oxid | 2/2 | 723-759 | 61.9 | 1.3e−16 | Copper amine |
| | | | | | | oxidase, enzyme |
| | | | | | | domain |
| 1002 | Cu_amine_oxidN2 | 1/1 | 58-145 | 115.9 | 2.5e−32 | Copper amine |
| | | | | | | oxidase, N2 |
| | | | | | | domain |
| 1002 | Cu_amine_oxidN3 | 1/1 | 161-261 | 99.6 | 1.4e−28 | Copper amine |
| | | | | | | oxidase, N3 |
| | | | | | | domain |
| 1003 | DUF279 | 1/1 | 98-110 | 6.8 | 1 | Eukaryotic |
| | | | | | | protein of |
| | | | | | | unknown |
| | | | | | | function |
| 1003 | TRAPP_Bet3 | 1/1 | 58-238 | 418.5 | 6.1e−122 | Transport |
| | | | | | | protein |
| | | | | | | particle |
| | | | | | | (TRAPP) com |
| 1004 | zf-CCCH | 1/2 | 114-140 | 49.6 | 2.8e−13 | Zinc finger C- |
| | | | | | | x8-C-x5-C-x3-H |
| | | | | | | type (and simil |
| 1004 | zf-CCCH | 2/2 | 152-178 | 48.1 | 8e−13 | Zinc finger C- |
| | | | | | | x8-C-x5-C-x3-H |
| | | | | | | type (and simil |
| 1007 | Peptidase_M13 | 1/1 | 544-750 | 262.3 | 4.3e−81 | Peptidase |
| | | | | | | family M13 |
| 1007 | Peptidase_M4 | 1/1 | 582-594 | 11.6 | 0.079 | Thermolysin |
| | | | | | | metallopeptidase, |
| | | | | | | catalytic |
| 1008 | Cadherin_C_term | 1/1 | 661-817 | 280.3 | 2.5e−80 | Cadherin |
| | | | | | | cytoplasmic |
| | | | | | | region |
| 1008 | cadherin | 1/5 | 92-182 | 62.9 | 5.1e−17 | Cadherin domain |
| 1008 | cadherin | 2/5 | 196-289 | 109.3 | 1.3e−30 | Cadherin domain |
| 1008 | cadherin | 3/5 | 303-404 | 122.1 | 2.2e−34 | Cadherin domain |
| 1008 | cadherin | 4/5 | 417-510 | 94.1 | 3.7e−26 | Cadherin domain |
| 1008 | cadherin | 5/5 | 523-616 | 42.1 | 6.5e−11 | Cadherin domain |
| 1010 | KH | 1/3 | 32-78 | 57.3 | 5.9e−15 | KH domain |
| 1010 | KH | 2/3 | 116-165 | 63.1 | 1.2e−16 | KH domain |
| 1010 | KH | 3/3 | 298-346 | 58.3 | 3e−15 | KH domain |
| 1011 | Glyco_hydro_2_N | 1/1 | 78-101 | 19.8 | 0.00014 | Glycosyl |
| | | | | | | hydrolases |
| | | | | | | family 2, sugar b |
| 1012 | C2 | 1/3 | 158-241 | 86.9 | 1.3e−23 | C2 domain |
| 1012 | C2 | 3/3 | 724-757 | 21.5 | 9.4e−05 | C2 domain |
| 1013 | PA28_alpha | 1/1 | 32-95 | 155.4 | 1e−42 | Proteasome |
| | | | | | | activator pa28 |
| | | | | | | alpha subunit |
| 1013 | PA28_beta | 1/1 | 126-275 | 409.9 | 2.4e−119 | Proteasome |
| | | | | | | activator pa28 |
| | | | | | | beta subunit |
| 1013 | biopterin_H | 1/1 | 59-69 | 6.8 | 0.18 | Biopterin- |
| | | | | | | dependent |
| | | | | | | aromatic amino |
| | | | | | | acid h |
| 1014 | ras | 1/1 | 27-129 | 80.3 | 8.8e−23 | Ras family |
| 1015 | Rhabdo_glycop | 1/1 | 392-439 | 10.6 | 0.019 | Rhabdovirus |
| | | | | | | spike |
| | | | | | | glycoprotein |
| 1015 | ig | 1/3 | 90-174 | 22.9 | 0.00011 | Immunoglobulin |
| | | | | | | domain |
| 1015 | ig | 3/3 | 308-362 | 23.1 | 9.7e−05 | Immunoglobulin |
| | | | | | | domain |
| 1016 | EGF | 1/5 | 264-300 | 15.1 | 0.014 | EGF-like domain |
| 1016 | EGF | 2/5 | 306-343 | 35.3 | 2.9e−08 | EGF-like domain |
| 1016 | EGF | 3/5 | 349-380 | 20.9 | 0.00033 | EGF-like domain |
| 1016 | EGF | 4/5 | 389-425 | 19.1 | 0.0011 | EGF-like domain |
| 1016 | EGF | 5/5 | 431-467 | 15.5 | 0.011 | EGF-like domain |
| 1016 | TIL | 1/2 | 297-349 | 9.9 | 0.094 | Trypsin |
| | | | | | | Inhibitor like |
| | | | | | | cysteine rich |
| | | | | | | do |
| 1016 | Tissue_fac | 1/1 | 583-625 | 20.1 | 0.00014 | Tissue_factor |
| 1016 | Xlink | 1/1 | 33-64 | 7.8 | 0.008 | Extracellular |
| | | | | | | link domain |
| 1016 | lectin_c | 1/1 | 47-103 | 20.3 | 0.00082 | Lectin C-type |
| | | | | | | domain |
| 1018 | FH2 | 1/1 | 1-59 | 57.2 | 9.5e−15 | Formin Homology |
| | | | | | | 2 Domain |
| 1019 | GoLoco | 1/1 | 64-84 | 33.6 | 1.4e−08 | LGN motif, |
| | | | | | | putative GEF |
| | | | | | | specific for G- |
| | | | | | | alpha |
| 1019 | Rap_GAP | 1/1 | 277-464 | 424.3 | 1.1e−123 | Rap/ran-GAP |
| 1020 | Cys_knot | 1/1 | 297-394 | 114.6 | 1.8e−30 | Cystine−knot |
| | | | | | | domain |
| 1020 | IGFBP | 1/1 | 77-148 | 115.5 | 1.4e−31 | Insulin-like |
| | | | | | | growth factor |
| | | | | | | binding protein |
| 1020 | tsp_1 | 1/1 | 249-290 | 56.2 | 2.7e−15 | Thrombospondin |
| | | | | | | type 1 domain |
| 1020 | vwc | 2/2 | 151-214 | 102.8 | 1.9e−28 | von Willebrand |
| | | | | | | factor type C |
| | | | | | | domain |
| 1021 | rrm | 1/2 | 9-72 | 77.8 | 1.9e−21 | RNA recognition |
| | | | | | | motif. (a.k.a. |
| | | | | | | RRM, RBD, or |
| 1021 | rrm | 2/2 | 208-274 | 49.7 | 3.5e−13 | RNA recognition |
| | | | | | | motif. (a.k.a. |
| | | | | | | RRM, RBD, or |
| 1022 | Ets | 1/1 | 409-492 | 206.7 | 3.5e−58 | Ets-domain |
| 1023 | CRF | 1/1 | 192-230 | 70.0 | 9.6e−19 | Corticotropin- |
| | | | | | | releasing |
| | | | | | | factor family |
| 1024 | Exonuclease | 1/1 | 64-236 | 103.6 | 1.5e−27 | Exonuclease |
| 1026 | OPR | 1/1 | 59-88 | 50.1 | 9.8e−13 | Octicosapeptide |
| | | | | | | repeat |
| 1027 | SSF | 1/2 | 112-279 | 28.8 | 1.7e−07 | Sodium: solute |
| | | | | | | symporter |
| | | | | | | family |
| 1027 | SSF | 2/2 | 400-514 | 12.4 | 0.0086 | Sodium: solute |
| | | | | | | symporter |
| | | | | | | family |
| 1029 | Ribosomal_S9 | 1/1 | 19-151 | 294.9 | 3.2e−91 | Ribosomal |
| | | | | | | protein S9/S16 |
| 1031 | actin | 1/1 | 24-399 | 942.3 | 2.3e−286 | Actin |
| 1032 | gln-synt | 1/1 | 249-502 | 364.6 | 1.1e−105 | Glutamine |
| | | | | | | synthetase, |
| | | | | | | catalytic |
| | | | | | | domain |
| 1032 | gln-synt_N | 1/1 | 163-244 | 128.6 | 1.6e−37 | Glutamine |
| | | | | | | synthetase, |
| | | | | | | beta-Grasp |
| | | | | | | domain |
| 1034 | sushi | 1/3 | 71-117 | 12.5 | 0.15 | Sushi domain |
| | | | | | | (SCR repeat) |
| 1034 | sushi | 2/3 | 137-192 | 54.2 | 1.5e−12 | Sushi domain |
| | | | | | | (SCR repeat) |
| 1034 | sushi | 3/3 | 199-252 | 54.9 | 9.6e−13 | Sushi domain |
| | | | | | | (SCR repeat) |
| 1034 | trypsin | 1/1 | 515-786 | 155.7 | 1.2e−48 | Trypsin |
| 1034 | vwa | 1/1 | 304-502 | 221.2 | 7.1e−64 | von Willebrand |
| | | | | | | factor type A |
| | | | | | | domain |
| 1036 | efhand | 1/6 | 90-118 | 19.0 | 0.0023 | EF hand |
| 1036 | efhand | 2/6 | 126-154 | 9.6 | 0.91 | EF hand |
| 1036 | efhand | 4/6 | 210-238 | 21.3 | 0.00053 | EF hand |
| 1036 | efhand | 6/6 | 287-315 | 9.8 | 0.81 | EF hand |
| 1037 | bZIP | 1/1 | 75-135 | 78.1 | 1.1e−20 | bZIP |
| | | | | | | transcription |
| | | | | | | factor |
| 1038 | AhpC-TSA | 1/1 | 16-165 | 310.5 | 2e−89 | AhpC/TSA family |
| 1039 | IBR | 1/1 | 340-389 | 7.3 | 0.81 | IBR domain |
| 1039 | zf-C2H2 | 1/5 | 319-344 | 13.5 | 0.26 | Zinc finger, |
| | | | | | | C2H2 type |
| 1039 | zf-C2H2 | 2/5 | 350-374 | 22.3 | 0.0018 | Zinc finger, |
| | | | | | | C2H2 type |
| 1039 | zf-C2H2 | 3/5 | 380-402 | 26.1 | 0.00019 | Zinc finger, |
| | | | | | | C2H2 type |
| 1039 | zf-C2H2 | 4/5 | 408-430 | 25.7 | 0.00024 | Zinc finger, |
| | | | | | | C2H2 type |
| 1039 | zf-C2H2 | 5/5 | 438-461 | 23.5 | 0.00085 | Zinc finger, |
| | | | | | | C2H2 type |
| 1040 | EGF | 2/2 | 664-691 | 13.2 | 0.052 | EGF-like domain |
| 1040 | FAD_binding_7 | 1/1 | 388-412 | 6.0 | 1 | FAD binding |
| | | | | | | domain of DNA |
| | | | | | | photolyase |
| 1040 | Pep_M12B_propep | 1/1 | 86-201 | 164.7 | 7.6e−46 | Reprolysin |
| | | | | | | family |
| | | | | | | propeptide |
| 1040 | Reprolysin | 1/1 | 218-420 | 400.8 | 1.3e−116 | Reprolysin |
| | | | | | | (M12B) family |
| | | | | | | zinc metallo |
| 1040 | disintegrin | 1/1 | 437-512 | 102.0 | 8.2e−33 | Disintegrin |
| 1041 | Na_H_antiporter | 1/1 | 477-523 | 8.8 | 0.26 | Na+/H+ |
| | | | | | | antiporter |
| | | | | | | family |
| 1041 | Na_sulph_symp | 1/2 | 19-174 | 124.1 | 1.3e−34 | Sodium: sulfate |
| | | | | | | symporter |
| | | | | | | transmembran |
| 1041 | Na_sulph_symp | 2/2 | 225-585 | 200.5 | 2.5e−56 | Sodium: sulfate |
| | | | | | | symporter |
| | | | | | | transmembran |
| 1042 | MDM2 | 1/1 | 177-189 | 11.1 | 0.017 | p53-associated |
| | | | | | | protein (MDM2) |
| 1042 | NAD_binding_1 | 1/1 | 65-160 | 48.5 | 1.5e−12 | Oxidoreductase |
| | | | | | | NAD-binding |
| | | | | | | domain |
| 1043 | trypsin | 1/1 | 95-331 | 330.0 | 4e−104 | Trypsin |
| 1045 | EGF | 1/18 | 83-110 | 27.0 | 6.3e−06 | EGF-like domain |
| 1045 | EGF | 10/18 | 803-838 | 26.0 | 1.2e−05 | EGF-like domain |
| 1045 | EGF | 11/18 | 844-879 | 21.2 | 0.00027 | EGF-like domain |
| 1045 | EGF | 12/18 | 885-921 | 24.5 | 3.3e−05 | EGF-like domain |
| 1045 | EGF | 13/18 | 927-963 | 24.7 | 2.9e−05 | EGF-like domain |
| 1045 | EGF | 14/18 | 969-1006 | 22.1 | 0.00015 | EGF-like domain |
| 1045 | EGF | 15/18 | 1107-1144 | 20.2 | 0.00053 | EGF-like domain |
| 1045 | EGF | 16/18 | 1150-1185 | 30.4 | 6.7e−07 | EGF-like domain |
| 1045 | EGF | 17/18 | 1304-1339 | 30.8 | 5.2e−07 | EGF-like domain |
| 1045 | EGF | 18/18 | 1345-1384 | 31.5 | 3.5e−07 | EGF-like domain |
| 1045 | EGF | 2/18 | 310-345 | 30.6 | 6.1e−07 | EGF-like domain |
| 1045 | EGF | 4/18 | 556-592 | 29.8 | 1e−06 | EGF-like domain |
| 1045 | EGF | 5/18 | 598-634 | 28.1 | 3.2e−06 | EGF-like domain |
| 1045 | EGF | 6/18 | 640-661 | 9.2 | 0.68 | EGF-like domain |
| 1045 | EGF | 8/18 | 721-756 | 24.6 | 3e−05 | EGF-like domain |
| 1045 | EGF | 9/18 | 762-797 | 26.4 | 9.3e−06 | EGF-like domain |
| 1045 | Fanconia | 1/1 | 9-31 | 5.6 | 0.94 | Fanconi anaemia |
| | | | | | | group A protein |
| 1045 | TB | 1/4 | 246-289 | 54.5 | 1.1e−15 | TB domain |
| 1045 | TB | 2/4 | 367-407 | 70.6 | 9.5e−21 | TB domain |
| 1045 | TB | 3/4 | 1036-1079 | 74.2 | 7.2e−22 | TB domain |
| 1045 | TB | 4/4 | 1213-1255 | 76.3 | 1.5e−22 | TB domain |
| 1045 | VSP | 1/3 | 660-681 | 7.4 | 0.3 | |
| 1045 | VSP | 3/3 | 907-927 | 6.9 | 0.41 | |
| 1045 | granulin | 1/2 | 621-636 | 7.4 | 0.58 | Granulin |
| 1048 | CSD | 1/8 | 53-118 | 77.9 | 1.8e−20 | ‘Cold-shock’ |
| | | | | | | DNA-binding |
| | | | | | | domain |
| 1048 | CSD | 3/8 | 213-276 | 89.0 | 1.3e−23 | 2/8 180 |
| | | | | | | 207 . . . 4471 |
| 1048 | CSD | 4/8 | 337-365 | 9.7 | 0.31 | 2/8 180 |
| | | | | | | 207 . . . 4471 |
| 1048 | CSD | 5/8 | 376-424 | 28.5 | 1.6e−06 | 2/8 180 |
| | | | | | | 207 . . . 4471 |
| 1048 | CSD | 6/8 | 514-538 | 11.3 | 0.11 | 2/8 180 |
| | | | | | | 207 . . . 4471 |
| 1048 | CSD | 7/8 | 546-610 | 76.5 | 4.6e−20 | 2/8 180 |
| | | | | | | 207 . . . 4471 |
| 1048 | CSD | 8/8 | 701-766 | 74.9 | 1.2e−19 | 2/8 180 |
| | | | | | | 207 . . . 4471 |
| 1050 | DIL | 1/1 | 451-557 | 160.9 | 2.2e−44 | DIL domain |
| 1050 | FHA | 1/1 | 92-158 | 50.0 | 1.5e−11 | FHA domain |
| 1050 | PDZ | 1/1 | 675-758 | 86.3 | 4e−23 | PDZ domain |
| | | | | | | (Also known as |
| | | | | | | DHR or GLGF) |
| 1051 | Lamp | 1/1 | 65-438 | 832.2 | 1.7e−246 | Lysosome- |
| | | | | | | associated |
| | | | | | | membrane |
| | | | | | | glycoprot |
| 1052 | pp-binding | 1/1 | 103-170 | 69.7 | 1.1e−17 | Phosphopantetheine |
| | | | | | | attachment |
| | | | | | | site |
| 1053 | START | 1/1 | 174-324 | 58.6 | 4.1e−16 | START domain |
| 1055 | HSP70 | 1/1 | 620-643 | 4.7 | 0.87 | Hsp70 protein |
| 1055 | helicase_C | 1/1 | 643-732 | 50.3 | 8.6e−13 | Helicase |
| | | | | | | conserved C- |
| | | | | | | terminal domain |
| 1056 | Calpain_III | 1/1 | 385-542 | 387.0 | 2.6e−113 | Calpain large |
| | | | | | | subunit, domain |
| | | | | | | III |
| 1056 | Peptidase_C2 | 1/1 | 75-374 | 739.1 | 1.9e−218 | Calpain family |
| | | | | | | cysteine |
| | | | | | | protease |
| 1056 | Porin_2 | 1/1 | 683-706 | 5.9 | 0.69 | Porin subfamily |
| 1056 | efhand | 2/4 | 609-637 | 14.7 | 0.036 | EF hand |
| 1056 | efhand | 3/4 | 639-667 | 16.6 | 0.01 | EF hand |
| 1057 | KOW | 1/1 | 135-169 | 34.8 | 1.3e−07 | KOW motif |
| 1058 | TGF-beta | 1/1 | 260-367 | 121.4 | 2.7e−34 | Transforming |
| | | | | | | growth factor |
| | | | | | | beta like |
| | | | | | | domain |
| 1062 | ig | 1/2 | 65-142 | 13.7 | 0.039 | Immunoglobulin |
| | | | | | | domain |
| 1062 | ig | 2/2 | 172-235 | 21.2 | 0.00032 | Immunoglobulin |
| | | | | | | domain |
| 1063 | EGF | 2/2 | 436-451 | 12.1 | 0.1 | EGF-like domain |
| 1063 | Glyco_hydro_56 | 1/1 | 38-376 | 785.1 | 2.7e−232 | Hyaluronidase |
| 1064 | DUF232 | 1/2 | 278-329 | 14.6 | 0.017 | Putative |
| | | | | | | transcriptional |
| | | | | | | regulator |
| 1064 | KE2 | 1/1 | 315-347 | 9.6 | 0.39 | KE2 family |
| | | | | | | protein |
| 1064 | filament | 1/1 | 97-409 | 568.1 | 5.6e−167 | Intermediate |
| | | | | | | filament |
| | | | | | | protein |
| 1067 | PKD | 1/2 | 280-319 | 25.1 | 9.2e−07 | PKD domain |
| 1067 | PKD | 2/2 | 448-476 | 7.0 | 0.5 | PKD domain |
| 1068 | zf-B_box | 1/1 | 228-268 | 55.4 | 1.2e−12 | B-box zinc |
| | | | | | | finger |
| 1069 | ras | 1/1 | 25-216 | 372.2 | 1.9e−109 | Ras family |
| 1070 | IRS | 1/1 | 234-336 | 206.5 | 3.9e−58 | PTB domain |
| | | | | | | (IRS-1 type) |
| 1070 | PH | 1/1 | 71-184 | 47.1 | 7.1e−12 | PH domain |
| 1071 | Peptidase_M16 | 1/1 | 98-246 | 240.8 | 2e−68 | Insulinase |
| | | | | | | (Peptidase |
| | | | | | | family M16) |
| 1072 | CBM_20 | 1/1 | 279-356 | 31.5 | 4e−07 | Starch binding |
| | | | | | | domain |
| 1073 | PRA1 | 1/1 | 80-240 | 280.6 | 2e−80 | Prenylated rab |
| | | | | | | acceptor (PRA1) |
| 1075 | CLN3 | 1/1 | 48-449 | 889.8 | 8.1e−264 | CLN3 protein |
| 1075 | FA_desaturase | 1/1 | 52-83 | 11.7 | 0.019 | Fatty acid |
| | | | | | | desaturase |
| 1076 | UPF0146 | 1/1 | 2989-3007 | 7.2 | 0.81 | Uncharacterised |
| | | | | | | protein family |
| | | | | | | (UPF0146 |
| 1076 | laminin_B | 2/2 | 1715-1851 | 83.2 | 7.3e−22 | Laminin B |
| | | | | | | (Domain IV) |
| 1076 | laminin_EGF | 1/22 | 322-378 | 30.1 | 4.1e−07 | Laminin EGF- |
| | | | | | | like (Domains |
| | | | | | | III and V) |
| 1076 | laminin_EGF | 10/22 | 798-848 | 43.0 | 8.4e−11 | Laminin EGF- |
| | | | | | | like (Domains |
| | | | | | | III and V) |
| 1076 | laminin_EGF | 11/22 | 851-883 | 29.0 | 8.8e−07 | Laminin EGF- |
| | | | | | | like (Domains |
| | | | | | | III and V) |
| 1076 | laminin_EGF | 12/22 | 1460-1508 | 58.1 | 4e−15 | Laminin EGF- |
| | | | | | | like (Domains |
| | | | | | | III and V) |
| 1076 | laminin_EGF | 14/22 | 1550-1596 | 44.6 | 2.9e−11 | Laminin EGF- |
| | | | | | | like (Domains |
| | | | | | | III and V) |
| 1076 | laminin_EGF | 15/22 | 1599-1647 | 65.4 | 3.1e−17 | Laminin EGF- |
| | | | | | | like (Domains |
| | | | | | | III and V) |
| 1076 | laminin_EGF | 16/22 | 1853-1883 | 15.1 | 0.0083 | Laminin EGF- |
| | | | | | | like (Domains |
| | | | | | | III and V) |
| 1076 | laminin_EGF | 17/22 | 1886-1932 | 51.9 | 2.2e−13 | Laminin EGF- |
| | | | | | | like (Domains |
| | | | | | | III and V) |
| 1076 | laminin_EGF | 18/22 | 1935-1988 | 51.4 | 3.2e−13 | Laminin EGF- |
| | | | | | | like (Domains |
| | | | | | | III and V) |
| 1076 | laminin_EGF | 19/22 | 1991-2042 | 65.3 | 3.3e−17 | Laminin EGF- |
| | | | | | | like (Domains |
| | | | | | | III and V) |
| 1076 | laminin_EGF | 2/22 | 381-448 | 45.4 | 1.6e−11 | Laminin EGF- |
| | | | | | | like (Domains |
| | | | | | | III and V) |
| 1076 | laminin_EGF | 20/22 | 2045-2089 | 45.4 | 1.7e−11 | Laminin EGF- |
| | | | | | | like (Domains |
| | | | | | | III and V) |
| 1076 | laminin_EGF | 21/22 | 2092-2136 | 47.8 | 3.5e−12 | Laminin EGF- |
| | | | | | | like (Domains |
| | | | | | | III and V) |
| 1076 | laminin_EGF | 22/22 | 2139-2167 | 16.0 | 0.0048 | Laminin EGF- |
| | | | | | | like (Domains |
| | | | | | | III and V) |
| 1076 | laminin_EGF | 3/22 | 451-493 | 34.1 | 3e−08 | Laminin EGF- |
| | | | | | | like (Domains |
| | | | | | | III and V) |
| 1076 | laminin_EGF | 4/22 | 516-560 | 47.1 | 5.7e−12 | Laminin EGF- |
| | | | | | | like (Domains |
| | | | | | | III and V) |
| 1076 | laminin_EGF | 5/22 | 563-606 | 40.4 | 4.5e−10 | Laminin EGF- |
| | | | | | | like (Domains |
| | | | | | | III and V) |
| 1076 | laminin_EGF | 6/22 | 609-651 | 51.4 | 3.3e−13 | Laminin EGF- |
| | | | | | | like (Domains |
| | | | | | | III and V) |
| 1076 | laminin_EGF | 7/22 | 654-696 | 40.6 | 4e−10 | Laminin EGF- |
| | | | | | | like (Domains |
| | | | | | | III and V) |
| 1076 | laminin_EGF | 8/22 | 699-747 | 45.0 | 2.2e−11 | Laminin EGF- |
| | | | | | | like (Domains |
| | | | | | | III and V) |
| 1076 | laminin_EGF | 9/22 | 766-795 | 38.7 | 1.4e−09 | Laminin EGF- |
| | | | | | | like (Domains |
| | | | | | | III and V) |
| 1076 | laminin_G | 1/4 | 2898-2933 | 9.0 | 0.27 | Laminin G |
| | | | | | | domain |
| 1076 | laminin_G | 3/4 | 3392-3524 | 45.2 | 1.3e−11 | Laminin G |
| | | | | | | domain |
| 1076 | laminin_G | 4/4 | 3571-3698 | 60.6 | 5.7e−16 | Laminin G |
| | | | | | | domain |
| 1076 | laminin_Nterm | 1/1 | 67-320 | 285.9 | 3.8e−86 | Laminin N- |
| | | | | | | terminal |
| | | | | | | (Domain VI) |
| 1077 | KOW | 1/1 | 12-47 | 31.2 | 1.2e−06 | KOW motif |
| 1077 | Ribosomal_L27e | 1/1 | 59-143 | 213.6 | 7.4e−74 | Ribosomal L27e |
| | | | | | | protein family |
| 1078 | arf | 1/1 | 64-240 | 144.3 | 1e−39 | ADP- |
| | | | | | | ribosylation |
| | | | | | | factor family |
| 1080 | UPF0005 | 1/1 | 99-279 | 137.6 | 9.1e−39 | Uncharacterized |
| | | | | | | protein family |
| | | | | | | UPF0005 |
| 1081 | cyclin | 1/1 | 81-208 | 163.2 | 4.4e−45 | Cyclin, N- |
| | | | | | | terminal domain |
| 1081 | cyclin_C | 1/1 | 210-339 | 73.0 | 2.1e−18 | Cyclin, C- |
| | | | | | | terminal domain |
| 1082 | Oxysterol_BP | 1/1 | 442-858 | 772.2 | 2.1e−228 | Oxysterol- |
| | | | | | | binding protein |
| 1082 | PH | 1/1 | 150-242 | 87.5 | 2.9e−23 | PH domain |
| 1083 | DUF348 | 1/1 | 110-129 | 11.6 | 0.14 | Domain of |
| | | | | | | unknown |
| | | | | | | function |
| | | | | | | (DUF348) |
| 1083 | rnaseH | 1/1 | 600-733 | 28.5 | 1e−06 | RNase H |
| 1083 | rve | 1/1 | 863-963 | 27.5 | 9.7e−07 | Integrase core |
| | | | | | | domain |
| 1083 | rvp | 1/1 | 63-84 | 25.9 | 7.8e−06 | Retroviral |
| | | | | | | aspartyl |
| | | | | | | protease |
| 1083 | rvt | 1/1 | 185-357 | 46.1 | 1.4e−11 | Reverse |
| | | | | | | transcriptase |
| | | | | | | (RNA-dependent |
| | | | | | | DNA pol |
| 1084 | MAP1_LC3 | 1/1 | 40-143 | 255.6 | 6.1e−75 | Microtubule |
| | | | | | | associated |
| | | | | | | protein 1A/1B, |
| | | | | | | light |
| 1085 | 7tm_1 | 1/2 | 50-88 | 8.2 | 0.045 | 7 transmembrane |
| | | | | | | receptor |
| | | | | | | (rhodopsin |
| | | | | | | family) |
| 1089 | SlyX | 1/1 | 273-283 | 6.3 | 0.019 | SlyX |
| 1090 | aa_permeases | 2/2 | 359-410 | 12.5 | 0.012 | |
| 1092 | adh_short | 1/1 | 28-228 | 149.0 | 4.1e−41 | short chain |
| | | | | | | dehydrogenase |
| 1094 | Clusterin | 1/1 | 16-463 | 1269.5 | 0 | Clusterin |
| 1094 | Thymidylate_kin | 1/1 | 338-380 | 9.1 | 0.024 | Thymidylate |
| | | | | | | kinase |
| 1096 | COLFI | 1/1 | 1248-1466 | 568.8 | 9.2e−222 | Fibrillar |
| | | | | | | collagen C- |
| | | | | | | terminal domain |
| 1096 | Collagen | 1/18 | 112-161 | 27.3 | 5e−06 | Collagen triple |
| | | | | | | helix repeat |
| | | | | | | (20 copies) |
| 1096 | Collagen | 10/18 | 659-718 | 60.6 | 3.6e−15 | Collagen triple |
| | | | | | | helix repeat |
| | | | | | | (20 copies) |
| 1096 | Collagen | 11/18 | 719-778 | 70.2 | 8.4e−18 | Collagen triple |
| | | | | | | helix repeat |
| | | | | | | (20 copies) |
| 1096 | Collagen | 12/18 | 782-841 | 68.4 | 2.7e−17 | Collagen triple |
| | | | | | | helix repeat |
| | | | | | | (20 copies) |
| 1096 | Collagen | 13/18 | 842-901 | 60.4 | 4e−15 | Collagen triple |
| | | | | | | helix repeat |
| | | | | | | (20 copies) |
| 1096 | Collagen | 14/18 | 902-961 | 59.2 | 8.9e−15 | Collagen triple |
| | | | | | | helix repeat |
| | | | | | | (20 copies) |
| 1096 | Collagen | 15/18 | 962-1021 | 62.6 | 9.9e−16 | Collagen triple |
| | | | | | | helix repeat |
| | | | | | | (20 copies) |
| 1096 | Collagen | 16/18 | 1023-1081 | 54.4 | 1.8e−13 | Collagen triple |
| | | | | | | helix repeat |
| | | | | | | (20 copies) |
| 1096 | Collagen | 17/18 | 1082-1141 | 73.9 | 8.1e−19 | Collagen triple |
| | | | | | | helix repeat |
| | | | | | | (20 copies) |
| 1096 | Collagen | 18/18 | 1142-1195 | 40.5 | 1.2e−09 | Collagen triple |
| | | | | | | helix repeat |
| | | | | | | (20 copies) |
| 1096 | Collagen | 2/18 | 180-238 | 50.4 | 2.3e−12 | Collagen triple |
| | | | | | | helix repeat |
| | | | | | | (20 copies) |
| 1096 | Collagen | 3/18 | 239-298 | 75.7 | 2.5e−19 | Collagen triple |
| | | | | | | helix repeat |
| | | | | | | (20 copies) |
| 1096 | Collagen | 4/18 | 299-358 | 64.9 | 2.4e−16 | Collagen triple |
| | | | | | | helix repeat |
| | | | | | | (20 copies) |
| 1096 | Collagen | 5/18 | 359-418 | 61.6 | 1.9e−15 | Collagen triple |
| | | | | | | helix repeat |
| | | | | | | (20 copies) |
| 1096 | Collagen | 6/18 | 419-478 | 61.1 | 2.6e−15 | Collagen triple |
| | | | | | | helix repeat |
| | | | | | | (20 copies) |
| 1096 | Collagen | 7/18 | 479-538 | 63.9 | 4.4e−16 | Collagen triple |
| | | | | | | helix repeat |
| | | | | | | (20 copies) |
| 1096 | Collagen | 8/18 | 539-598 | 64.6 | 2.9e−16 | Collagen triple |
| | | | | | | helix repeat |
| | | | | | | (20 copies) |
| 1096 | Collagen | 9/18 | 599-658 | 62.1 | 1.4e−15 | Collagen triple |
| | | | | | | helix repeat |
| | | | | | | (20 copies) |
| 1098 | DUF410 | 1/1 | 66-315 | 513.5 | 1.6e−150 | Protein of |
| | | | | | | unknown |
| | | | | | | function |
| | | | | | | (DUF410) |
| 1098 | v110 | 1/1 | 306-326 | 8.7 | 0.55 | Viral family |
| | | | | | | 110 |
| 1100 | G-alpha | 1/1 | 59-407 | 820.0 | 8.4e−243 | G-protein alpha |
| | | | | | | subunit |
| 1100 | arf | 1/1 | 244-279 | 25.6 | 4e−06 | ADP- |
| | | | | | | ribosylation |
| | | | | | | factor family |
| 1101 | ECH | 1/1 | 367-539 | 73.0 | 1.4e−20 | Enoyl-coA |
| | | | | | | hydratase/isomerase |
| | | | | | | family |
| 1101 | chromo | 1/1 | 77-113 | 53.3 | 3.5e−14 | ‘chromo’ |
| | | | | | | (CHRromatin |
| | | | | | | Organization |
| | | | | | | MOdi |
| 1102 | MAM | 1/1 | 27-184 | 212.9 | 4.7e−60 | MAM domain |
| 1102 | Y_phosphatase | 1/2 | 923-1153 | 432.5 | 3.9e−126 | Protein- |
| | | | | | | tyrosine |
| | | | | | | phosphatase |
| 1102 | Y_phosphatase | 2/2 | 1213-1447 | 326.5 | 3.1e−94 | Protein- |
| | | | | | | tyrosine |
| | | | | | | phosphatase |
| 1102 | bromodomain | 1/1 | 1008-1024 | 7.8 | 0.79 | Bromodomain |
| 1102 | fn3 | 1/4 | 281-367 | 32.1 | 8e−08 | Fibronectin |
| | | | | | | type III domain |
| 1102 | fn3 | 2/4 | 379-470 | 8.2 | 0.67 | Fibronectin |
| | | | | | | type III domain |
| 1102 | fn3 | 3/4 | 482-575 | 42.5 | 8e−11 | Fibronectin |
| | | | | | | type III domain |
| 1102 | ig | 1/1 | 199-262 | 23.1 | 9.9e−05 | Immunoglobulin |
| | | | | | | domain |
| 1104 | PWWP | 1/1 | 114-186 | 123.0 | 4.9e−34 | PWWP domain |
| 1105 | Bcl-2 | 1/1 | 233-332 | 165.6 | 2.1e−66 | Apoptosis |
| | | | | | | regulator |
| | | | | | | proteins, Bcl-2 |
| | | | | | | family |
| 1106 | sugar_tr | 1/1 | 15-468 | 661.4 | 4.6e−195 | Sugar (and |
| | | | | | | other) |
| | | | | | | transporter |
| 1107 | C2 | 1/1 | 521-600 | 52.4 | 1.1e−13 | C2 domain |
| 1107 | Calpain_III | 1/1 | 353-498 | 269.1 | 1.9e−78 | Calpain large |
| | | | | | | subunit, domain |
| | | | | | | III |
| 1107 | Peptidase_C2 | 1/1 | 29-347 | 283.1 | 3.5e−81 | Calpain family |
| | | | | | | cysteine |
| | | | | | | protease |
| 1108 | DSPc | 1/1 | 317-457 | 244.7 | 1.3e−69 | Dual |
| | | | | | | specificity |
| | | | | | | phosphatase, |
| | | | | | | catalytic |
| 1108 | Rhodanese | 1/2 | 130-167 | 27.7 | 5.9e−07 | Rhodanese-like |
| | | | | | | domain |
| 1108 | Y_phosphatase | 1/1 | 387-436 | 6.3 | 0.81 | Protein- |
| | | | | | | tyrosine |
| | | | | | | phosphatase |
| 1109 | UPF0128 | 1/1 | 467-482 | 6.5 | 0.99 | Uncharacterised |
| | | | | | | protein family |
| | | | | | | (UPF0128) |
| 1109 | WH2 | 1/1 | 1160-1180 | 14.6 | 0.023 | WH2 motif |
| 1110 | rrm | 1/2 | 420-474 | 13.8 | 0.013 | RNA recognition |
| | | | | | | motif. (a.k.a. |
| | | | | | | RRM, RBD, or |
| 1110 | rrm | 2/2 | 504-572 | 26.8 | 2e−06 | RNA recognition |
| | | | | | | motif. (a.k.a. |
| | | | | | | RRM, RBD, or |
| 1112 | Fork_head | 1/1 | 55-191 | 93.0 | 6.1e−24 | Fork head |
| | | | | | | domain |
| 1113 | thyroglobulin_1 | 1/1 | 156-228 | 104.2 | 2.6e−27 | Thyroglobulin |
| | | | | | | type-1 repeat |
| 1114 | E1_DerP2_DerF2 | 1/1 | 51-178 | 185.6 | 8e−52 | ML domain |
| 1115 | ENV_polyprotein | 1/1 | 2-28 | 17.1 | 0.00015 | ENV polyprotein |
| | | | | | | (coat |
| | | | | | | polyprotein) |
| 1116 | heme_1 | 1/1 | 104-184 | 53.8 | 6.5e−14 | Heme/Steroid |
| | | | | | | binding domain |
| 1117 | IGFBP | 1/1 | 87-145 | 99.4 | 5.7e−27 | Insulin-like |
| | | | | | | growth factor |
| | | | | | | binding pr |
| 1117 | thyroglobulin_1 | 1/1 | 234-309 | 142.1 | 1e−38 | Thyroglobulin |
| | | | | | | type-1 repeat |
| 1119 | EGF | 2/6 | 181-216 | 26.3 | 9.7e−06 | EGF-like domain |
| 1119 | EGF | 3/6 | 222-256 | 23.6 | 5.9e−05 | EGF-like domain |
| 1119 | EGF | 4/6 | 262-296 | 20.1 | 0.00056 | EGF-like domain |
| 1119 | EGF | 5/6 | 302-329 | 12.5 | 0.078 | EGF-like domain |
| 1119 | TIL | 1/4 | 203-222 | 10.7 | 0.051 | Trypsin |
| | | | | | | Inhibitor like |
| | | | | | | cysteine rich |
| | | | | | | domain |
| 1119 | TIL | 2/4 | 241-262 | 15.7 | 0.0014 | Trypsin |
| | | | | | | Inhibitor like |
| | | | | | | cysteine rich |
| | | | | | | domain |
| 1119 | VSP | 2/2 | 282-304 | 10.4 | 0.045 | 1/2 242 |
| | | | | | | 266..129 |
| 1120 | ZU5 | 1/1 | 989-1093 | 218.3 | 1.1e−61 | ZU5 domain |
| 1120 | ank | 10/24 | 340-372 | 32.1 | 2.4e−07 | Ankyrin repeat |
| 1120 | ank | 11/24 | 373-405 | 35.8 | 2.2e−08 | Ankyrin repeat |
| 1120 | ank | 12/24 | 406-438 | 45.1 | 4.7e−11 | Ankyrin repeat |
| 1120 | ank | 13/24 | 439-471 | 37.2 | 8.7e−09 | Ankyrin repeat |
| 1120 | ank | 14/24 | 472-504 | 37.4 | 7.3e−09 | Ankyrin repeat |
| 1120 | ank | 15/24 | 505-537 | 38.3 | 4.1e−09 | Ankyrin repeat |
| 1120 | ank | 16/24 | 538-570 | 42.1 | 3.4e−10 | Ankyrin repeat |
| 1120 | ank | 17/24 | 571-603 | 40.2 | 1.2e−09 | Ankyrin repeat |
| 1120 | ank | 18/24 | 604-636 | 35.9 | 2e−08 | Ankyrin repeat |
| 1120 | ank | 19/24 | 637-669 | 44.4 | 7.4e−11 | Ankyrin repeat |
| 1120 | ank | 2/24 | 80-112 | 40.3 | 1.1e−09 | Ankyrin repeat |
| 1120 | ank | 20/24 | 670-702 | 29.0 | 1.9e−06 | Ankyrin repeat |
| 1120 | ank | 21/24 | 703-735 | 41.2 | 6.2e−10 | Ankyrin repeat |
| 1120 | ank | 22/24 | 736-768 | 38.5 | 3.7e−09 | Ankyrin repeat |
| 1120 | ank | 23/24 | 769-801 | 39.1 | 2.5e−09 | Ankyrin repeat |
| 1120 | ank | 3/24 | 113-145 | 42.6 | 2.4e−10 | Ankyrin repeat |
| 1120 | ank | 4/24 | 146-178 | 39.2 | 2.2e−09 | Ankyrin repeat |
| 1120 | ank | 5/24 | 179-202 | 20.6 | 0.00046 | Ankyrin repeat |
| 1120 | ank | 6/24 | 212-240 | 10.0 | 0.46 | Ankyrin repeat |
| 1120 | ank | 7/24 | 241-273 | 32.9 | 1.4e−07 | Ankyrin repeat |
| 1120 | ank | 8/24 | 274-306 | 44.7 | 6.2e−11 | Ankyrin repeat |
| 1120 | ank | 9/24 | 307-339 | 34.1 | 6.6e−08 | Ankyrin repeat |
| 1120 | death | 1/1 | 4098-4181 | 109.4 | 1e−30 | Death domain |
| 1121 | LIM | 1/2 | 30-87 | 77.0 | 2.2e−20 | LIM domain |
| 1121 | LIM | 2/2 | 90-147 | 40.0 | 6.9e−10 | LIM domain |
| 1121 | PDZ | 1/1 | 170-256 | 70.0 | 1.8e−18 | PDZ domain |
| | | | | | | (Also known as |
| | | | | | | DHR or GLGF) |
| 1121 | pkinase | 1/1 | 349-626 | 213.8 | 2.5e−60 | Protein kinase |
| | | | | | | domain |
| 1122 | Yippee | 1/1 | 23-131 | 263.8 | 2.2e−75 | Yippee putative |
| | | | | | | zinc-binding |
| | | | | | | protein |
| 1123 | Kunitz_BPTI | 1/1 | 29-79 | 94.2 | 1.6e−29 | Kunitz/Bovine |
| | | | | | | pancreatic |
| | | | | | | trypsin |
| | | | | | | inhibito |
| 1125 | NHL | 1/1 | 73-100 | 33.7 | 8e−08 | NHL repeat |
| 1126 | PUF | 1/8 | 861-895 | 33.8 | 4.8e−08 | Pumilio-family |
| | | | | | | RNA binding |
| | | | | | | repeat |
| 1126 | PUF | 2/8 | 897-931 | 32.3 | 1.4e−07 | Pumilio-family |
| | | | | | | RNA binding |
| | | | | | | repeat |
| 1126 | PUF | 3/8 | 933-967 | 33.2 | 7.5e−08 | Pumilio-family |
| | | | | | | RNA binding |
| | | | | | | repeat |
| 1126 | PUF | 4/8 | 969-1003 | 40.3 | 6.7e−10 | Pumilio-family |
| | | | | | | RNA binding |
| | | | | | | repeat |
| 1126 | PUF | 5/8 | 1005-1039 | 37.1 | 5.4e−09 | Pumilio-family |
| | | | | | | RNA binding |
| | | | | | | repeat |
| 1126 | PUF | 6/8 | 1041-1075 | 45.2 | 2.6e−11 | Pumilio-family |
| | | | | | | RNA binding |
| | | | | | | repeat |
| 1126 | PUF | 7/8 | 1077-1112 | 28.1 | 2.2e−06 | Pumilio-family |
| | | | | | | RNA binding |
| | | | | | | repeat |
| 1126 | PUF | 8/8 | 1120-1154 | 31.0 | 3.3e−07 | Pumilio-family |
| | | | | | | RNA binding |
| | | | | | | repeat |
| 1127 | Ribosomal_L7Ae | 1/1 | 30-112 | 35.4 | 3.5e−09 | Ribosomal |
| | | | | | | protein |
| | | | | | | L7Ae/L30e/S12e/ |
| | | | | | | Gadd4 |
| 1128 | S10_plectin | 1/1 | 21-118 | 254.1 | 1.9e−72 | Plectin/S10 |
| | | | | | | domain |
| 1133 | CBM_14 | 2/2 | 1273-1302 | 11.4 | 0.028 | Chitin binding |
| | | | | | | Peritrophin-A |
| | | | | | | domain |
| 1133 | Cys_knot | 2/2 | 2823-2919 | 100.4 | 3.4e−26 | Cystine-knot |
| | | | | | | domain |
| 1133 | EB | 2/3 | 914-927 | 11.8 | 0.19 | |
| 1133 | TIL | 1/5 | 401-454 | 41.0 | 1.5e−11 | Trypsin |
| | | | | | | Inhibitor like |
| | | | | | | cysteine rich |
| | | | | | | do |
| 1133 | TIL | 2/5 | 758-813 | 42.4 | 5.6e−12 | Trypsin |
| | | | | | | Inhibitor like |
| | | | | | | cysteine rich |
| | | | | | | do |
| 1133 | TIL | 3/5 | 882-933 | 27.5 | 2.6e−07 | Trypsin |
| | | | | | | Inhibitor like |
| | | | | | | cysteine rich |
| | | | | | | do |
| 1133 | TIL | 4/5 | 1252-1302 | 34.9 | 1.3e−09 | Trypsin |
| | | | | | | Inhibitor like |
| | | | | | | cysteine rich |
| | | | | | | do |
| 1133 | vwa | 1/3 | 1383-1559 | 173.2 | 9.1e−50 | von Willebrand |
| | | | | | | factor type A |
| | | | | | | domain |
| 1133 | vwa | 2/3 | 1604-1770 | 203.6 | 1e−58 | von Willebrand |
| | | | | | | factor type A |
| | | | | | | domain |
| 1133 | vwa | 3/3 | 1797-1970 | 184.6 | 3.9e−53 | von Willebrand |
| | | | | | | factor type A |
| | | | | | | domain |
| 1133 | vwc | 1/12 | 456-494 | 14.5 | 0.0079 | von Willebrand |
| | | | | | | factor type C |
| | | | | | | domain |
| 1133 | vwc | 11/12 | 2688-2750 | 79.2 | 1.3e−21 | von Willebrand |
| | | | | | | factor type C |
| | | | | | | domain |
| 1133 | vwc | 3/12 | 935-974 | 25.8 | 4.1e−06 | von Willebrand |
| | | | | | | factor type C |
| | | | | | | domain |
| 1133 | vwc | 4/12 | 1305-1341 | 8.5 | 0.43 | von Willebrand |
| | | | | | | factor type C |
| | | | | | | domain |
| 1133 | vwc | 6/12 | 2363-2431 | 89.2 | 1.7e−24 | von Willebrand |
| | | | | | | factor type C |
| | | | | | | domain |
| 1133 | vwc | 9/12 | 2537-2600 | 90.6 | 6.4e−25 | von Willebrand |
| | | | | | | factor type C |
| | | | | | | domain |
| 1133 | vwd | 1/4 | 141-285 | 133.1 | 5.4e−37 | von Willebrand |
| | | | | | | factor type D |
| | | | | | | domain |
| 1133 | vwd | 2/4 | 494-647 | 183.4 | 2e−51 | von Willebrand |
| | | | | | | factor type D |
| | | | | | | domain |
| 1133 | vwd | 3/4 | 973-1119 | 153.1 | 1e−42 | von Willebrand |
| | | | | | | factor type D |
| | | | | | | domain |
| 1133 | vwd | 4/4 | 2056-2208 | 138.7 | 1.3e−38 | von Willebrand |
| | | | | | | factor type D |
| | | | | | | domain |
| 1134 | thiored | 1/1 | 88-151 | 44.0 | 6.3e−12 | Thioredoxin |
| 1137 | pkinase | 1/1 | 78-352 | 279.4 | 4.6e−80 | Protein kinase |
| | | | | | | domain |
| 1138 | FGGY | 1/1 | 84-111 | 11.3 | 0.051 | FGGY family of |
| | | | | | | carbohydrate |
| | | | | | | kinases, N- |
| | | | | | | termi |
| 1138 | HSP70 | 1/1 | 85-683 | 1382.0 | 0 | Hsp70 protein |
| 1139 | Anti_proliferat | 1/1 | 61-221 | 345.4 | 6.3e−100 | BTG1 family |
| 1140 | EMP70 | 1/1 | 11-72 | 125.3 | 9.5e−38 | Endomembrane |
| | | | | | | protein 70 |
| 1141 | Transglut_core | 1/1 | 338-427 | 185.8 | 7.1e−52 | Transglutaminase- |
| | | | | | | like |
| | | | | | | superfamily |
| 1141 | Transglutamin_C | 1/2 | 547-651 | 107.0 | 2.6e−30 | Transglutaminase |
| | | | | | | family, C- |
| | | | | | | terminal i |
| 1141 | Transglutamin_C | 2/2 | 659-756 | 108.8 | 7.2e−31 | Transglutaminase |
| | | | | | | family, C- |
| | | | | | | terminal i |
| 1141 | Transglutamin_N | 1/1 | 74-195 | 221.3 | 1.4e−64 | Transglutaminase |
| | | | | | | family |
| 1143 | PCI | 1/1 | 433-513 | 57.3 | 3.8e−15 | PCI domain |
| 1144 | PCI | 1/1 | 781-864 | 106.1 | 2.7e−29 | PCI domain |
| 1145 | RTX | 1/1 | 916-952 | 3.3 | 1 | RTX N-terminal |
| | | | | | | domain |
| 1145 | SMC_C | 1/1 | 1090-1291 | 410.9 | 5.9e−121 | SMC family, C- |
| | | | | | | terminal domain |
| 1145 | SMC_N | 1/1 | 93-271 | 289.6 | 3.8e−83 | RecF/RecN/SMC N |
| | | | | | | terminal domain |
| 1145 | SlyX | 1/1 | 340-351 | 3.6 | 0.4 | SlyX |
| 1146 | PGM_PMM | 1/1 | 512-622 | 159.5 | 1.3e−44 | Phosphoglucomutase/ |
| | | | | | | phosphomannomutase, |
| | | | | | | C- |
| 1146 | PGM_PMM_I | 1/1 | 82-233 | 186.9 | 3.3e−52 | Phosphoglucomutase/ |
| | | | | | | phosphomannomutase, |
| | | | | | | al |
| 1146 | PGM_PMM_II | 1/1 | 264-374 | 193.6 | 7e−62 | Phosphoglucomutase/ |
| | | | | | | phosphomannomutase, |
| | | | | | | al |
| 1146 | PGM_PMM_III | 1/1 | 376-491 | 174.2 | 1.7e−48 | Phosphoglucomutase/ |
| | | | | | | phosphomannomutase, |
| | | | | | | al |
| 1147 | C2 | 1/2 | 101-165 | 49.6 | 7.2e−13 | C2 domain |
| 1148 | ig | 1/2 | 99-169 | 29.0 | 2.3e−06 | Immunoglobulin |
| | | | | | | domain |
| 1148 | ig | 2/2 | 205-273 | 40.2 | 1.8e−09 | Immunoglobulin |
| | | | | | | domain |
| 1151 | efhand | 1/2 | 254-280 | 10.6 | 0.48 | EF hand |
| 1151 | efhand | 2/2 | 304-332 | 10.6 | 0.48 | EF hand |
| 1152 | SNase | 1/5 | 137-230 | 56.1 | 3.4e−14 | Staphylococcal |
| | | | | | | nuclease |
| | | | | | | homologue |
| 1152 | SNase | 2/5 | 303-392 | 34.5 | 3e−08 | Staphylococcal |
| | | | | | | nuclease |
| | | | | | | homologue |
| 1152 | SNase | 3/5 | 405-560 | 54.9 | 7e−14 | Staphylococcal |
| | | | | | | nuclease |
| | | | | | | homologue |
| 1152 | SNase | 4/5 | 589-724 | 77.1 | 5.5e−20 | Staphylococcal |
| | | | | | | nuclease |
| | | | | | | homologue |
| 1152 | SNase | 5/5 | 914-959 | 20.9 | 0.00017 | Staphylococcal |
| | | | | | | nuclease |
| | | | | | | homologue |
| 1152 | TUDOR | 1/1 | 741-861 | 137.2 | 3e−37 | Tudor domain |
| 1154 | filament | 1/1 | 133-440 | 581.6 | 4.8e−171 | Intermediate |
| | | | | | | filament |
| | | | | | | protein |
| 1155 | Calsequestrin | 1/1 | 27-62 | 5.4 | 0.4 | Calsequestrin |
| 1155 | EGF | 11/16 | 1557-1569 | 11.9 | 0.12 | EGF-like domain |
| 1155 | EGF | 13/16 | 3876-3908 | 44.1 | 9.5e−11 | EGF-like domain |
| 1155 | EGF | 14/16 | 3916-3949 | 31.3 | 3.7e−07 | EGF-like domain |
| 1155 | EGF | 15/16 | 4136-4168 | 31.5 | 3.4e−07 | EGF-like domain |
| 1155 | EGF | 16/16 | 4175-4203 | 24.9 | 2.5e−05 | EGF-like domain |
| 1155 | EGF | 3/16 | 758-770 | 10.9 | 0.22 | EGF-like domain |
| 1155 | EGF | 5/16 | 870-879 | 9.8 | 0.44 | EGF-like domain |
| 1155 | SEA | 1/1 | 106-220 | 105.7 | 2.6e−30 | SEA domain |
| 1155 | ig | 1/22 | 447-508 | 35.8 | 3e−08 | Immunoglobulin |
| | | | | | | domain |
| 1155 | ig | 10/22 | 2479-2533 | 44.3 | 1.3e−10 | Immunoglobulin |
| | | | | | | domain |
| 1155 | ig | 11/22 | 2576-2630 | 39.3 | 3.1e−09 | Immunoglobulin |
| | | | | | | domain |
| 1155 | ig | 12/22 | 2672-2726 | 41.8 | 6.5e−10 | Immunoglobulin |
| | | | | | | domain |
| 1155 | ig | 13/22 | 2769-2823 | 43.0 | 3e−10 | Immunoglobulin |
| | | | | | | domain |
| 1155 | ig | 14/22 | 2869-2923 | 40.8 | 1.2e−09 | Immunoglobulin |
| | | | | | | domain |
| 1155 | ig | 15/22 | 2967-3021 | 44.4 | 1.2e−10 | Immunoglobulin |
| | | | | | | domain |
| 1155 | ig | 16/22 | 3064-3121 | 26.2 | 1.3e−05 | Immunoglobulin |
| | | | | | | domain |
| 1155 | ig | 17/22 | 3155-3215 | 27.0 | 8e−06 | Immunoglobulin |
| | | | | | | domain |
| 1155 | ig | 18/22 | 3254-3308 | 31.6 | 4.4e−07 | Immunoglobulin |
| | | | | | | domain |
| 1155 | ig | 19/22 | 3341-3395 | 37.4 | 1.1e−08 | Immunoglobulin |
| | | | | | | domain |
| 1155 | ig | 2/22 | 1719-1776 | 32.6 | 2.2e−07 | Immunoglobulin |
| | | | | | | domain |
| 1155 | ig | 20/22 | 3442-3496 | 30.4 | 9.1e−07 | Immunoglobulin |
| | | | | | | domain |
| 1155 | ig | 21/22 | 3531-3585 | 31.0 | 6.5e−07 | Immunoglobulin |
| | | | | | | domain |
| 1155 | ig | 22/22 | 3617-3671 | 32.3 | 2.7e−07 | Immunoglobulin |
| | | | | | | domain |
| 1155 | ig | 3/22 | 1814-1870 | 33.9 | 1e−07 | Immunoglobulin |
| | | | | | | domain |
| 1155 | ig | 4/22 | 1908-1963 | 27.2 | 6.9e−06 | Immunoglobulin |
| | | | | | | domain |
| 1155 | ig | 5/22 | 1998-2055 | 45.0 | 8.5e−11 | Immunoglobulin |
| | | | | | | domain |
| 1155 | ig | 6/22 | 2093-2147 | 47.6 | 1.6e−11 | Immunoglobulin |
| | | | | | | domain |
| 1155 | ig | 7/22 | 2194-2248 | 45.0 | 8.5e−11 | Immunoglobulin |
| | | | | | | domain |
| 1155 | ig | 8/22 | 2287-2341 | 37.2 | 1.2e−08 | Immunoglobulin |
| | | | | | | domain |
| 1155 | ig | 9/22 | 2383-2437 | 42.5 | 4.2e−10 | Immunoglobulin |
| | | | | | | domain |
| 1155 | laminin_B | 1/3 | 623-757 | 78.0 | 2.1e−20 | Laminin B |
| | | | | | | (Domain IV) |
| 1155 | laminin_B | 2/3 | 1018-1152 | 136.4 | 5.2e−37 | Laminin B |
| | | | | | | (Domain IV) |
| 1155 | laminin_B | 3/3 | 1424-1556 | 133.7 | 3.4e−36 | Laminin B |
| | | | | | | (Domain IV) |
| 1155 | laminin_EGF | 10/15 | 1591-1638 | 61.5 | 4e−16 | Laminin EGF- |
| | | | | | | like (Domains |
| | | | | | | III and V) |
| 1155 | laminin_EGF | 11/15 | 1641-1696 | 29.9 | 4.6e−07 | Laminin EGF- |
| | | | | | | like (Domains |
| | | | | | | III and V) |
| 1155 | laminin_EGF | 12/15 | 3883-3910 | 9.4 | 0.37 | Laminin EGF- |
| | | | | | | like (Domains |
| | | | | | | III and V) |
| 1155 | laminin_EGF | 15/15 | 4191-4205 | 10.4 | 0.19 | Laminin EGF- |
| | | | | | | like (Domains |
| | | | | | | III and V) |
| 1155 | laminin_EGF | 2/15 | 792-839 | 61.8 | 3.2e−16 | Laminin EGF- |
| | | | | | | like (Domains |
| | | | | | | III and V) |
| 1155 | laminin_EGF | 3/15 | 842-897 | 37.8 | 2.5e−09 | Laminin EGF- |
| | | | | | | like (Domains |
| | | | | | | III and V) |
| 1155 | laminin_EGF | 4/15 | 919-949 | 22.6 | 5.8e−05 | Laminin EGF- |
| | | | | | | like (Domains |
| | | | | | | III and V) |
| 1155 | laminin_EGF | 5/15 | 1153-1184 | 10.7 | 0.16 | Laminin EGF- |
| | | | | | | like (Domains |
| | | | | | | III and V) |
| 1155 | laminin_EGF | 6/15 | 1187-1234 | 67.3 | 9e−18 | Laminin EGF- |
| | | | | | | like (Domains |
| | | | | | | III and V) |
| 1155 | laminin_EGF | 7/15 | 1237-1291 | 32.9 | 6.5e−08 | Laminin EGF- |
| | | | | | | like (Domains |
| | | | | | | III and V) |
| 1155 | laminin_EGF | 8/15 | 1303-1350 | 55.4 | 2.3e−14 | Laminin EGF- |
| | | | | | | like (Domains |
| | | | | | | III and V) |
| 1155 | laminin_EGF | 9/15 | 1557-1576 | 14.6 | 0.012 | Laminin EGF- |
| | | | | | | like (Domains |
| | | | | | | III and V) |
| 1155 | laminin_G | 1/3 | 3720-3859 | 111.4 | 2e−30 | Laminin G |
| | | | | | | domain |
| 1155 | laminin_G | 2/3 | 3985-4116 | 128.9 | 2.2e−35 | Laminin G |
| | | | | | | domain |
| 1155 | laminin_G | 3/3 | 4262-4395 | 131.0 | 5.5e−36 | Laminin G |
| | | | | | | domain |
| 1155 | ldl_recept_a | 1/4 | 223-262 | 47.2 | 8.4e−13 | Low-density |
| | | | | | | lipoprotein |
| | | | | | | receptor domain |
| 1155 | ldl_recept_a | 2/4 | 309-347 | 54.8 | 4e−15 | Low-density |
| | | | | | | lipoprotein |
| | | | | | | receptor domain |
| 1155 | ldl_recept_a | 3/4 | 349-387 | 57.1 | 8.3e−16 | Low-density |
| | | | | | | lipoprotein |
| | | | | | | receptor domain |
| 1155 | ldl_recept_a | 4/4 | 392-431 | 44.0 | 8e−12 | Low-density |
| | | | | | | lipoprotein |
| | | | | | | receptor domain |
| 1158 | PX | 1/1 | 134-173 | 20.1 | 0.00098 | PX domain |
| 1158 | pkinase | 1/1 | 210-467 | 304.7 | 1.1e−87 | Protein kinase |
| | | | | | | domain |
| 1158 | pkinase_C | 1/1 | 468-542 | 56.0 | 5.6e−16 | Protein kinase |
| | | | | | | C terminal |
| | | | | | | domain |
| 1161 | DUF260 | 1/1 | 56-82 | 3.3 | 0.95 | Protein of |
| | | | | | | unknown |
| | | | | | | function DUF260 |
| 1163 | K-box | 1/2 | 83-110 | 6.9 | 1 | K-box region |
| 1163 | Retrotrans_gag | 1/1 | 193-286 | 78.5 | 2.9e−21 | Retrotransposon |
| | | | | | | gag protein |
| 1163 | zf-CCHC | 1/1 | 367-384 | 16.7 | 0.011 | Zinc knuckle |
| 1164 | 7tm_2 | 1/1 | 474-723 | 376.5 | 6.9e−112 | 7 transmembrane |
| | | | | | | receptor |
| | | | | | | (Secretin |
| | | | | | | family) |
| 1164 | DsbB | 1/1 | 475-504 | 6.7 | 0.91 | Disulfide bond |
| | | | | | | formation |
| | | | | | | protein DsbB |
| 1164 | EGF | 2/3 | 91-120 | 12.5 | 0.077 | EGF-like domain |
| 1164 | EGF | 3/3 | 143-175 | 16.2 | 0.0072 | EGF-like domain |
| 1164 | GPS | 1/1 | 421-472 | 84.0 | 7.2e−22 | Latrophilin/CL- |
| | | | | | | 1-like GPS |
| | | | | | | domain |
| 1165 | sugar_tr | 1/1 | 39-492 | 661.0 | 6.1e−195 | Sugar (and |
| | | | | | | other) |
| | | | | | | transporter |
| 1167 | MBD | 1/1 | 14-67 | 86.9 | 2.1e−22 | Methyl-CpG |
| | | | | | | binding domain |
| 1168 | aa_permeases | 1/1 | 356-408 | 8.3 | 0.18 | Amino acid |
| | | | | | | permease |
| 1170 | Reticulon | 1/1 | 223-414 | 368.1 | 2e−112 | Reticulon |
| 1172 | FKBP | 1/1 | 41-135 | 179.4 | 9.1e−54 | FKBP-type |
| | | | | | | peptidyl-prolyl |
| | | | | | | cis-trans |
| | | | | | | isomeras |
| 1174 | abhydrolase | 1/2 | 47-104 | 28.9 | 7e−08 | alpha/beta |
| | | | | | | hydrolase fold |
| 1174 | abhydrolase | 2/2 | 120-186 | 7.6 | 0.24 | alpha/beta |
| | | | | | | hydrolase fold |
| 1174 | abhydrolase_2 | 1/1 | 173-194 | 7.3 | 0.61 | Phospholipase/C |
| | | | | | | arboxylesterase |
| 1176 | DUF357 | 1/1 | 449-465 | 8.6 | 0.48 | Protein of |
| | | | | | | unknown |
| | | | | | | function |
| | | | | | | (DUF357) |
| 1176 | Furin-like | 1/1 | 627-644 | 8.0 | 0.23 | Furin-like |
| | | | | | | cysteine rich |
| | | | | | | region |
| 1176 | P | 1/1 | 470-601 | 250.4 | 2.5e−71 | Proprotein |
| | | | | | | convertase P- |
| | | | | | | domain |
| 1176 | Peptidase_S8 | 1/1 | 153-458 | 436.3 | 2.8e−127 | Subtilase |
| | | | | | | family |
| 1176 | VSP | 2/2 | 667-690 | 6.4 | 0.56 | 1/2 242 |
| | | | | | | 266..129 |
| 1179 | Exostosin | 1/1 | 217-503 | 327.6 | 1.4e−94 | Exostosin |
| | | | | | | family |
| 1182 | COLFI | 1/1 | 1661-1872 | 488.9 | 1.5e−190 | Fibrillar |
| | | | | | | collagen C- |
| | | | | | | terminal domain |
| 1182 | Collagen | 10/20 | 1009-1068 | 53.8 | 2.6e−13 | Collagen triple |
| | | | | | | helix repeat |
| | | | | | | (20 copies) |
| 1182 | Collagen | 11/20 | 1069-1104 | 26.4 | 9.2e−06 | Collagen triple |
| | | | | | | helix repeat |
| | | | | | | (20 copies) |
| 1182 | Collagen | 12/20 | 1105-1161 | 42.5 | 3.5e−10 | Collagen triple |
| | | | | | | helix repeat |
| | | | | | | (20 copies) |
| 1182 | Collagen | 13/20 | 1162-1221 | 54.6 | 1.6e−13 | Collagen triple |
| | | | | | | helix repeat |
| | | | | | | (20 copies) |
| 1182 | Collagen | 14/20 | 1222-1281 | 54.2 | 2e−13 | Collagen triple |
| | | | | | | helix repeat |
| | | | | | | (20 copies) |
| 1182 | Collagen | 15/20 | 1285-1344 | 42.9 | 2.6e−10 | Collagen triple |
| | | | | | | helix repeat |
| | | | | | | (20 copies) |
| 1182 | Collagen | 16/20 | 1345-1404 | 55.5 | 9.3e−14 | Collagen triple |
| | | | | | | helix repeat |
| | | | | | | (20 copies) |
| 1182 | Collagen | 17/20 | 1405-1457 | 34.2 | 6.5e−08 | Collagen triple |
| | | | | | | helix repeat |
| | | | | | | (20 copies) |
| 1182 | Collagen | 18/20 | 1459-1518 | 57.2 | 3.1e−14 | Collagen triple |
| | | | | | | helix repeat |
| | | | | | | (20 copies) |
| 1182 | Collagen | 19/20 | 1528-1587 | 59.0 | 9.7e−15 | Collagen triple |
| | | | | | | helix repeat |
| | | | | | | (20 copies) |
| 1182 | Collagen | 2/20 | 505-553 | 41.4 | 6.8e−10 | Collagen triple |
| | | | | | | helix repeat |
| | | | | | | (20 copies) |
| 1182 | Collagen | 20/20 | 1588-1607 | 11.1 | 0.14 | Collagen triple |
| | | | | | | helix repeat |
| | | | | | | (20 copies) |
| 1182 | Collagen | 3/20 | 593-648 | 34.1 | 6.9e−08 | Collagen triple |
| | | | | | | helix repeat |
| | | | | | | (20 copies) |
| 1182 | Collagen | 4/20 | 649-708 | 59.8 | 6e−15 | Collagen triple |
| | | | | | | helix repeat |
| | | | | | | (20 copies) |
| 1182 | Collagen | 5/20 | 709-768 | 58.8 | 1.1e−14 | Collagen triple |
| | | | | | | helix repeat |
| | | | | | | (20 copies) |
| 1182 | Collagen | 6/20 | 769-828 | 40.8 | 9.7e−10 | Collagen triple |
| | | | | | | helix repeat |
| | | | | | | (20 copies) |
| 1182 | Collagen | 7/20 | 832-887 | 34.5 | 5.5e−08 | Collagen triple |
| | | | | | | helix repeat |
| | | | | | | (20 copies) |
| 1182 | Collagen | 8/20 | 889-948 | 41.9 | 4.9e−10 | Collagen triple |
| | | | | | | helix repeat |
| | | | | | | (20 copies) |
| 1182 | Collagen | 9/20 | 949-1008 | 57.9 | 2e−14 | Collagen triple |
| | | | | | | helix repeat |
| | | | | | | (20 copies) |
| 1182 | TSPN | 1/1 | 75-266 | 290.0 | 1.7e−83 | Thrombospondin |
| | | | | | | N-terminal - |
| | | | | | | like domain |
| 1182 | laminin_G | 1/1 | 195-218 | 14.6 | 0.0071 | Laminin G |
| | | | | | | domain |
| 1185 | fibrinogen_C | 1/2 | 235-335 | 156.5 | 1e−43 | Fibrinogen beta |
| | | | | | | and gamma |
| | | | | | | chains, C-term |
| 1185 | fibrinogen_C | 2/2 | 377-451 | 67.0 | 3.5e−18 | Fibrinogen beta |
| | | | | | | and gamma |
| | | | | | | chains, C-term |
| 1187 | SH3 | 1/1 | 335-389 | 78.3 | 6.8e−20 | SH3 domain |
| 1188 | AT_hook | 1/1 | 73-85 | 8.9 | 1 | AT hook motif |
| 1188 | Vinculin | 1/1 | 43-891 | 1728.4 | 0 | Vinculin family |
| 1189 | annexin | 1/2 | 13-67 | 67.1 | 1e−16 | Annexin |
| 1189 | annexin | 2/2 | 75-142 | 109.4 | 6.9e−29 | Annexin |
| 1190 | Heme_oxygenase | 1/1 | 35-272 | 639.9 | 1.4e−188 | Heme oxygenase |
| 1192 | DED | 1/1 | 35-112 | 19.8 | 0.00037 | Death effector |
| | | | | | | domain |
| 1193 | proteasome | 1/1 | 38-226 | 230.9 | 1.9e−65 | Proteasome A- |
| | | | | | | type and B-type |
| 1194 | adh_short | 1/1 | 88-380 | 244.7 | 1.3e−69 | short chain |
| | | | | | | dehydrogenase |
| 1195 | V-ATPase_G | 1/1 | 13-118 | 205.7 | 6.9e−58 | Vacuolar (H+)- |
| | | | | | | ATPase G |
| | | | | | | subunit |
| 1197 | BTB | 2/2 | 490-594 | 81.6 | 4.7e−21 | BTB/POZ domain |
| 1197 | ras | 2/2 | 231-250 | 6.2 | 0.92 | Ras family |
| 1198 | AMP-binding | 1/1 | 1-245 | 224.3 | 1.8e−63 | AMP-binding |
| | | | | | | enzyme |
| 1199 | gla | 1/1 | 39-80 | 67.3 | 2.6e−19 | Vitamin K- |
| | | | | | | dependent |
| | | | | | | carboxylation/gamma- |
| 1200 | PDZ | 1/2 | 119-198 | 49.1 | 1.6e−12 | PDZ domain |
| | | | | | | (Also known as |
| | | | | | | DHR or GLGF) |
| 1200 | PDZ | 2/2 | 203-277 | 25.2 | 1.1e−05 | PDZ domain |
| | | | | | | (Also known as |
| | | | | | | DHR or GLGF) |
| 1201 | EPH_lbd | 1/1 | 20-200 | 399.0 | 3.8e−117 | Ephrin receptor |
| | | | | | | ligand binding |
| | | | | | | domain |
| 1201 | SAM | 1/1 | 908-972 | 93.9 | 3.6e−25 | SAM domain |
| | | | | | | (Sterile alpha |
| | | | | | | motif) |
| 1201 | fn3 | 1/2 | 327-417 | 39.0 | 8.6e−10 | Fibronectin |
| | | | | | | type III domain |
| 1201 | fn3 | 2/2 | 437-522 | 68.4 | 2.7e−18 | Fibronectin |
| | | | | | | type III domain |
| 1201 | pkinase | 1/1 | 618-874 | 256.1 | 4.6e−73 | Protein kinase |
| | | | | | | domain |
| 1202 | GTF2I | 1/6 | 230-305 | 172.6 | 6.9e−55 | GTF2I-like |
| | | | | | | repeat |
| 1202 | GTF2I | 2/6 | 438-513 | 172.9 | 5.3e−55 | GTF2I-like |
| | | | | | | repeat |
| 1202 | GTF2I | 3/6 | 543-618 | 182.0 | 6.2e−58 | GTF2I-like |
| | | | | | | repeat |
| 1202 | GTF2I | 4/6 | 648-723 | 183.6 | 1.8e−58 | GTF2I-like |
| | | | | | | repeat |
| 1202 | GTF2I | 5/6 | 810-885 | 177.3 | 2e−56 | GTF2I-like |
| | | | | | | repeat |
| 1202 | GTF2I | 6/6 | 945-1020 | 165.2 | 1.7e−52 | GTF2I-like |
| | | | | | | repeat |
| 1202 | ribonuc_red_sm | 1/1 | 869-898 | 6.0 | 0.57 | Ribonucleotide |
| | | | | | | reductase, |
| | | | | | | small chain |
| 1203 | GRAM | 1/1 | 13-96 | 65.5 | 1.1e−17 | GRAM domain |
| 1204 | FlpD | 1/1 | 607-622 | 5.5 | 1 | Methyl- |
| | | | | | | viologen- |
| | | | | | | reducing |
| | | | | | | hydrogenase, |
| 1204 | crystall | 1/6 | 971-997 | 23.0 | 0.00046 | Beta/Gamma |
| | | | | | | crystallin |
| 1204 | crystall | 2/6 | 1072-1119 | 49.7 | 6.5e−11 | Beta/Gamma |
| | | | | | | crystallin |
| 1204 | crystall | 3/6 | 1133-1126 | 95.3 | 1.2e−24 | Beta/Gamma |
| | | | | | | crystallin |
| 1204 | crystall | 4/6 | 1234-1317 | 62.7 | 8.2e−15 | Beta/Gamma |
| | | | | | | crystallin |
| 1204 | crystall | 5/6 | 1330-1409 | 59.9 | 5.5e−14 | Beta/Gamma |
| | | | | | | crystallin |
| 1204 | crystall | 6/6 | 1417-1497 | 84.0 | 3.1e−21 | Beta/Gamma |
| | | | | | | crystallin |
| 1204 | gpdh | 1/1 | 498-508 | 5.1 | 0.055 | Glyceraldehyde |
| | | | | | | 3-phosphate |
| | | | | | | dehydrogena |
| 1205 | hormone | 1/1 | 2-143 | 124.6 | 6.8e−46 | Somatotropin |
| | | | | | | hormone family |
| 1206 | histone | 1/1 | 30-146 | 188.4 | 1.1e−52 | Core histone |
| | | | | | | H2A/H2B/H3/H4 |
| 1208 | Gal-bind_lectin | 1/1 | 67-198 | 277.2 | 2.1e−79 | Galactoside- |
| | | | | | | binding lectin |
| 1209 | ENV_polyprotein | 1/1 | 1097-1140 | 63.8 | 2.4e−18 | ENV polyprotein |
| | | | | | | (coat |
| | | | | | | polyprotein) |
| 1209 | rnaseH | 1/1 | 662-769 | 70.8 | 2.1e−18 | RNase H |
| 1209 | rve | 1/1 | 885-1039 | 126.3 | 3.5e−35 | Integrase core |
| | | | | | | domain |
| 1209 | rvp | 1/1 | 20-117 | 72.3 | 7.6e−19 | Retroviral |
| | | | | | | aspartyl |
| | | | | | | protease |
| 1209 | rvt | 1/1 | 203-380 | 110.8 | 2.1e−29 | Reverse |
| | | | | | | transcriptase |
| | | | | | | (RNA-dependent |
| 1211 | Peptidase_C1 | 1/1 | 302-513 | 353.9 | 2.6e−105 | Papain family |
| | | | | | | cysteine |
| | | | | | | protease |
| 1211 | gpdh | 1/1 | 430-439 | 3.6 | 0.25 | Glyceraldehyde |
| | | | | | | 3-phosphate |
| | | | | | | dehydrogenase |
| 1212 | ANATO | 1/1 | 63-71 | 7.4 | 0.033 | Anaphylotoxin- |
| | | | | | | like domain |
| 1214 | kazal | 1/1 | 18-56 | 22.2 | 0.00062 | Kazal-type |
| | | | | | | serine protease |
| | | | | | | inhibitor |
| | | | | | | domain |
| 1215 | p34-Arc | 1/1 | 16-73 | 35.7 | 1e−08 | Arp2/3 complex, |
| | | | | | | 34 kD subunit |
| | | | | | | p34-Arc |
| 1216 | EGF | 2/3 | 64-100 | 25.9 | 1.3e−05 | EGF-like domain |
| 1216 | EGF | 3/3 | 106-140 | 13.2 | 0.05 | EGF-like domain |
| 1217 | kazal | 1/1 | 39-87 | 36.5 | 1.4e−07 | Kazal-type |
| | | | | | | serine protease |
| | | | | | | inhibitor |
| | | | | | | domain |
| 1218 | filament | 1/1 | 13-76 | 134.7 | 1.6e−36 | Intermediate |
| | | | | | | filament |
| | | | | | | protein |
| 1219 | pkinase | 1/1 | 99-361 | 290.7 | 1.8e−83 | Protein kinase |
| | | | | | | domain |
| 1221 | transmembrane4 | 1/1 | 22-70 | 52.3 | 1.5e−15 | Tetraspanin |
| | | | | | | family |
| 1222 | ferritin | 1/1 | 1-109 | 177.7 | 1.8e−49 | Ferritin-like |
| | | | | | | domain |
| 1223 | DUF260 | 1/1 | 33-68 | 4.8 | 0.23 | Protein of |
| | | | | | | unknown |
| | | | | | | function DUF260 |
| 1223 | bZIP | 1/1 | 16-51 | 10.2 | 0.22 | bZIP |
| | | | | | | transcription |
| | | | | | | factor |
| 1224 | hormone | 1/1 | 4-107 | 119.8 | 4.2e−44 | Somatotropin |
| | | | | | | hormone family |
| 1225 | sushi | 1/1 | 16-43 | 27.4 | 1.7e−05 | Sushi domain |
| | | | | | | (SCR repeat) |
| 1227 | L15 | 1/1 | 66-92 | 44.5 | 3.2e−10 | Ribosomal |
| | | | | | | protein L15 |
| 1229 | Dynein_heavy | 1/1 | 11-127 | 91.5 | 2.6e−26 | Dynein heavy |
| | | | | | | chain |
| 1231 | dCMP_cyt_deam | 1/1 | 34-140 | 98.5 | 1.3e−26 | Cytidine and |
| | | | | | | deoxycytidylate |
| | | | | | | deaminase |
| 1232 | adh_short | 1/1 | 38-146 | 99.8 | 3.4e−27 | short chain |
| | | | | | | dehydrogenase |
| 1233 | ldh | 1/1 | 44-129 | 143.7 | 3.2e−39 | lactate/malate |
| | | | | | | dehydrogenase, |
| | | | | | | NAD binding d |
| 1234 | HMG_box | 1/2 | 1-66 | 59.4 | 4.5e−15 | HMG (high |
| | | | | | | mobility group) |
| | | | | | | box |
| 1234 | HMG_box | 2/2 | 82-145 | 88.0 | 4.4e−23 | HMG (high |
| | | | | | | mobility group) |
| | | | | | | box |
| 1236 | EGF | 1/3 | 2-27 | 13.7 | 0.037 | EGF-like domain |
| 1236 | EGF | 2/3 | 33-68 | 30.1 | 8.6e−07 | EGF-like domain |
| 1236 | EGF | 3/3 | 74-110 | 28.1 | 3.1e−06 | EGF-like domain |
| 1236 | PSI | 1/1 | 19-47 | 6.7 | 0.78 | Plexin repeat |
| 1237 | cystatin | 1/1 | 2-93 | 124.3 | 5.4e−35 | Cystatin domain |
| 1239 | cadherin | 1/1 | 36-62 | 9.5 | 0.22 | Cadherin domain |
| 1240 | bZIP | 1/1 | 226-282 | 16.8 | 0.003 | bZIP |
| | | | | | | transcription |
| | | | | | | factor |
| 1242 | IF_tail | 1/1 | 1-85 | 167.1 | 1.9e−46 | Intermediate |
| | | | | | | filament tail |
| | | | | | | domain |
| 1244 | Ribosomal_S15 | 1/1 | 88-149 | 14.6 | 0.0094 | Ribosomal |
| | | | | | | protein S15 |
| 1246 | ldh | 1/1 | 1-42 | 82.0 | 4.4e−21 | lactate/malate |
| | | | | | | dehydrogenase, |
| | | | | | | NAD binding do |
| 1246 | ldh_C | 1/1 | 44-130 | 163.1 | 4.9e−45 | lactate/malate |
| | | | | | | dehydrogenase, |
| | | | | | | alpha/beta C-t |
| 1249 | W2 | 1/1 | 35-99 | 97.3 | 5.1e−29 | eIF4- |
| | | | | | | gamma/eIF5/eIF2- |
| | | | | | | epsilon |
| 1251 | Pep_M12B_propep | 1/1 | 120-198 | 75.4 | 2.7e−20 | Reprolysin |
| | | | | | | family |
| | | | | | | propeptide |
| 1251 | Reprolysin | 2/3 | 352-449 | 31.3 | 5.6e−07 | Reprolysin |
| | | | | | | (M12B) family |
| | | | | | | zinc metallo |
| 1251 | Tfb2 | 1/1 | 312-330 | 3.3 | 0.1 | Transcription |
| | | | | | | factor Tfb2 |
| 1251 | tsp_1 | 2/4 | 595-645 | 43.1 | 2.3e−11 | Thrombospondin |
| | | | | | | type 1 domain |
| 1251 | tsp_1 | 3/4 | 888-941 | 12.4 | 0.032 | Thrombospondin |
| | | | | | | type 1 domain |
| 1251 | tsp_1 | 4/4 | 947-998 | 24.6 | 7.2e−06 | Thrombospondin |
| | | | | | | type 1 domain |
| 1253 | ANATO | 1/1 | 60-66 | 4.4 | 0.46 | Anaphylotoxin- |
| | | | | | | like domain |
| 1255 | UPF0005 | 1/1 | 15-144 | 58.8 | 6.8e−16 | Uncharacterized |
| | | | | | | protein family |
| | | | | | | UPF0005 |
| 1256 | actin | 1/1 | 1-145 | 358.0 | 1.5e−108 | Actin |
| 1258 | OSCP | 1/1 | 37-209 | 257.9 | 1.9e−75 | ATP synthase |
| | | | | | | delta (OSCP) |
| | | | | | | subunit |
| 1259 | PA28_alpha | 1/1 | 9-72 | 135.5 | 9.4e−37 | Proteasome |
| | | | | | | activator pa28 |
| | | | | | | alpha subuni |
| 1259 | PA28_beta | 1/1 | 90-239 | 387.7 | 1.1e−112 | Proteasome |
| | | | | | | activator pa28 |
| | | | | | | beta subunit |
| 1260 | WD40 | 1/5 | 166-205 | 31.0 | 5.2e−07 | WD domain, G- |
| | | | | | | beta repeat |
| 1260 | WD40 | 2/5 | 216-255 | 24.2 | 4.5e−05 | WD domain, G- |
| | | | | | | beta repeat |
| 1260 | WD40 | 3/5 | 262-301 | 40.4 | 1.1e−09 | WD domain, G- |
| | | | | | | beta repeat |
| 1260 | WD40 | 4/5 | 306-345 | 33.9 | 7.8e−08 | WD domain, G- |
| | | | | | | beta repeat |
| 1260 | WD40 | 5/5 | 363-402 | 28.6 | 2.5e−06 | WD domain, G- |
| | | | | | | beta repeat |
| 1261 | WD40 | 1/5 | 6-38 | 13.2 | 0.059 | WD domain, G- |
| | | | | | | beta repeat |
| 1261 | WD40 | 2/5 | 42-80 | 41.8 | 4.4e−10 | WD domain, G- |
| | | | | | | beta repeat |
| 1261 | WD40 | 4/5 | 178-216 | 28.6 | 2.5e−06 | WD domain, G- |
| | | | | | | beta repeat |
| 1261 | WD40 | 5/5 | 275-313 | 24.1 | 4.6e-05 | WD domain, G- |
| | | | | | | beta repeat |
| 1262 | Big_1 | 1/3 | 1337-1373 | 8.9 | 0.16 | Bacterial Ig- |
| | | | | | | like domain |
| | | | | | | (group 1) |
| 1262 | CH | 1/2 | 72-177 | 97.6 | 1.3e−25 | Calponin |
| | | | | | | homology (CH) |
| | | | | | | domain |
| 1262 | CH | 2/2 | 195-297 | 78.2 | 3.2e−20 | Calponin |
| | | | | | | homology (CH) |
| | | | | | | domain |
| 1262 | Filamin | 1/24 | 306-399 | 127.4 | 2e−37 | Filamin/ABP280 |
| | | | | | | repeat |
| 1262 | Filamin | 10/24 | 1185-1274 | 96.0 | 7.1e−28 | Filamin/ABP280 |
| | | | | | | repeat |
| 1262 | Filamin | 11/24 | 1280-1374 | 120.5 | 2.5e−35 | Filamin/ABP280 |
| | | | | | | repeat |
| 1262 | Filamin | 12/24 | 1380-1467 | 139.6 | 3.8e−41 | Filamin/ABP280 |
| | | | | | | repeat |
| 1262 | Filamin | 13/24 | 1473-1563 | 137.8 | 1.3e−40 | Filamin/ABP280 |
| | | | | | | repeat |
| 1262 | Filamin | 14/24 | 1569-1660 | 124.8 | 1.2e−36 | Filamin/ABP280 |
| | | | | | | repeat |
| 1262 | Filamin | 15/24 | 1666-1756 | 121.9 | 9.1e−36 | Filamin/ABP280 |
| | | | | | | repeat |
| 1262 | Filamin | 16/24 | 1812-1868 | 76.6 | 5.4e−22 | Filamin/ABP280 |
| | | | | | | repeat |
| 1262 | Filamin | 17/24 | 1873-1960 | 145.4 | 6.6e−43 | Filamin/ABP280 |
| | | | | | | repeat |
| 1262 | Filamin | 18/24 | 1971-2046 | 63.2 | 6.8e−18 | Filamin/ABP280 |
| | | | | | | repeat |
| 1262 | Filamin | 19/24 | 2054-2141 | 135.8 | 5.4e−40 | Filamin/ABP280 |
| | | | | | | repeat |
| 1262 | Filamin | 2/24 | 406-498 | 122.7 | 5.3e−36 | Filamin/ABP280 |
| | | | | | | repeat |
| 1262 | Filamin | 20/24 | 2142-2237 | 78.2 | 1.8e−22 | Filamin/ABP280 |
| | | | | | | repeat |
| 1262 | Filamin | 21/24 | 2245-2332 | 154.6 | 1e−45 | Filamin/ABP280 |
| | | | | | | repeat |
| 1262 | Filamin | 22/24 | 2339-2427 | 95.4 | 1.1e−27 | Filamin/ABP280 |
| | | | | | | repeat |
| 1262 | Filamin | 23/24 | 2436-2523 | 103.7 | 3.2e−30 | Filamin/ABP280 |
| | | | | | | repeat |
| 1262 | Filamin | 24/24 | 2564-2653 | 112.4 | 7.5e−33 | Filamin/ABP280 |
| | | | | | | repeat |
| 1262 | Filamin | 3/24 | 504-595 | 129.1 | 6.1e−38 | Filamin/ABP280 |
| | | | | | | repeat |
| 1262 | Filamin | 4/24 | 601-688 | 106.5 | 4.4e−31 | Filamin/ABP280 |
| | | | | | | repeat |
| 1262 | Filamin | 5/24 | 697-788 | 94.3 | 2.4e−27 | Filamin/ABP280 |
| | | | | | | repeat |
| 1262 | Filamin | 6/24 | 794-891 | 128.8 | 7.3e−38 | Filamin/ABP280 |
| | | | | | | repeat |
| 1262 | Filamin | 7/24 | 897-990 | 127.9 | 1.4e−37 | Filamin/ABP280 |
| | | | | | | repeat |
| 1262 | Filamin | 8/24 | 996-1086 | 86.5 | 5.7e−25 | Filamin/ABP280 |
| | | | | | | repeat |
| 1262 | Filamin | 9/24 | 1092-1179 | 163.5 | 2.1e−48 | Filamin/ABP280 |
| | | | | | | repeat |
| 1262 | Lipase_3 | 1/1 | 977-992 | 6.2 | 0.79 | Lipase (class |
| | | | | | | 3) |
| 1263 | CUE | 1/1 | 296-337 | 45.9 | 5.6e−12 | CUE domain |
| 1264 | fibrinogen_C | 1/1 | 28-242 | 252.8 | 4.6e−72 | Fibrinogen beta |
| | | | | | | and gamma |
| | | | | | | chains, C-term |
| 1265 | HLH | 1/1 | 80-132 | 74.3 | 1.7e−18 | Helix-loop- |
| | | | | | | helix DNA- |
| | | | | | | binding domain |
| 1266 | transmembrane4 | 1/1 | 11-221 | 270.7 | 2.9e−84 | Tetraspanin |
| | | | | | | family |
| 1267 | HSP70 | 1/1 | 39-91 | 5.5 | 0.5 | Hsp70 protein |
| 1267 | PC_rep | 1/8 | 409-442 | 18.5 | 0.0018 | Proteasome/cyclosome |
| | | | | | | repeat |
| 1267 | PC_rep | 2/8 | 443-479 | 31.3 | 4e−07 | Proteasome/cyclosome |
| | | | | | | repeat |
| 1267 | PC_rep | 3/8 | 480-514 | 30.5 | 6.9e−07 | Proteasome/cyclosome |
| | | | | | | repeat |
| 1267 | PC_rep | 4/8 | 517-551 | 17.8 | 0.0029 | Proteasome/cyclosome |
| | | | | | | repeat |
| 1267 | PC_rep | 5/8 | 560-589 | 11.4 | 0.19 | Proteasome/cyclosome |
| | | | | | | repeat |
| 1267 | PC_rep | 7/8 | 692-723 | 17.5 | 0.0035 | Proteasome/cyclosome |
| | | | | | | repeat |
| 1267 | PC_rep | 8/8 | 724-757 | 19.9 | 0.00071 | Proteasome/cyclosome |
| | | | | | | repeat |
| 1268 | annexin | 1/4 | 18-85 | 111.4 | 1.8e−29 | Annexin |
| 1268 | annexin | 2/4 | 90-157 | 105.7 | 9e−28 | Annexin |
| 1268 | annexin | 3/4 | 173-241 | 108.0 | 1.8e−28 | Annexin |
| 1268 | annexin | 4/4 | 249-316 | 122.3 | 8.8e−33 | Annexin |
| 1269 | PID | 1/1 | 50-176 | 162.3 | 8e−45 | Phosphotyrosine |
| | | | | | | interaction |
| | | | | | | domain |
| | | | | | | (PTB/PID) |
| 1270 | globin | 1/1 | 3-147 | 221.7 | 1.1e−62 | Globin |
| 1273 | Connexin43 | 1/1 | 301-320 | 39.9 | 8.9e−10 | Gap junction |
| | | | | | | alpha-1 protein |
| | | | | | | (Cx43) |
| 1273 | SMC_N | 1/1 | 133-144 | 6.5 | 0.73 | RecF/RecN/SMC N |
| | | | | | | terminal domain |
| 1273 | connexin | 1/1 | 9-239 | 576.9 | 1.2e−169 | Connexin |
| 1274 | trypsin | 1/1 | 9-231 | 318.0 | 2.6e−100 | Trypsin |
| 1276 | MAGE | 1/1 | 471-592 | 119.5 | 2e−32 | MAGE family |
| 1276 | SpoA | 1/1 | 518-535 | 8.3 | 0.88 | Surface |
| | | | | | | presentation of |
| | | | | | | antigens (SPOA) |
| 1277 | SH3 | 1/1 | 68-124 | 42.0 | 6.7e−10 | SH3 domain |
| 1279 | ATP1G1_PLM_MAT8 | 1/1 | 20-75 | 128.7 | 1.7e−38 | ATP1G1/PLM/MAT8 |
| | | | | | | family |
| 1280 | PAP2 | 1/1 | 100-251 | 179.5 | 5.5e−50 | PAP2 |
| | | | | | | superfamily |
| 1281 | cpn60_TCP1 | 1/1 | 39-529 | 628.8 | 3.1e−185 | TCP-1/cpn60 |
| | | | | | | chaperonin |
| | | | | | | family |
| 1282 | thiored | 1/2 | 24-132 | 167.5 | 3.5e−49 | Thioredoxin |
| 1282 | thiored | 2/2 | 159-270 | 187.1 | 4.3e−55 | Thioredoxin |
| 1283 | Astacin | 1/1 | 561-572 | 7.5 | 0.22 | Astacin |
| | | | | | | (Peptidase |
| | | | | | | family M12A) |
| 1283 | notch | 1/3 | 416-441 | 13.5 | 0.09 | Notch (DSL) |
| | | | | | | domain |
| 1283 | notch | 2/3 | 451-474 | 13.2 | 0.11 | Notch (DSL) |
| | | | | | | domain |
| 1283 | sushi | 1/4 | 1215-1280 | 23.2 | 0.00022 | Sushi domain |
| | | | | | | (SCR repeat) |
| 1283 | sushi | 2/4 | 1305-1342 | 15.8 | 0.02 | Sushi domain |
| | | | | | | (SCR repeat) |
| 1283 | sushi | 3/4 | 1346-1410 | 32.5 | 7.9e−07 | Sushi domain |
| | | | | | | (SCR repeat) |
| 1283 | sushi | 4/4 | 1415-1471 | 23.2 | 0.00022 | Sushi domain |
| | | | | | | (SCR repeat) |
| 1284 | BAG | 1/1 | 175-255 | 84.6 | 1.4e−22 | BAG domain |
| 1284 | ThiI | 1/1 | 206-223 | 7.2 | 0.53 | Thiamine |
| | | | | | | biosynthesis |
| | | | | | | protein (ThiI) |
| 1284 | Tropomyosin | 1/1 | 160-183 | 8.4 | 0.2 | Tropomyosin |
| 1284 | ubiquitin | 1/1 | 99-151 | 27.6 | 3.3e−06 | Ubiquitin |
| | | | | | | family |
| 1285 | bZIP | 1/1 | 186-250 | 35.3 | 1.6e−08 | bZIP |
| | | | | | | transcription |
| | | | | | | factor |
| 1286 | HSP70 | 1/1 | 30-635 | 1403.0 | 0 | Hsp70 protein |
| 1286 | Hydantoinase_A | 1/1 | 213-236 | 7.6 | 0.13 | Hydantoinase/oxoprolinase |
| 1287 | DSBA | 1/2 | 49-69 | 7.1 | 0.73 | DSBA |
| | | | | | | oxidoreductase |
| 1287 | DSBA | 2/2 | 357-426 | 7.8 | 0.48 | DSBA |
| | | | | | | oxidoreductase |
| 1287 | thiored | 1/2 | 24-133 | 190.7 | 3.5e−56 | Thioredoxin |
| 1287 | thiored | 2/2 | 375-485 | 183.5 | 5.2e−54 | Thioredoxin |
| 1288 | TNF | 1/1 | 153-280 | 59.0 | 2.6e−15 | TNF(Tumor |
| | | | | | | Necrosis |
| | | | | | | Factor) family |
| 1289 | Pyrophosphatase | 1/1 | 45-229 | 440.3 | 1e−128 | Inorganic |
| | | | | | | pyrophosphatase |
| 1290 | LIM | 1/3 | 384-442 | 56.5 | 1.5e−14 | LIM domain |
| 1290 | LIM | 2/3 | 444-501 | 58.1 | 5.2e−15 | LIM domain |
| 1290 | LIM | 3/3 | 504-570 | 37.3 | 4.2e−09 | LIM domain |
| 1292 | isodh | 1/1 | 56-379 | 301.7 | 2.7e−89 | Isocitrate/isopropylmalate |
| | | | | | | dehydrogenase |
| 1293 | cofilin_ADF | 1/1 | 19-154 | 195.2 | 1e−54 | Cofilin/tropomyosin- |
| | | | | | | type |
| | | | | | | actin-binding |
| | | | | | | pr |
| 1294 | UQ_con | 1/1 | 2-154 | 254.3 | 1.6e−72 | Ubiquitin- |
| | | | | | | conjugating |
| | | | | | | enzyme |
| 1295 | ABC_tran | 1/1 | 7-22 | 10.3 | 0.081 | ABC transporter |
| 1295 | APS_kinase | 1/1 | 5-20 | 8.3 | 0.24 | Adenylylsulfate |
| | | | | | | kinase |
| 1295 | DUF258 | 1/1 | 8-25 | 8.4 | 0.19 | Protein of |
| | | | | | | unknown |
| | | | | | | function, |
| | | | | | | DUF258 |
| 1295 | Guanylate_kin | 1/1 | 40-144 | 212.8 | 5.2e−60 | Guanylate |
| | | | | | | kinase |
| 1295 | Rad17 | 1/1 | 9-28 | 6.3 | 0.48 | Rad17 cell |
| | | | | | | cycle |
| | | | | | | checkpoint |
| | | | | | | protein |
| 1295 | SKI | 1/1 | 5-20 | 9.1 | 0.2 | Shikimate |
| | | | | | | kinase |
| 1295 | Viral_helicasel | 1/1 | 7-27 | 5.5 | 0.95 | Viral |
| | | | | | | (Superfamily 1) |
| | | | | | | RNA helicase |
| 1295 | cobW | 1/1 | 7-27 | 6.6 | 0.32 | Cobalamin |
| | | | | | | synthesis |
| | | | | | | protein/P47K |
| 1297 | Gal-bind_lectin | 1/1 | 117-247 | 215.3 | 2.8e−61 | Galactoside- |
| | | | | | | binding lectin |
| 1299 | Acetyltransf | 1/1 | 157-175 | 12.0 | 0.0055 | Acetyltransferase |
| | | | | | | (GNAT) |
| | | | | | | family |
| 1299 | PapB | 1/1 | 98-112 | 8.1 | 0.39 | Adhesin |
| | | | | | | biosynthesis |
| | | | | | | transcription |
| | | | | | | regu |
| 1303 | CH | 1/2 | 44-149 | 96.3 | 3.2e−25 | Calponin |
| | | | | | | homology (CH) |
| | | | | | | domain |
| 1303 | CH | 2/2 | 167-269 | 82.4 | 2.2e−21 | Calponin |
| | | | | | | homology (CH) |
| | | | | | | domain |
| 1303 | Filamin | 1/24 | 278-371 | 159.1 | 4.6e−47 | Filamin/ABP280 |
| | | | | | | repeat |
| 1303 | Filamin | 10/24 | 1157-1246 | 153.3 | 2.7e−45 | Filamin/ABP280 |
| | | | | | | repeat |
| 1303 | Filamin | 11/24 | 1252-1346 | 146.0 | 4.4e−43 | Filamin/ABP280 |
| | | | | | | repeat |
| 1303 | Filamin | 12/24 | 1352-1439 | 163.3 | 2.3e−48 | Filamin/ABP280 |
| | | | | | | repeat |
| 1303 | Filamin | 13/24 | 1445-1536 | 167.4 | 1.3e−49 | Filamin/ABP280 |
| | | | | | | repeat |
| 1303 | Filamin | 14/24 | 1542-1633 | 165.4 | 5.5e−49 | Filamin/ABP280 |
| | | | | | | repeat |
| 1303 | Filamin | 15/24 | 1639-1737 | 130.1 | 2.9e−38 | Filamin/ABP280 |
| | | | | | | repeat |
| 1303 | Filamin | 16/24 | 1779-1857 | 97.6 | 2.3e−28 | Filamin/ABP280 |
| | | | | | | repeat |
| 1303 | Filamin | 17/24 | 1862-1949 | 167.4 | 1.4e−49 | Filamin/ABP280 |
| | | | | | | repeat |
| 1303 | Filamin | 18/24 | 1951-2036 | 101.7 | 1.3e−29 | Filamin/ABP280 |
| | | | | | | repeat |
| 1303 | Filamin | 19/24 | 2044-2131 | 163.1 | 2.7e−48 | Filamin/ABP280 |
| | | | | | | repeat |
| 1303 | Filamin | 2/24 | 378-471 | 155.3 | 6.3e−46 | Filamin/ABP280 |
| | | | | | | repeat |
| 1303 | Filamin | 20/24 | 2132-2227 | 114.6 | 1.5e−33 | Filamin/ABP280 |
| | | | | | | repeat |
| 1303 | Filamin | 21/24 | 2235-2322 | 161.0 | 1.2e−47 | Filamin/ABP280 |
| | | | | | | repeat |
| 1303 | Filamin | 22/24 | 2329-2417 | 126.0 | 5.3e−37 | Filamin/ABP280 |
| | | | | | | repeat |
| 1303 | Filamin | 23/24 | 2426-2513 | 135.5 | 6.7e−40 | Filamin/ABP280 |
| | | | | | | repeat |
| 1303 | Filamin | 24/24 | 2554-2643 | 137.7 | 1.5e−40 | Filamin/ABP280 |
| | | | | | | repeat |
| 1303 | Filamin | 3/24 | 477-567 | 148.6 | 7e−44 | Filamin/ABP280 |
| | | | | | | repeat |
| 1303 | Filamin | 4/24 | 573-660 | 139.5 | 4.1e−41 | Filamin/ABP280 |
| | | | | | | repeat |
| 1303 | Filamin | 5/24 | 669-760 | 165.5 | 5.3e−49 | Filamin/ABP280 |
| | | | | | | repeat |
| 1303 | Filamin | 6/24 | 766-863 | 141.7 | 8.9e−42 | Filamin/ABP280 |
| | | | | | | repeat |
| 1303 | Filamin | 7/24 | 869-962 | 154.5 | 1.1e−45 | Filamin/ABP280 |
| | | | | | | repeat |
| 1303 | Filamin | 8/24 | 968-1058 | 113.1 | 4.6e−33 | Filamin/ABP280 |
| | | | | | | repeat |
| 1303 | Filamin | 9/24 | 1064-1151 | 169.7 | 2.8e−50 | Filamin/ABP280 |
| | | | | | | repeat |
| 1304 | CMD | 1/1 | 90-106 | 7.9 | 0.75 | Carboxymuconolactone |
| | | | | | | decarboxylase |
| 1305 | Ribosomal_L7Ae | 1/1 | 21-121 | 74.5 | 7.4e−21 | Ribosomal |
| | | | | | | protein |
| | | | | | | L7Ae/L30e/S12e/ |
| | | | | | | Gadd4 |
| 1306 | Dynein_light | 1/1 | 1-89 | 219.7 | 4.3e−62 | Dynein light |
| | | | | | | chain type 1 |
| 1308 | ig | 2/2 | 119-187 | 26.8 | 9.1e−06 | Immunoglobulin |
| | | | | | | domain |
| 1309 | Glypican | 1/1 | 4-578 | 1207.6 | 0 | Glypican |
| 1310 | Astacin | 1/1 | 128-321 | 395.9 | 4.8e−122 | Astacin |
| | | | | | | (Peptidase |
| | | | | | | family M12A) |
| 1310 | CUB | 1/5 | 322-431 | 204.4 | 6.2e−59 | CUB domain |
| 1310 | CUB | 2/5 | 435-544 | 228.2 | 6.1e−66 | CUB domain |
| 1310 | CUB | 3/5 | 591-700 | 210.5 | 9.9e−61 | CUB domain |
| 1310 | CUB | 4/5 | 747-856 | 206.0 | 2.2e−59 | CUB domain |
| 1310 | CUB | 5/5 | 860-973 | 173.6 | 7.4e−50 | CUB domain |
| 1310 | EGF | 1/2 | 551-587 | 33.2 | 1.1e−07 | EGF-like domain |
| 1310 | EGF | 2/2 | 707-742 | 27.2 | 5.5e−06 | EGF-like domain |
| 1310 | VSP | 1/1 | 572-589 | 5.5 | 1 | Giardia |
| | | | | | | variant- |
| | | | | | | specific |
| | | | | | | surface protein |
| 1311 | HIT | 1/1 | 14-125 | 223.0 | 4.4e−63 | HIT family |
| 1312 | proteasome | 1/1 | 56-238 | 165.7 | 3.1e−46 | Proteasome A- |
| | | | | | | type and B-type |
| 1313 | filament | 1/1 | 71-381 | 335.6 | 5.5e−97 | Intermediate |
| | | | | | | filament |
| | | | | | | protein |
| 1314 | Fasciclin | 1/4 | 134-238 | 61.9 | 1.2e−16 | Fasciclin |
| | | | | | | domain |
| 1314 | Fasciclin | 2/4 | 240-373 | 99.8 | 1.3e−27 | Fasciclin |
| | | | | | | domain |
| 1314 | Fasciclin | 3/4 | 432-500 | 10.5 | 0.078 | Fasciclin |
| | | | | | | domain |
| 1314 | Fasciclin | 4/4 | 502-634 | 235.2 | 9.5e−67 | Fasciclin |
| | | | | | | domain |
| 1315 | histone | 1/1 | 6-122 | 165.0 | 1.3e−45 | Core histone |
| | | | | | | H2A/H2B/H3/H4 |
| 1317 | ATP-grasp | 1/1 | 173-252 | 9.9 | 0.085 | ATP-grasp |
| | | | | | | domain |
| 1317 | Biotin_carb_C | 1/1 | 372-480 | 197.4 | 1.4e−56 | Biotin |
| | | | | | | carboxylase C- |
| | | | | | | terminal domain |
| 1317 | CPSase_L_D2 | 1/1 | 151-365 | 437.0 | 1.7e−127 | Carbamoyl- |
| | | | | | | phosphate |
| | | | | | | synthase L |
| | | | | | | chain, |
| 1317 | CPSase_L_chain | 1/1 | 37-149 | 205.2 | 9.8e−58 | Carbamoyl- |
| | | | | | | phosphate |
| | | | | | | synthase L |
| | | | | | | chain, |
| 1317 | HlyD | 1/1 | 633-660 | 7.1 | 0.94 | HlyD family |
| | | | | | | secretion |
| | | | | | | protein |
| 1317 | SLT_beta | 1/1 | 551-605 | 10.1 | 0.1 | Shiga-like |
| | | | | | | toxin beta |
| | | | | | | subunit |
| 1317 | biotin_lipoyl | 1/1 | 635-702 | 105.4 | 3e−28 | Biotin- |
| | | | | | | requiring |
| | | | | | | enzyme |
| 1317 | gpD | 1/1 | 169-182 | 6.2 | 0.53 | Bacteriophage |
| | | | | | | scaffolding |
| | | | | | | protein D |
| 1318 | Tropomyosin | 1/1 | 10-126 | 235.3 | 8.9e−67 | Tropomyosin |
| 1322 | Mtp | 1/1 | 36-233 | 438.5 | 5.7e−128 | Golgi 4- |
| | | | | | | transmembrane |
| | | | | | | spanning |
| | | | | | | transporter |
| 1323 | eIF5_eIF2B | 1/1 | 182-310 | 281.2 | 1.3e−80 | Domain found in |
| | | | | | | IF2B/IF5 |
| 1325 | BPL_C | 1/1 | 151-171 | 8.5 | 0.78 | Biotin protein |
| | | | | | | ligase C |
| | | | | | | terminal domain |
| 1325 | Mov34 | 1/1 | 87-196 | 149.7 | 5.1e−41 | Mov34/MPN/PAD-1 |
| | | | | | | family |
| 1326 | Ribosomal_L22 | 1/1 | 17-152 | 236.6 | 3.5e−67 | Ribosomal |
| | | | | | | protein |
| | | | | | | L22p/L17e |
| 1327 | MAPEG | 1/1 | 52-136 | 156.7 | 5.8e−45 | MAPEG family |
| 1328 | proteasome | 1/1 | 40-221 | 165.8 | 2.8e−46 | Proteasome A- |
| | | | | | | type and B-type |
| 1329 | C2 | 1/1 | 435-514 | 46.6 | 5.3e−12 | C2 domain |
| 1329 | PH | 1/1 | 314-416 | 90.8 | 3.3e−24 | PH domain |
| 1329 | RasGAP | 1/1 | 608-782 | 319.3 | 4.4e−92 | GTPase- |
| | | | | | | activator |
| | | | | | | protein for |
| | | | | | | Ras-like G |
| 1329 | SH2 | 1/2 | 20-95 | 112.0 | 1.4e−37 | SH2 domain |
| 1329 | SH2 | 2/2 | 190-265 | 116.7 | 3.6e−39 | SH2 domain |
| 1329 | SH3 | 1/1 | 121-178 | 45.0 | 9.8e−11 | SH3 domain |
| 1330 | AAA | 1/1 | 221-408 | 303.8 | 1.2e−90 | ATPase family |
| | | | | | | associated with |
| | | | | | | various |
| 1330 | IstB | 1/1 | 222-238 | 8.3 | 0.23 | IstB-like ATP |
| | | | | | | binding protein |
| 1330 | Parvo_NS1 | 1/1 | 222-240 | 7.8 | 0.17 | Parvovirus non- |
| | | | | | | structural |
| | | | | | | protein NS1 |
| 1330 | RNA_helicase | 1/1 | 222-242 | 12.8 | 0.016 | RNA helicase |
| 1331 | serpin | 1/1 | 51-415 | 283.6 | 3.8e−83 | Serpin (serine |
| | | | | | | protease |
| | | | | | | inhibitor) |
| 1332 | TGF-beta | 1/1 | 208-308 | 65.0 | 8.5e−18 | Transforming |
| | | | | | | growth factor |
| | | | | | | beta like domai |
| 1334 | BRICHOS | 1/1 | 137-231 | 132.0 | 5.2e−37 | BRICHOS domain |
| 1337 | DUF232 | 1/1 | 14-149 | 155.4 | 9.8e−43 | Putative |
| | | | | | | transcriptional |
| | | | | | | regulator |
| 1339 | Ribosomal_L27 | 1/1 | 31-101 | 71.7 | 5.3e−20 | Ribosomal L27 |
| | | | | | | protein |
| 1340 | TPR | 1/1 | 313-336 | 10.4 | 0.38 | TPR Domain |
| 1342 | sushi | 1/4 | 36-94 | 50.1 | 1.8e−11 | Sushi domain |
| | | | | | | (SCR repeat) |
| 1342 | sushi | 2/4 | 98-158 | 43.2 | 1.2e−09 | Sushi domain |
| | | | | | | (SCR repeat) |
| 1342 | sushi | 3/4 | 163-220 | 56.2 | 4.4e−13 | Sushi domain |
| | | | | | | (SCR repeat) |
| 1342 | sushi | 4/4 | 225-283 | 75.4 | 1.2e−18 | Sushi domain |
| | | | | | | (SCR repeat) |
| 1345 | UCR_hinge | 1/1 | 27-91 | 162.6 | 1.5e−46 | Ubiquinol- |
| | | | | | | cytochrome C |
| | | | | | | reductase hinge |
| | | | | | | prot |
| 1349 | AAA | 1/1 | 185-372 | 305.1 | 5e−91 | ATPase family |
| | | | | | | associated with |
| | | | | | | various |
| 1349 | IstB | 1/1 | 180-205 | 11.0 | 0.037 | IstB-like ATP |
| | | | | | | binding protein |
| 1349 | Parvo_NS1 | 1/1 | 186-207 | 15.6 | 0.00085 | Parvovirus non- |
| | | | | | | structural |
| | | | | | | protein NS1 |
| 1349 | RNA_helicase | 1/1 | 186-204 | 11.9 | 0.028 | RNA helicase |
| 1349 | Sigma54_activat | 1/1 | 186-203 | 10.4 | 0.049 | Sigma-54 |
| | | | | | | interaction |
| | | | | | | domain |
| 1351 | Robl_LC7 | 1/1 | 3-94 | 113.6 | 3.8e−30 | Roadblock/LC7 |
| | | | | | | domain |
| 1352 | YT521-B | 1/1 | 457-547 | 212.4 | 7e−60 | YT521-B-like |
| | | | | | | family |
| 1353 | AAA | 1/1 | 211-398 | 291.4 | 6.7e−87 | ATPase family |
| | | | | | | associated with |
| | | | | | | various ce |
| 1353 | RNA_helicase | 1/1 | 212-232 | 8.5 | 0.25 | RNA helicase |
| 1354 | WD40 | 1/6 | 3-41 | 19.4 | 0.001 | WD domain, G- |
| | | | | | | beta repeat |
| 1354 | WD40 | 2/6 | 47-87 | 40.1 | 1.3e−09 | WD domain, G- |
| | | | | | | beta repeat |
| 1354 | WD40 | 3/6 | 93-133 | 31.5 | 3.6e−07 | WD domain, G- |
| | | | | | | beta repeat |
| 1354 | WD40 | 4/6 | 140-195 | 42.6 | 2.5e−10 | WD domain, G- |
| | | | | | | beta repeat |
| 1354 | WD40 | 5/6 | 202-244 | 38.8 | 3.2e−09 | WD domain, G- |
| | | | | | | beta repeat |
| 1354 | WD40 | 6/6 | 253-290 | 14.7 | 0.023 | WD domain, G- |
| | | | | | | beta repeat |
| 1355 | zf-C3HC4 | 1/1 | 76-116 | 38.4 | 1.6e−10 | Zinc finger, |
| | | | | | | C3HC4 type |
| | | | | | | (RING finger) |
| 1358 | UDPGP | 1/1 | 43-462 | 892.9 | 9.5e−265 | UTP - glucose-1- |
| | | | | | | phosphate |
| | | | | | | uridylyltransferase |
| 1360 | W2 | 1/1 | 336-416 | 120.2 | 3.6e−36 | eIF4- |
| | | | | | | gamma/eIF5/eIF2- |
| | | | | | | epsilon |
| 1362 | Ribosomal_L34e | 1/1 | 5-103 | 229.8 | 4e−65 | Ribosomal |
| | | | | | | protein L34e |
| 1363 | Ribosomal_L18p | 1/1 | 26-99 | 118.5 | 1.3e−31 | Ribosomal |
| | | | | | | L18p/L5e family |
| 1365 | ATP-gua_Ptrans | 1/1 | 148-414 | 655.9 | 2.1e−193 | ATP: guanido |
| | | | | | | phosphotransferase, |
| | | | | | | C-ter |
| 1365 | ATP-gua_PtransN | 1/1 | 52-135 | 192.8 | 5.3e−54 | ATP: guanido |
| | | | | | | phosphotransferase, |
| | | | | | | N-ter |
| 1366 | DUF232 | 1/1 | 8-142 | 189.0 | 7.6e−53 | Putative |
| | | | | | | transcriptional |
| | | | | | | regulator |
| 1367 | Triabin | 1/1 | 119-136 | 12.1 | 0.017 | Triabin |
| 1367 | lipocalin | 1/1 | 38-186 | 149.1 | 3.9e−42 | Lipocalin/ |
| | | | | | | cytosolic |
| | | | | | | fatty-acid |
| | | | | | | binding pr |
| 1369 | CSD | 1/1 | 62-98 | 38.8 | 1.9e−09 | ‘Cold-shock’ |
| | | | | | | DNA-binding |
| | | | | | | domain |
| 1370 | 60s_ribosomal | 1/1 | 22-113 | 129.0 | 6.3e−37 | 60s Acidic |
| | | | | | | ribosomal |
| | | | | | | protein |
| 1371 | thiored | 1/1 | 2-106 | 155.7 | 1.2e−45 | Thioredoxin |
| 1372 | LIM | 1/2 | 28-85 | 62.3 | 3.3e−16 | LIM domain |
| 1372 | LIM | 2/2 | 137-194 | 70.7 | 1.3e−18 | LIM domain |
| 1373 | PX | 1/1 | 137-265 | 143.5 | 3.8e−39 | PX domain |
| 1373 | Sorting_nexin | 1/1 | 2-134 | 295.9 | 3.3e−91 | Sorting nexin, |
| | | | | | | N-terminal |
| | | | | | | domain |
| 1374 | rrm | 1/1 | 18-82 | 65.6 | 7.7e−18 | RNA recognition |
| | | | | | | motif. (a.k.a. |
| | | | | | | RRM, RBD, or |
| 1375 | NHL | 2/2 | 256-254 | 9.8 | 0.6 | NHL repeat |
| 1375 | Str_synth | 1/1 | 40-408 | 325.7 | 2.8e−97 | Strictosidine |
| | | | | | | synthase |
| 1377 | Cation_ATPase_C | 1/1 | 834-1012 | 238.1 | 4.2e−71 | Cation |
| | | | | | | transporting |
| | | | | | | ATPase, C- |
| | | | | | | N-terminu |
| 1377 | Cation_ATPase_N | 1/1 | 33-116 | 134.2 | 6.9e−37 | Cation |
| | | | | | | transporter/ATPase, |
| | | | | | | N-terminus |
| 1377 | E1-E2_ATPase | 1/1 | 135-366 | 391.6 | 5.1e−118 | E1-E2 ATPase |
| 1377 | Hydrolase | 1/2 | 370-633 | 31.3 | 3.4e−07 | haloacid |
| | | | | | | dehalogenase - |
| | | | | | | like hydrolase |
| 1377 | Hydrolase | 2/2 | 687-738 | 41.9 | 4.7e−10 | haloacid |
| | | | | | | dehalogenase- |
| | | | | | | like hydrolase |
| 1379 | SCAMP | 1/1 | 131-308 | 359.0 | 5e−104 | SCAMP family |
| 1380 | COX4 | 1/1 | 26-169 | 242.1 | 7.7e−69 | Cytochrome c |
| | | | | | | oxidase subunit |
| | | | | | | IV |
| 1381 | LIM | 1/1 | 260-315 | 45.6 | 1.8e−11 | LIM domain |
| 1381 | PDZ | 1/1 | 3-84 | 96.2 | 5.8e−26 | PDZ domain |
| | | | | | | (Also known as |
| | | | | | | DHR or GLGF) |
| 1382 | CoaE | 1/1 | 21-38 | 9.0 | 0.11 | Dephospho-CoA |
| | | | | | | kinase |
| 1382 | PRK | 1/1 | 22-229 | 230.6 | 2.3e−65 | Phosphoribulokinase/ |
| | | | | | | Uridine |
| | | | | | | kinase family |
| 1383 | ras | 1/1 | 61-240 | 329.8 | 7e−97 | Ras family |
| 1384 | Leptin | 1/1 | 40-185 | 392.4 | 1.4e−120 | Leptin |
| 1385 | DUF387 | 1/1 | 78-100 | 5.8 | 0.99 | Putative |
| | | | | | | transcriptional |
| | | | | | | regulators (Yp |
| 1385 | Ribosomal_S25 | 1/1 | 1-113 | 262.3 | 6.5e−75 | S25 ribosomal |
| | | | | | | protein |
| 1386 | DEAD | 1/1 | 51-254 | 242.3 | 1.5e−73 | DEAD/DEAH box |
| | | | | | | helicase |
| 1386 | helicase_C | 1/1 | 301-372 | 127.9 | 6.6e−35 | Helicase |
| | | | | | | conserved C- |
| | | | | | | terminal domain |
| 1388 | ank | 2/5 | 110-142 | 32.6 | 1.8e−07 | Ankyrin repeat |
| 1388 | ank | 3/5 | 143-175 | 16.5 | 0.0069 | Ankyrin repeat |
| 1388 | ank | 4/5 | 182-214 | 39.5 | 1.9e−09 | Ankyrin repeat |
| 1388 | ank | 5/5 | 216-248 | 41.0 | 7.1e−10 | Ankyrin repeat |
| 1390 | PX | 1/1 | 505-626 | 95.6 | 9.9e−25 | PX domain |
| 1390 | PXA | 1/1 | 122-253 | 42.5 | 2.7e−10 | PXA domain |
| 1391 | SUI1 | 1/1 | 9-109 | 225.9 | 6e−64 | Translation |
| | | | | | | initiation |
| | | | | | | factor SUI1 |
| 1392 | perilipin | 1/1 | 2-396 | 813.3 | 6.8e−244 | Perilipin |
| | | | | | | family |
| 1393 | PRA1 | 1/1 | 8-55 | 15.3 | 0.0047 | Prenylated rab |
| | | | | | | acceptor (PRA1) |
| 1395 | ENV_polyprotein | 1/1 | 265-486 | 159.2 | 1.6e−46 | ENV polyprotein |
| | | | | | | (coat |
| | | | | | | polyprotein) |
| 1396 | LRR | 1/10 | 82-105 | 16.8 | 0.007 | Leucine Rich |
| | | | | | | Repeat |
| 1396 | LRR | 2/10 | 106-129 | 12.9 | 0.085 | Leucine Rich |
| | | | | | | Repeat |
| 1396 | LRR | 3/10 | 130-149 | 14.8 | 0.025 | Leucine Rich |
| | | | | | | Repeat |
| 1396 | LRR | 4/10 | 151-174 | 9.1 | 1 | Leucine Rich |
| | | | | | | Repeat |
| 1396 | LRR | 7/10 | 222-245 | 17.1 | 0.0055 | Leucine Rich |
| | | | | | | Repeat |
| 1396 | LRR | 8/10 | 246-269 | 9.8 | 0.65 | Leucine Rich |
| | | | | | | Repeat |
| 1396 | LRR | 9/10 | 270-292 | 15.3 | 0.018 | Leucine Rich |
| | | | | | | Repeat |
| 1396 | LRRNT | 1/2 | 53-80 | 43.3 | 2.8e−10 | Leucine rich |
| | | | | | | repeat N- |
| | | | | | | terminal domain |
| 1397 | Ribosomal_S27 | 1/1 | 101-147 | 119.0 | 8.7e−32 | Ribosomal |
| | | | | | | protein S27a |
| 1397 | ubiquitin | 1/1 | 1-74 | 153.1 | 4.8e−42 | Ubiquitin |
| | | | | | | family |
| 1398 | Kunitz_BPTI | 1/3 | 36-86 | 93.6 | 2.6e−29 | Kunitz/Bovine |
| | | | | | | pancreatic |
| | | | | | | trypsin |
| | | | | | | inhibito |
| 1398 | Kunitz_BPTI | 2/3 | 96-149 | 38.7 | 2.1e−11 | Kunitz/Bovine |
| | | | | | | pancreatic |
| | | | | | | trypsin |
| | | | | | | inhibito |
| 1398 | Kunitz_BPTI | 3/3 | 158-208 | 85.3 | 1.3e−26 | Kunitz/Bovine |
| | | | | | | pancreatic |
| | | | | | | trypsin |
| | | | | | | inhibito |
| 1398 | kinesin | 1/1 | 221-231 | 5.8 | 0.8 | Kinesin motor |
| | | | | | | domain |
| 1399 | proteasome | 1/1 | 28-216 | 186.1 | 4.6e−52 | Proteasome A- |
| | | | | | | type and B-type |
| 1401 | AAA | 1/1 | 169-356 | 316.0 | 2.7e−94 | ATPase family |
| | | | | | | associated with |
| | | | | | | various |
| 1401 | IstB | 1/1 | 170-186 | 7.9 | 0.31 | IstB-like ATP |
| | | | | | | binding protein |
| 1401 | Parvo_NS1 | 1/1 | 171-188 | 6.5 | 0.4 | Parvovirus non- |
| | | | | | | structural |
| | | | | | | protein NS1 |
| 1401 | RNA_helicase | 1/1 | 170-191 | 11.7 | 0.032 | RNA helicase |
| 1401 | Sigma54_activat | 1/1 | 171-187 | 7.1 | 0.44 | Sigma-54 |
| | | | | | | interaction |
| | | | | | | domain |
| 1403 | TB | 1/1 | 46-71 | 8.6 | 0.35 | TB domain |
| 1403 | kazal | 1/2 | 121-167 | 48.1 | 1.4e−10 | Kazal-type |
| | | | | | | serine protease |
| | | | | | | inhibitor |
| | | | | | | domain |
| 1403 | kazal | 2/2 | 195-243 | 36.5 | 1.4e−07 | Kazal-type |
| | | | | | | serine protease |
| | | | | | | inhibitor |
| | | | | | | domain |
| 1404 | 60s_ribosomal | 1/1 | 17-114 | 114.8 | 1e−32 | 60s Acidic |
| | | | | | | ribosomal |
| | | | | | | protein |
| 1404 | Peptidase_M4_C | 1/1 | 12-32 | 6.5 | 0.31 | Thermolysin |
| | | | | | | metallopeptidase, |
| | | | | | | alpha-he |
| 1406 | zf-C3HC4 | 1/1 | 79-102 | 10.3 | 0.069 | Zinc finger, |
| | | | | | | C3HC4 type |
| | | | | | | (RING finger) |
| 1408 | Adap_comp_sub | 1/1 | 58-95 | 7.6 | 0.054 | Adaptor |
| | | | | | | complexes |
| | | | | | | medium subunit |
| | | | | | | famil |
| 1408 | Clat_adaptor_s | 1/1 | 1-142 | 325.8 | 4.8e−94 | Clathrin |
| | | | | | | adaptor complex |
| | | | | | | small chain |
| 1409 | Calsequestrin | 2/2 | 235-348 | 20.2 | 1.6e−05 | Calsequestrin |
| 1409 | DSBA | 1/3 | 83-104 | 10.2 | 0.1 | DSBA |
| | | | | | | oxidoreductase |
| 1409 | DSBA | 2/3 | 194-225 | 7.4 | 0.62 | DSBA |
| | | | | | | oxidoreductase |
| 1409 | DSBA | 3/3 | 547-576 | 16.2 | 0.0021 | DSBA |
| | | | | | | oxidoreductase |
| 1409 | thiored | 1/3 | 61-169 | 184.7 | 2.2e−54 | Thioredoxin |
| 1409 | thiored | 2/3 | 176-284 | 193.4 | 5.2e−57 | Thioredoxin |
| 1409 | thiored | 3/3 | 524-636 | 182.5 | 1e−53 | Thioredoxin |
| 1410 | APS_kinase | 1/1 | 21-39 | 10.8 | 0.042 | Adenylylsulfate |
| | | | | | | kinase |
| 1410 | CoaE | 1/1 | 20-198 | 321.3 | 5e−96 | Dephospho-CoA |
| | | | | | | kinase |
| 1410 | PRK | 1/1 | 21-39 | 18.5 | 0.00032 | Phosphoribulokinase/ |
| | | | | | | Uridine |
| | | | | | | kinase |
| 1410 | UPF0042 | 1/1 | 19-48 | 7.4 | 0.33 | Uncharacterised |
| | | | | | | P-loop ATPase |
| | | | | | | protein |
| 1411 | Fz | 1/1 | 1-21 | 22.8 | 7.9e−07 | Fz domain |
| 1411 | Zn_carbOpept | 1/2 | 50-160 | 69.8 | 6.6e−18 | Zinc |
| | | | | | | carboxypeptidase |
| 1411 | Zn_carbOpept | 2/2 | 172-431 | 90.9 | 1.3e−23 | Zinc |
| | | | | | | carboxypeptidase |
| 1412 | ANATO | 1/3 | 36-69 | 41.2 | 5.9e−15 | Anaphylotoxin- |
| | | | | | | like domain |
| 1412 | ANATO | 2/3 | 77-110 | 29.6 | 1.4e−10 | Anaphylotoxin- |
| | | | | | | like domain |
| 1412 | ANATO | 3/3 | 112-144 | 37.0 | 2.3e−13 | Anaphylotoxin- |
| | | | | | | like domain |
| 1412 | EGF | 1/8 | 180-214 | 16.3 | 0.0067 | EGF-like domain |
| 1412 | EGF | 3/8 | 312-354 | 19.9 | 0.00063 | EGF-like domain |
| 1412 | EGF | 4/8 | 360-397 | 40.6 | 8.8e−10 | EGF-like domain |
| 1412 | EGF | 5/8 | 403-439 | 25.9 | 1.3e−05 | EGF-like domain |
| 1412 | EGF | 6/8 | 445-479 | 13.2 | 0.05 | EGF-like domain |
| 1412 | EGF | 7/8 | 485-523 | 29.3 | 1.4e−06 | EGF-like domain |
| 1413 | rrm | 1/3 | 192-233 | 32.9 | 3.1e−08 | RNA recognition |
| | | | | | | motif. (a.k.a. |
| | | | | | | RRM, RBD, or |
| 1413 | rrm | 2/3 | 260-327 | 66.4 | 4.4e−18 | RNA recognition |
| | | | | | | motif. (a.k.a. |
| | | | | | | RRM, RBD, or |
| 1413 | rrm | 3/3 | 346-414 | 75.0 | 1.3e−20 | RNA recognition |
| | | | | | | motif. (a.k.a. |
| | | | | | | RRM, RBD, or |
| 1414 | Ribosomal_S11 | 1/1 | 29-147 | 234.9 | 3.4e−72 | Ribosomal |
| | | | | | | protein S11 |
| 1415 | Ribosomal_L29e | 1/1 | 25-64 | 83.6 | 4.4e−23 | Ribosomal L29e |
| | | | | | | protein family |
| 1416 | Ribosomal_L1 | 1/1 | 5-213 | 348.7 | 6.4e−127 | Ribosomal |
| | | | | | | protein |
| | | | | | | L1p/L10e family |
| 1418 | LRR | 1/10 | 67-90 | 15.2 | 0.019 | Leucine Rich |
| | | | | | | Repeat |
| 1418 | LRR | 10/10 | 305-330 | 13.9 | 0.044 | Leucine Rich |
| | | | | | | Repeat |
| 1418 | LRR | 2/10 | 91-116 | 11.0 | 0.3 | Leucine Rich |
| | | | | | | Repeat |
| 1418 | LRR | 4/10 | 138-159 | 16.1 | 0.011 | Leucine Rich |
| | | | | | | Repeat |
| 1418 | LRR | 5/10 | 160-184 | 12.9 | 0.088 | Leucine Rich |
| | | | | | | Repeat |
| 1418 | LRR | 6/10 | 185-204 | 16.6 | 0.0078 | Leucine Rich |
| | | | | | | Repeat |
| 1418 | LRR | 7/10 | 206-229 | 17.1 | 0.0057 | Leucine Rich |
| | | | | | | Repeat |
| 1418 | LRR | 8/10 | 230-253 | 9.7 | 0.71 | Leucine Rich |
| | | | | | | Repeat |
| 1418 | LRR | 9/10 | 255-277 | 12.7 | 0.096 | Leucine Rich |
| | | | | | | Repeat |
| 1418 | LRRNT | 1/1 | 36-66 | 40.5 | 1.7e−09 | Leucine rich |
| | | | | | | repeat N- |
| | | | | | | terminal domain |
| 1419 | AhpC-TSA | 1/1 | 81-230 | 247.7 | 1.6e−70 | AhpC/TSA family |
| 1419 | Syndecan | 1/1 | 18-49 | 6.4 | 0.062 | Syndecan domain |
| 1421 | Triabin | 1/1 | 120-135 | 17.7 | 0.00038 | Triabin |
| 1421 | lipocalin | 1/1 | 41-185 | 111.9 | 2.6e−31 | Lipocalin/ |
| | | | | | | cytosolic |
| | | | | | | fatty-acid |
| | | | | | | binding pr |
| 1422 | Ribosomal_L21e | 1/1 | 2-100 | 241.6 | 1.1e−68 | Ribosomal |
| | | | | | | protein L21e |
| 1423 | Ribosomal_S10 | 1/1 | 19-114 | 193.7 | 2.8e−54 | Ribosomal |
| | | | | | | protein |
| | | | | | | S10p/S20e |
| 1424 | Ribosomal_L23 | 1/1 | 74-153 | 112.4 | 5e−32 | Ribosomal |
| | | | | | | protein L23 |
| 1424 | Ribosomal_L23eN | 1/1 | 15-68 | 63.2 | 1.3e−16 | Ribosomal |
| | | | | | | protein L23, N- |
| | | | | | | terminal dom |
| 1425 | DUF435 | 1/1 | 98-383 | 445.3 | 5.3e−130 | Membrane |
| | | | | | | protein of |
| | | | | | | unknown |
| | | | | | | function (D |
| 1427 | FeoB | 1/1 | 247-262 | 12.0 | 0.0065 | Ferrous iron |
| | | | | | | transport |
| | | | | | | protein B |
| 1427 | MMR_HSR1 | 1/1 | 118-393 | 172.0 | 9.9e−48 | GTPase of |
| | | | | | | unknown |
| | | | | | | function |
| 1429 | Peptidase_C13 | 1/1 | 6-327 | 698.1 | 4.2e−206 | Peptidase C13 |
| | | | | | | family |
| 1430 | ER_lumen_recept | 1/1 | 1-202 | 527.3 | 1.1e−154 | ER lumen |
| | | | | | | protein |
| | | | | | | retaining |
| | | | | | | receptor |
| 1431 | COLFI | 1/1 | 1149-1365 | 538.4 | 6.8e−210 | Fibrillar |
| | | | | | | collagen C- |
| | | | | | | terminal domain |
| 1431 | Collagen | 1/19 | 33-72 | 26.5 | 8.5e−06 | Collagen triple |
| | | | | | | helix repeat |
| | | | | | | (20 copies) |
| 1431 | Collagen | 10/19 | 529-567 | 30.1 | 8.6e−07 | Collagen triple |
| | | | | | | helix repeat |
| | | | | | | (20 copies) |
| 1431 | Collagen | 11/19 | 568-627 | 47.1 | 1.9e−11 | Collagen triple |
| | | | | | | helix repeat |
| | | | | | | (20 copies) |
| 1431 | Collagen | 12/19 | 628-687 | 49.2 | 4.9e−12 | Collagen triple |
| | | | | | | helix repeat |
| | | | | | | (20 copies) |
| 1431 | Collagen | 13/19 | 691-750 | 61.7 | 1.8e−15 | Collagen triple |
| | | | | | | helix repeat |
| | | | | | | (20 copies) |
| 1431 | Collagen | 14/19 | 751-810 | 45.7 | 4.5e−11 | Collagen triple |
| | | | | | | helix repeat |
| | | | | | | (20 copies) |
| 1431 | Collagen | 15/19 | 811-870 | 42.8 | 2.7e−10 | Collagen triple |
| | | | | | | helix repeat |
| | | | | | | (20 copies) |
| 1431 | Collagen | 16/19 | 874-933 | 60.0 | 5.3e−15 | Collagen triple |
| | | | | | | helix repeat |
| | | | | | | (20 copies) |
| 1431 | Collagen | 17/19 | 934-990 | 41.1 | 8.1e−10 | Collagen triple |
| | | | | | | helix repeat |
| | | | | | | (20 copies) |
| 1431 | Collagen | 18/19 | 991-1050 | 51.5 | 1.1e−12 | Collagen triple |
| | | | | | | helix repeat |
| | | | | | | (20 copies) |
| 1431 | Collagen | 19/19 | 1051-1105 | 40.4 | 1.3e−09 | Collagen triple |
| | | | | | | helix repeat |
| | | | | | | (20 copies) |
| 1431 | Collagen | 2/19 | 90-147 | 42.6 | 3.1e−10 | Collagen triple |
| | | | | | | helix repeat |
| | | | | | | (20 copies) |
| 1431 | Collagen | 3/19 | 148-207 | 59.9 | 5.6e−15 | Collagen triple |
| | | | | | | helix repeat |
| | | | | | | (20 copies) |
| 1431 | Collagen | 4/19 | 208-267 | 48.5 | 7.5e−12 | Collagen triple |
| | | | | | | helix repeat |
| | | | | | | (20 copies) |
| 1431 | Collagen | 5/19 | 268-327 | 52.4 | 6.6e−13 | Collagen triple |
| | | | | | | helix repeat |
| | | | | | | (20 copies) |
| 1431 | Collagen | 6/19 | 328-387 | 54.7 | 1.5e−13 | Collagen triple |
| | | | | | | helix repeat |
| | | | | | | (20 copies) |
| 1431 | Collagen | 7/19 | 388-415 | 19.4 | 0.00075 | Collagen triple |
| | | | | | | helix repeat |
| | | | | | | (20 copies) |
| 1431 | Collagen | 8/19 | 418-465 | 40.7 | 1.1e−09 | Collagen triple |
| | | | | | | helix repeat |
| | | | | | | (20 copies) |
| 1431 | Collagen | 9/19 | 469-528 | 55.6 | 8.3e−14 | Collagen triple |
| | | | | | | helix repeat |
| | | | | | | (20 copies) |
| 1432 | DJ-1_PfpI | 1/1 | 4-173 | 203.7 | 1.7e−57 | DJ-1/PfpI |
| | | | | | | family |
| 1433 | Gastrin | 1/1 | 2-115 | 198.2 | 1.3e−55 | Gastrin/cholecy |
| | | | | | | stokinin family |
| 1435 | LRR | 1/7 | 41-63 | 14.2 | 0.038 | Leucine Rich |
| | | | | | | Repeat |
| 1435 | LRR | 2/7 | 64-86 | 13.8 | 0.049 | Leucine Rich |
| | | | | | | Repeat |
| 1435 | LRR | 3/7 | 87-109 | 11.7 | 0.19 | Leucine Rich |
| | | | | | | Repeat |
| 1435 | LRR | 4/7 | 110-134 | 13.6 | 0.055 | Leucine Rich |
| | | | | | | Repeat |
| 1435 | LRR | 5/7 | 135-157 | 15.6 | 0.015 | Leucine Rich |
| | | | | | | Repeat |
| 1435 | LRR | 6/7 | 158-180 | 13.4 | 0.061 | Leucine Rich |
| | | | | | | Repeat |
| 1435 | LRR | 7/7 | 181-203 | 17.7 | 0.0039 | Leucine Rich |
| | | | | | | Repeat |
| 1436 | DUF435 | 1/1 | 62-348 | 516.0 | 2.7e−151 | Membrane |
| | | | | | | protein of |
| | | | | | | unknown |
| | | | | | | function |
| | | | | | | (DUF435 |
| 1437 | asp | 1/1 | 39-427 | 645.9 | 2.2e−190 | Eukaryotic |
| | | | | | | aspartyl |
| | | | | | | protease |
| 1438 | Clq | 1/1 | 123-247 | 251.9 | 8.8e−72 | Clq domain |
| 1438 | Collagen | 1/2 | 33-68 | 27.2 | 5.4e−06 | Collagen triple |
| | | | | | | helix repeat |
| | | | | | | (20 copies) |
| 1438 | Collagen | 2/2 | 69-114 | 24.2 | 3.5e−05 | Collagen triple |
| | | | | | | helix repeat |
| | | | | | | (20 copies) |
| 1439 | ras | 1/1 | 7-193 | 319.3 | 9.6e−94 | Ras family |
| 1440 | Rho_GDI | 1/1 | 1-201 | 502.6 | 3e−147 | RHO protein GDP |
| | | | | | | dissociation |
| | | | | | | inhibitor |
| 1441 | Clathrin_lg_ch | 1/2 | 3-162 | 294.2 | 1.7e−84 | Clathrin light |
| | | | | | | chain |
| 1441 | Clathrin_lg_ch | 2/2 | 163-217 | 124.0 | 2.7e−33 | Clathrin light |
| | | | | | | chain |
| 1441 | Myc-LZ | 1/1 | 98-130 | 8.4 | 0.85 | Myc leucine |
| | | | | | | zipper domain |
| 1443 | HMG_box | 1/2 | 6-79 | 63.4 | 3.4e−16 | HMG (high |
| | | | | | | mobility group) |
| | | | | | | box |
| 1443 | HMG_box | 2/2 | 95-163 | 129.7 | 5.5e−35 | HMG (high |
| | | | | | | mobility group) |
| | | | | | | box |
| 1444 | IBN_NT | 1/1 | 31-97 | 24.8 | 2.7e−05 | Importin-beta |
| | | | | | | N-terminal |
| | | | | | | domain |
| 1445 | EGF | 1/1 | 146−181 | 23.8 | 5.2e−05 | EGF-like domain |
| 1447 | Spermine_synth | 1/1 | 109-366 | 384.7 | 7e−116 | Spermine/spermidine |
| | | | | | | synthase |
| 1449 | ig | 1/1 | 34-116 | 14.2 | 0.029 | Immunoglobulin |
| | | | | | | domain |
| 1451 | Ribosomal_S6 | 1/1 | 3-96 | 17.8 | 0.00053 | Ribosomal |
| | | | | | | protein S6 |
| 1453 | Ribosomal_S17 | 1/1 | 75-145 | 149.1 | 4e−43 | Ribosomal |
| | | | | | | protein S17 |
| 1454 | DUF196 | 1/1 | 87-106 | 7.3 | 0.84 | Uncharacterized |
| | | | | | | ACR, COG1343 |
| 1454 | ras | 1/1 | 13-206 | 381.5 | 3e−112 | Ras family |
| 1455 | Folate_rec | 1/1 | 6-249 | 561.2 | 7e−165 | Folate receptor |
| | | | | | | family |
| 1458 | serpin | 1/1 | 139-498 | 455.7 | 4.5e−134 | Serpin (serine |
| | | | | | | protease |
| | | | | | | inhibitor) |
| 1459 | cytochrome_b_C | 1/1 | 258-359 | 152.3 | 8.2e−42 | Cytochrome b(C- |
| | | | | | | terminal)/b6/pe |
| | | | | | | tD |
| 1459 | cytochrome_b_N | 1/1 | 1-204 | 376.5 | 1e−115 | Cytochrome b(N- |
| | | | | | | terminal)/b6/pe |
| | | | | | | tB |
| 1460 | Ribosomal_L32e | 1/1 | 16-125 | 267.6 | 1.4e−83 | Ribosomal |
| | | | | | | protein L32 |
| 1462 | ECH | 1/1 | 68-248 | 150.0 | 2.2e−43 | Enoyl-CoA |
| | | | | | | hydratase/isomerase |
| | | | | | | family |
| 1463 | filament | 1/1 | 83-394 | 595.8 | 2.5e−175 | Intermediate |
| | | | | | | filament |
| | | | | | | protein |
| 1464 | DEAD | 1/2 | 15-62 | 52.1 | 4.7e−15 | DEAD/DEAH box |
| | | | | | | helicase |
| 1464 | DEAD | 2/2 | 281-444 | 93.8 | 7.2e−28 | DEAD/DEAH box |
| | | | | | | helicase |
| 1464 | SPRY | 1/1 | 130-246 | 121.0 | 2e−32 | SPRY domain |
| 1464 | helicase_C | 1/1 | 539-610 | 108.3 | 2.6e−29 | Helicase |
| | | | | | | conserved C- |
| | | | | | | terminal domain |
| 1465 | IGFBP | 1/1 | 37-94 | 13.4 | 0.017 | Insulin-like |
| | | | | | | growth factor |
| | | | | | | binding protein |
| 1465 | PDZ | 1/1 | 370-465 | 50.8 | 5.4e−13 | PDZ domain |
| | | | | | | (Also known as |
| | | | | | | DHR or GLGF) |
| 1465 | kazal | 1/1 | 109-155 | 29.4 | 8.9e−06 | Kazal-type |
| | | | | | | serine protease |
| | | | | | | inhibitor |
| | | | | | | domain |
| 1465 | trypsin | 1/1 | 205-364 | 74.5 | 7.7e−23 | Trypsin |
| 1466 | zf-CCHC | 1/7 | 4-21 | 32.6 | 3.4e−07 | Zinc knuckle |
| 1466 | zf-CCHC | 2/7 | 52-69 | 27.6 | 8.5e−06 | Zinc knuckle |
| 1466 | Zf-CCHC | 3/7 | 72-89 | 30.5 | 1.3e−06 | Zinc knuckle |
| 1466 | zf-CCHC | 4/7 | 96-113 | 31.8 | 5.4e−07 | Zinc knuckle |
| 1466 | zf-CCHC | 5/7 | 117-134 | 30.8 | 1.1e−06 | Zinc knuckle |
| 1466 | zf-CCHC | 6/7 | 135-152 | 28.2 | 5.8e−06 | Zinc knuckle |
| 1466 | zf-CCHC | 7/7 | 156-173 | 31.3 | 7.9e−07 | Zinc knuckle |
| 1467 | TIMP | 1/1 | 22-194 | 472.6 | 3.7e−172 | Tissue |
| | | | | | | inhibitor of |
| | | | | | | metalloproteinase |
| 1468 | efhand | 1/5 | 27-55 | 21.1 | 0.00061 | EF hand |
| 1468 | efhand | 3/5 | 94-122 | 31.9 | 6.3e−07 | EF hand |
| 1468 | efhand | 4/5 | 130-158 | 10.4 | 0.54 | EF hand |
| 1468 | efhand | 5/5 | 160-176 | 9.8 | 0.82 | EF hand |
| 1469 | KE2 | 1/1 | 23-130 | 128.8 | 1e−34 | KE2 family |
| | | | | | | protein |
| 1470 | Ribosomal_L11 | 1/1 | 161-229 | 106.5 | 5.2e−28 | Ribosomal |
| | | | | | | protein L11, |
| | | | | | | RNA binding do |
| 1470 | Ribosomal_L11_N | 1/1 | 98-156 | 93.4 | 1.1e−25 | Ribosomal |
| | | | | | | protein L11, N- |
| | | | | | | terminal dom |
| 1471 | Mov34 | 1/1 | 4-118 | 168.8 | 9.3e−47 | Mov34/MPN/PAD-1 |
| | | | | | | family |
| 1472 | Na_K-ATPase | 1/1 | 1-274 | 477.9 | 7.9e−140 | Sodium/ |
| | | | | | | potassium |
| | | | | | | ATPase beta |
| | | | | | | chain |
| 1475 | hexapep | 1/3 | 26-43 | 13.4 | 0.11 | Bacterial |
| | | | | | | transferase |
| | | | | | | hexapeptide |
| | | | | | | (four rep |
| 1475 | hexapep | 3/3 | 110-127 | 12.8 | 0.16 | Bacterial |
| | | | | | | transferase |
| | | | | | | hexapeptide |
| | | | | | | (four rep |
| 1476 | tubulin | 1/1 | 45-244 | 374.8 | 1.4e−109 | Tubulin/FtsZ |
| | | | | | | family, GTPase |
| | | | | | | domain |
| 1476 | tubulin_C | 1/1 | 246-383 | 270.9 | 1.7e−77 | Tubulin/FtsZ |
| | | | | | | family, C- |
| | | | | | | terminal domain |
| 1477 | Calpain_inhib | 1/5 | 53-183 | 179.0 | 1.5e−51 | Calpain |
| | | | | | | inhibitor |
| 1477 | Calpain_inhib | 2/5 | 186-317 | 197.8 | 4.3e−57 | Calpain |
| | | | | | | inhibitor |
| 1477 | Calpain_inhib | 3/5 | 323-460 | 221.0 | 6.8e−64 | Calpain |
| | | | | | | inhibitor |
| 1477 | Calpain_inhib | 4/5 | 466-597 | 233.3 | 1.6e−67 | Calpain |
| | | | | | | inhibitor |
| 1478 | DAD | 1/1 | 1-113 | 258.5 | 5.9e−88 | DAD family |
| 1479 | PSI | 1/1 | 514-542 | 13.0 | 0.0067 | Plexin repeat |
| 1479 | Sema | 1/1 | 55-496 | 841.8 | 2.3e−249 | Sema domain |
| 1479 | ig | 1/1 | 584-645 | 22.3 | 0.00017 | Immunoglobulin |
| | | | | | | domain |
| 1480 | Glyco_hydro_2 | 1/1 | 226-327 | 140.8 | 1.8e−43 | Glycosyl |
| | | | | | | hydrolases |
| | | | | | | family 2, |
| | | | | | | immunog |
| 1480 | Glyco_hydro_2_C | 1/1 | 329-631 | 597.7 | 6.8e−176 | Glycosyl |
| | | | | | | hydrolases |
| | | | | | | family 2, TIM |
| | | | | | | bar |
| 1480 | Glyco_hydro_2_N | 1/1 | 22-224 | 379.7 | 3e−110 | Glycosyl |
| | | | | | | hydrolases |
| | | | | | | family 2, sugar b |
| 1481 | F-box | 1/1 | 232-279 | 22.4 | 0.00033 | F-box domain |
| 1481 | WD40 | 1/5 | 359-395 | 17.5 | 0.0035 | WD domain, G- |
| | | | | | | beta repeat |
| 1481 | WD40 | 2/5 | 398-434 | 29.1 | 1.7e−06 | WD domain, G- |
| | | | | | | beta repeat |
| 1483 | ras | 1/1 | 12-169 | 221.6 | 9.4e−65 | Ras family |
| 1484 | MHC_II_beta | 1/1 | 40-116 | 164.6 | 1.7e−45 | Class II |
| | | | | | | histocompatibility |
| | | | | | | antigen, |
| 1484 | ig | 1/1 | 136-201 | 40.6 | 1.4e−09 | Immunoglobulin |
| | | | | | | domain |
| 1486 | Gal-bind_lectin | 1/1 | 5-137 | 105.1 | 2.8e−29 | Galactoside- |
| | | | | | | binding lectin |
| 1487 | NAP | 1/1 | 75-348 | 644.5 | 5.8e−190 | Nucleosome |
| | | | | | | assembly |
| | | | | | | protein (NAP) |
| 1488 | serpin | 1/1 | 24-398 | 542.0 | 1.3e−159 | Serpin (serine |
| | | | | | | protease |
| | | | | | | inhibitor) |
| 1489 | SRCR | 1/1 | 27-124 | 129.9 | 2.4e−35 | Scavenger |
| | | | | | | receptor |
| | | | | | | cysteine-rich |
| | | | | | | domain |
| 1490 | Ribosomal_L3 | 1/1 | 50-348 | 664.8 | 4.5e−196 | Ribosomal |
| | | | | | | protein L3 |
| 1491 | tubulin | 1/1 | 49-246 | 376.0 | 6.1e−110 | Tubulin/FtsZ |
| | | | | | | family, GTPase |
| | | | | | | domain |
| 1491 | tubulin_C | 1/1 | 248-393 | 270.6 | 2e−77 | Tubulin/FtsZ |
| | | | | | | family, C- |
| | | | | | | terminal domain |
| 1493 | efhand | 1/2 | 127-155 | 27.6 | 9.5e−06 | EF hand |
| 1493 | efhand | 2/2 | 163-191 | 22.3 | 0.00029 | EF hand |
| 1494 | HEAT | 1/15 | 6-42 | 14.2 | 0.015 | HEAT repeat |
| 1494 | HEAT | 10/15 | 357-395 | 39.8 | 3.4e−10 | HEAT repeat |
| 1494 | HEAT | 11/15 | 396-434 | 32.3 | 6e−08 | HEAT repeat |
| 1494 | HEAT | 12/15 | 435-473 | 25.9 | 4.9e−06 | HEAT repeat |
| 1494 | HEAT | 13/15 | 474-512 | 30.3 | 2.3e−07 | HEAT repeat |
| 1494 | HEAT | 14/15 | 513-551 | 50.2 | 2.6e−13 | HEAT repeat |
| 1494 | HEAT | 2/15 | 43-80 | 24.1 | 1.6e−05 | HEAT repeat |
| 1494 | HEAT | 3/15 | 82-119 | 26.3 | 3.8e−06 | HEAT repeat |
| 1494 | HEAT | 4/15 | 120-157 | 23.0 | 3.5e−05 | HEAT repeat |
| 1494 | HEAT | 5/15 | 158-196 | 44.6 | 1.3e−11 | HEAT repeat |
| 1494 | HEAT | 6/15 | 197-235 | 40.9 | 1.7e−10 | HEAT repeat |
| 1494 | HEAT | 7/15 | 236-274 | 33.5 | 2.6e−08 | HEAT repeat |
| 1494 | HEAT | 8/15 | 275-313 | 47.4 | 1.9e−12 | HEAT repeat |
| 1494 | HEAT | 9/15 | 318-356 | 28.7 | 6.9e−07 | HEAT repeat |
| 1495 | ATP1G1_PLM_MAT8 | 1/1 | 133-177 | 70.5 | 1.7e−20 | ATP1G1/PLM/MAT8 |
| | | | | | | family |
| 1496 | PMP22_Claudin | 1/1 | 1-160 | 297.8 | 1.3e−85 | PMP- |
| | | | | | | 22/EMP/MP20/Claudin |
| | | | | | | family |
| 1497 | BAH | 1/2 | 755-880 | 142.7 | 6.4e−39 | BAH domain |
| 1497 | BAH | 2/2 | 966-1100 | 137.6 | 2.2e−37 | BAH domain |
| 1497 | DNA_methylase | 1/3 | 1139-1230 | 54.6 | 2.8e−14 | C-5 cytosine- |
| | | | | | | specific DNA |
| | | | | | | methylase |
| 1497 | DNA_methylase | 2/3 | 1258-1317 | 31.7 | 6.7e−08 | C-5 cytosine- |
| | | | | | | specific DNA |
| | | | | | | methylase |
| 1497 | DNA_methylase | 3/3 | 1519-1594 | 69.5 | 2.1e−18 | C-5 cytosine- |
| | | | | | | specific DNA |
| | | | | | | methylase |
| 1497 | zf-CXXC | 1/1 | 645-691 | 87.4 | 6.3e−36 | CXXC zinc |
| | | | | | | finger |
| 1498 | Adrenomedullin | 1/1 | 21-185 | 433.5 | 1.9e−126 | Adrenomedullin |
| 1499 | S_100 | 1/1 | 5-45 | 60.9 | 1.1e−15 | S-100/ICaBP |
| | | | | | | type calcium |
| | | | | | | binding domain |
| 1499 | efhand | 2/2 | 51-79 | 11.2 | 0.34 | EF hand |
| 1500 | PMP22_Claudin | 1/1 | 3-180 | 162.7 | 6.9e−46 | PMP- |
| | | | | | | 22/EMP/MP20/Claudin |
| | | | | | | family |
| 1501 | PNPase | 1/1 | 18-28 | 7.2 | 0.065 | Polyribonucleotide |
| | | | | | | nucleotidyltransferase, |
| 1501 | RNase_PH | 1/1 | 31-166 | 125.2 | 9.5e−35 | 3′ |
| | | | | | | exoribonuclease |
| | | | | | | family, domain 1 |
| 1501 | RNase_PH_C | 1/1 | 191-258 | 42.4 | 1.1e−10 | 3′ |
| | | | | | | exoribonuclease |
| | | | | | | family, domain 2 |
| 1502 | WD40 | 1/4 | 42-80 | 35.1 | 3.6e−08 | WD domain, G- |
| | | | | | | beta repeat |
| 1502 | WD40 | 2/4 | 132-170 | 24.2 | 4.4e−05 | WD domain, G- |
| | | | | | | beta repeat |
| 1503 | homeobox | 1/1 | 19-69 | 14.4 | 0.085 | Homeobox domain |
| 1504 | Fe-ADH | 1/2 | 4-205 | 121.3 | 4.4e−34 | Iron-containing |
| | | | | | | alcohol |
| | | | | | | dehydrogenase |
| 1504 | Fe-ADH | 2/2 | 228-290 | 64.2 | 1.3e−17 | Iron-containing |
| | | | | | | alcohol |
| | | | | | | dehydrogenase |
| 1505 | Ribosomal_L37ae | 1/1 | 2-92 | 223.3 | 3.5e−63 | Ribosomal L37ae |
| | | | | | | protein family |
| 1506 | HATPase_c | 1/1 | 35-188 | 64.9 | 4.5e−17 | Histidine |
| | | | | | | kinase-, DNA |
| | | | | | | gyrase B-, and |
| | | | | | | HSP90 |
| 1506 | HSP90 | 1/1 | 191-724 | 1284.2 | 0 | Hsp90 protein |
| 1507 | annexin | 1/4 | 35-102 | 88.7 | 1.2e−22 | Annexin |
| 1507 | annexin | 2/4 | 107-174 | 129.7 | 5.3e−35 | Annexin |
| 1507 | annexin | 3/4 | 191-259 | 65.5 | 2.8e−16 | Annexin |
| 1507 | annexin | 4/4 | 267-334 | 108.4 | 1.3e−28 | Annexin |
| 1508 | Ribosomal_L31e | 1/1 | 16-110 | 230.5 | 2.5e−71 | Ribosomal |
| | | | | | | protein L31e |
| 1509 | Glyco_hydro_20 | 1/1 | 200-518 | 724.9 | 3.6e−214 | Glycosyl |
| | | | | | | hydrolase |
| | | | | | | family 20, |
| | | | | | | catalyt |
| 1509 | Glyco_hydro_20b | 1/1 | 68-198 | 245.7 | 6.3e−70 | Glycosyl |
| | | | | | | hydrolase |
| | | | | | | family 20, |
| | | | | | | domain |
| 1510 | proteasome | 1/1 | 50-237 | 183.3 | 2.9e−51 | Proteasome A- |
| | | | | | | type and B-type |
| 1511 | CBS | 1/2 | 112-168 | 30.4 | 1.4e−06 | CBS domain |
| 1511 | CBS | 2/2 | 179-232 | 41.4 | 1.4e−09 | CBS domain |
| 1511 | FMN_dh | 1/1 | 358-387 | 15.5 | 0.00086 | FMN-dependent |
| | | | | | | dehydrogenase |
| 1511 | IMPDH | 1/1 | 20-514 | 683.5 | 1e−201 | IMP |
| | | | | | | dehydrogenase/ |
| | | | | | | GMP reductase |
| 1511 | NPD | 2/2 | 359-397 | 15.5 | 0.0008 | 1/2 52 |
| | | | | | | 91..140 |
| 1512 | Phage_terminase | 1/1 | 44-71 | 3.9 | 0.92 | Phage Terminase |
| 1513 | LRR | 2/2 | 232-256 | 13.7 | 0.05 | Leucine Rich |
| | | | | | | Repeat |
| 1513 | NTF2 | 1/2 | 326-362 | 27.6 | 3.3e−06 | Nuclear |
| | | | | | | transport |
| | | | | | | factor 2 (NTF2) |
| | | | | | | domain |
| 1513 | NTF2 | 2/2 | 397-476 | 36.9 | 9.3e−09 | Nuclear |
| | | | | | | transport |
| | | | | | | factor 2 (NTF2) |
| | | | | | | domain |
| 1513 | TAP_C | 1/1 | 496-559 | 141.0 | 3.9e−39 | TAP C-terminal |
| | | | | | | domain |
| 1514 | CH | 1/1 | 800-905 | 110.2 | 4e−29 | Calponin |
| | | | | | | homology (CH) |
| | | | | | | domain |
| 1515 | ig | 1/1 | 34-115 | 12.6 | 0.079 | Immunoglobulin |
| | | | | | | domain |
| 1516 | synaptobrevin | 1/1 | 2-90 | 118.1 | 1.1e−31 | Synaptobrevin |
| 1517 | zf-MYND | 1/1 | 11-34 | 9.7 | 0.079 | MYND finger |
| 1518 | FAD_binding_6 | 1/1 | 48-155 | 199.9 | 4.1e−56 | Oxidoreductase |
| | | | | | | FAD-binding |
| | | | | | | domain |
| 1518 | NAD_binding_1 | 1/1 | 176-290 | 160.8 | 1.8e−44 | Oxidoreductase |
| | | | | | | NAD-binding |
| | | | | | | domain |
| 1519 | HSP70 | 1/1 | 6-612 | 1407.8 | 0 | Hsp70 protein |
| 1520 | Glyco_hydro_20 | 1/1 | 167-489 | 702.5 | 2e−207 | Glycosyl |
| | | | | | | hydrolase |
| | | | | | | family 20, |
| | | | | | | catalyt |
| 1520 | Glyco_hydro_20b | 1/1 | 35-165 | 215.6 | 7.6e−61 | Glycosyl |
| | | | | | | hydrolase |
| | | | | | | family 20, |
| | | | | | | domain |
| 1521 | rrm | 1/2 | 64-123 | 79.5 | 6e−22 | RNA recognition |
| | | | | | | motif. (a.k.a. |
| | | | | | | RRM, RBD, or |
| 1521 | rrm | 2/2 | 143-207 | 51.8 | 8.7e−14 | RNA recognition |
| | | | | | | motif. (a.k.a. |
| | | | | | | RRM, RBD, or |
| 1522 | ferritin | 1/1 | 14-155 | 194.0 | 2.3e−54 | Ferritin-like |
| | | | | | | domain |
| 1523 | APG9 | 1/1 | 230-608 | 894.2 | 1.7e−268 | Autophagy |
| | | | | | | protein Apg9 |
| 1523 | Diphthamide_syn | 1/1 | 552-577 | 6.9 | 0.32 | Putative |
| | | | | | | diphthamide |
| | | | | | | synthesis |
| | | | | | | protei |
| 1524 | Ribosomal_S15 | 1/1 | 61-151 | 111.8 | 8.6e−31 | Ribosomal |
| | | | | | | protein S15 |
| 1525 | Herpes_HEPA | 1/1 | 10-24 | 3.4 | 0.86 | Herpesvirus DNA |
| | | | | | | helicase/primase |
| | | | | | | complex |
| 1525 | actin | 1/1 | 1-377 | 925.9 | 2.2e−281 | Actin |
| 1526 | aldo_ket_red | 1/1 | 7-296 | 529.8 | 9.4e−156 | Aldo/keto |
| | | | | | | reductase |
| | | | | | | family |
| 1527 | p450 | 1/1 | 48-488 | 355.7 | 1.2e−110 | Cytochrome P450 |
| 1528 | Metallophos | 1/1 | 199-461 | 70.5 | 1.4e−17 | Calcineurin- |
| | | | | | | like |
| | | | | | | phosphoesterase |
| 1529 | WD40 | 1/7 | 5-44 | 34.2 | 6.2e−08 | WD domain, G- |
| | | | | | | beta repeat |
| 1529 | WD40 | 2/7 | 53-91 | 46.5 | 2e−11 | WD domain, G- |
| | | | | | | beta repeat |
| 1529 | WD40 | 3/7 | 95-133 | 50.7 | 1.3e−12 | WD domain, G- |
| | | | | | | beta repeat |
| 1529 | WD40 | 4/7 | 138-178 | 40.3 | 1.2e−09 | WD domain, G- |
| | | | | | | beta repeat |
| 1529 | WD40 | 5/7 | 182-220 | 37.7 | 6.3e−09 | WD domain, G- |
| | | | | | | beta repeat |
| 1529 | WD40 | 6/7 | 224-260 | 22.5 | 0.00013 | WD domain, G- |
| | | | | | | beta repeat |
| 1529 | WD40 | 7/7 | 273-311 | 21.6 | 0.00024 | WD domain, G- |
| | | | | | | beta repeat |
| 1530 | Ribosomal_L7Ae | 1/1 | 20-114 | 114.8 | 7.2e−33 | Ribosomal |
| | | | | | | protein |
| | | | | | | L7Ae/L30e/S12e/ |
| | | | | | | Gadd4 |
| 1531 | cpn60_TCP1 | 1/1 | 32-524 | 583.9 | 9.7e−172 | TCP-1/cpn60 |
| | | | | | | chaperonin |
| | | | | | | family |
| 1532 | CUB | 1/2 | 23-138 | 79.9 | 2.7e−22 | CUB domain |
| 1532 | CUB | 2/2 | 193-302 | 160.5 | 5.2e−46 | CUB domain |
| 1532 | EGF | 1/1 | 161-189 | 17.9 | 0.0023 | EGF-like domain |
| 1532 | sushi | 2/3 | 309-371 | 45.5 | 2.8e−10 | Sushi domain |
| | | | | | | (SCR repeat) |
| 1532 | sushi | 3/3 | 376-447 | 50.7 | 1.2e−11 | Sushi domain |
| | | | | | | (SCR repeat) |
| 1532 | trypsin | 1/1 | 464-697 | 189.7 | 1.7e−59 | Trypsin |
| 1533 | CUB | 1/2 | 18-127 | 71.8 | 6.9e−20 | CUB domain |
| 1533 | CUB | 2/2 | 175-287 | 150.5 | 4.7e−43 | CUB domain |
| 1533 | EGF | 1/1 | 135-171 | 33.5 | 9.3e−08 | EGF-like domain |
| 1533 | sushi | 1/2 | 294-354 | 53.3 | 2.6e−12 | Sushi domain |
| | | | | | | (SCR repeat) |
| 1533 | sushi | 2/2 | 359-421 | 53.5 | 2.2e−12 | Sushi domain |
| | | | | | | (SCR repeat) |
| 1533 | trypsin | 1/1 | 438-675 | 217.2 | 3.1e−68 | Trypsin |
| 1534 | Ndr | 1/1 | 40-322 | 644.1 | 7.5e−190 | Ndr family |
| 1534 | abhydrolase | 1/2 | 95-178 | 11.7 | 0.013 | alpha/beta |
| | | | | | | hydrolase fold |
| 1535 | RrnaAD | 1/1 | 111-147 | 5.2 | 0.78 | Ribosomal RNA |
| | | | | | | adenine |
| | | | | | | dimethylase |
| 1535 | efhand | 1/4 | 12-40 | 39.6 | 4.8e−09 | EF hand |
| 1535 | efhand | 2/4 | 48-76 | 38.4 | 1e−08 | EF hand |
| 1535 | efhand | 3/4 | 85-113 | 42.1 | 9.8e−10 | EF hand |
| 1535 | efhand | 4/4 | 121-149 | 41.2 | 1.7e−09 | EF hand |
| 1536 | calreticulin | 1/1 | 21-332 | 774.0 | 2.2e−238 | Calreticulin |
| | | | | | | family |
| 1537 | S_100 | 1/1 | 5-48 | 88.6 | 1.2e−23 | S-100/ICaBP |
| | | | | | | type calcium |
| | | | | | | binding domain |
| 1537 | efhand | 1/1 | 54-82 | 17.2 | 0.0073 | EF hand |
| 1538 | UPAR_LY6 | 1/1 | 26-96 | 114.1 | 2.7e−30 | u-PAR/Ly-6 |
| | | | | | | domain |
| 1539 | Cys_knot | 1/1 | 22-130 | 187.9 | 1.7e−52 | Cystine-knot |
| | | | | | | domain |
| 1540 | Kunitz_BPTI | 1/3 | 54-104 | 88.8 | 9.4e−28 | Kunitz/Bovine |
| | | | | | | pancreatic |
| | | | | | | trypsin |
| | | | | | | inhibito |
| 1540 | Kunitz_BPTI | 2/3 | 125-175 | 88.2 | 1.5e−27 | Kunitz/Bovine |
| | | | | | | pancreatic |
| | | | | | | trypsin |
| | | | | | | inhibito |
| 1540 | Kunitz_BPTI | 3/3 | 217-267 | 90.8 | 2.1e−28 | Kunitz/Bovine |
| | | | | | | pancreatic |
| | | | | | | trypsin |
| | | | | | | inhibito |
| 1541 | Ribosomal_L13e | 1/1 | 7-185 | 463.8 | 1.4e−135 | Ribosomal |
| | | | | | | protein L13e |
| 1542 | GILT | 1/1 | 62-170 | 88.8 | 1.1e−22 | Gamma |
| | | | | | | interferon |
| | | | | | | inducible |
| | | | | | | lysosomal thiolr |
| 1543 | HSP20 | 1/1 | 60-162 | 164.4 | 2e−45 | Hsp20/alpha |
| | | | | | | crystallin |
| | | | | | | family |
| 1543 | crystallin | 1/1 | 1-59 | 136.2 | 3.7e−38 | Alpha |
| | | | | | | crystallin A |
| | | | | | | chain, N |
| | | | | | | terminal |
| 1544 | CK_II_beta | 1/1 | 5-183 | 508.1 | 6.6e−149 | Casein kinase |
| | | | | | | II regulatory |
| | | | | | | subunit |
| 1545 | fn1 | 1/12 | 81-116 | 64.8 | 1.2e−16 | Fibronectin |
| | | | | | | type I domain |
| 1545 | fn1 | 10/12 | 2204-2243 | 77.5 | 3e−20 | Fibronectin |
| | | | | | | type I domain |
| 1545 | fn1 | 11/12 | 2249-2286 | 72.3 | 9e−19 | Fibronectin |
| | | | | | | type I domain |
| 1545 | fn1 | 12/12 | 2293-2328 | 62.0 | 7.5e−16 | Fibronectin |
| | | | | | | type I domain |
| 1545 | fn1 | 2/12 | 126-164 | 73.9 | 3.1e−19 | Fibronectin |
| | | | | | | type I domain |
| 1545 | fn1 | 3/12 | 170-208 | 67.9 | 1.5e−17 | Fibronectin |
| | | | | | | type I domain |
| 1545 | fn1 | 4/12 | 215-254 | 80.4 | 4.5e−21 | Fibronectin |
| | | | | | | type I domain |
| 1545 | fn1 | 5/12 | 260-299 | 76.9 | 4.4e−20 | Fibronectin |
| | | | | | | type I domain |
| 1545 | fn1 | 6/12 | 337-371 | 51.4 | 7.8e−13 | Fibronectin |
| | | | | | | type I domain |
| 1545 | fn1 | 7/12 | 499-537 | 77.0 | 4.2e−20 | Fibronectin |
| | | | | | | type I domain |
| 1545 | fn1 | 8/12 | 547-584 | 63.8 | 2.3e−16 | Fibronectin |
| | | | | | | type I domain |
| 1545 | fn1 | 9/12 | 590-628 | 71.3 | 1.7e−18 | Fibronectin |
| | | | | | | type I domain |
| 1545 | fn2 | 1/2 | 389-430 | 94.2 | 7.6e−35 | Fibronectin |
| | | | | | | type II domain |
| 1545 | fn2 | 2/2 | 449-490 | 100.1 | 4.1e−37 | Fibronectin |
| | | | | | | type II domain |
| 1545 | fn3 | 1/16 | 637-720 | 53.0 | 7.5e−14 | Fibronectin |
| | | | | | | type III domain |
| 1545 | fn3 | 10/16 | 1477-1559 | 101.6 | 7e−28 | Fibronectin |
| | | | | | | type III domain |
| 1545 | fn3 | 11/16 | 1571-1650 | 81.6 | 4.1e−22 | Fibronectin |
| | | | | | | type III domain |
| 1545 | fn3 | 12/16 | 1661-1740 | 62.3 | 1.5e−16 | Fibronectin |
| | | | | | | type III domain |
| 1545 | fn3 | 13/16 | 1751-1830 | 79.0 | 2.3e−21 | Fibronectin |
| | | | | | | type III domain |
| 1545 | fn3 | 14/16 | 1843-1921 | 83.0 | 1.7e−22 | Fibronectin |
| | | | | | | type III domain |
| 1545 | fn3 | 15/16 | 1932-2011 | 92.8 | 2.4e−25 | Fibronectin |
| | | | | | | type III domain |
| 1545 | fn3 | 16/16 | 2102-2179 | 31.5 | 1.2e−07 | Fibronectin |
| | | | | | | type III domain |
| 1545 | fn3 | 2/16 | 749-829 | 59.7 | 8.8e−16 | Fibronectin |
| | | | | | | type III domain |
| 1545 | fn3 | 3/16 | 840-918 | 96.0 | 2.8e−26 | Fibronectin |
| | | | | | | type III domain |
| 1545 | fn3 | 4/16 | 936-1015 | 84.6 | 5.8e−23 | Fibronectin |
| | | | | | | type III domain |
| 1545 | fn3 | 5/16 | 1026-1104 | 80.6 | 8.3e−22 | Fibronectin |
| | | | | | | type III domain |
| 1545 | fn3 | 6/16 | 1125-1191 | 32.6 | 5.9e−08 | Fibronectin |
| | | | | | | type III domain |
| 1545 | fn3 | 7/16 | 1203-1285 | 74.5 | 4.7e−20 | Fibronectin |
| | | | | | | type III domain |
| 1545 | fn3 | 8/16 | 1296-1376 | 82.9 | 1.8e−22 | Fibronectin |
| | | | | | | type III domain |
| 1545 | fn3 | 9/16 | 1387-1466 | 86.1 | 2.2e−23 | Fibronectin |
| | | | | | | type III domain |
| 1546 | p450 | 1/1 | 52-511 | 482.4 | 2.7e−150 | Cytochrome P450 |
| 1548 | GTP_EFTU | 1/1 | 5-239 | 376.4 | 2.9e−109 | Elongation |
| | | | | | | factor Tu GTP |
| | | | | | | binding domain |
| 1548 | GTP_EFTU_D2 | 1/1 | 251-327 | 100.6 | 8e−27 | Elongation |
| | | | | | | factor Tu |
| | | | | | | domain 2 |
| 1548 | GTP_EFTU_D3 | 1/1 | 333-442 | 213.3 | 3.5e−60 | Elongation |
| | | | | | | factor Tu C- |
| | | | | | | terminal domain |
| 1549 | fibrinogen_C | 1/1 | 175-415 | 532.0 | 4.2e−156 | Fibrinogen beta |
| | | | | | | and gamma |
| | | | | | | chains, C-t |
| 1550 | PX | 1/1 | 65-178 | 106.7 | 4.6e−28 | PX domain |
| 1551 | lectin_c | 1/1 | 114-222 | 48.8 | 2.9e−11 | Lectin C-type |
| | | | | | | domain |
| 1552 | lipocalin | 1/1 | 32-178 | 129.6 | 1.8e−36 | Lipocalin/ |
| | | | | | | cytosolic |
| | | | | | | fatty-acid |
| | | | | | | binding pr |
| 1553 | enolase | 1/1 | 142-432 | 717.1 | 8.3e−212 | Enolase, C- |
| | | | | | | terminal TIM |
| | | | | | | barrel domain |
| 1553 | enolase_N | 1/1 | 2-134 | 280.0 | 3.1e−80 | Enolase, N- |
| | | | | | | terminal domain |
| 1554 | p450 | 1/1 | 44-498 | 543.8 | 1.6e−169 | Cytochrome P450 |
| 1555 | Ribosomal_S3Ae | 1/1 | 12-222 | 518.5 | 5e−152 | Ribosomal S3Ae |
| | | | | | | family |
| 1556 | ldl_recept_a | 1/3 | 34-61 | 24.8 | 5.7e−06 | Low-density |
| | | | | | | lipoprotein |
| | | | | | | receptor domain |
| 1556 | ldl_recept_a | 3/3 | 105-141 | 45.1 | 3.8e−12 | Low-density |
| | | | | | | lipoprotein |
| | | | | | | receptor domain |
| 1557 | Glyco_hydro_31 | 1/1 | 194-918 | 1402.0 | 0 | Glycosyl |
| | | | | | | hydrolases |
| | | | | | | family 31 |
| 1557 | trefoil | 1/1 | 81-130 | 53.4 | 2.2e−13 | Trefoil (P- |
| | | | | | | type) domain |
| 1558 | globin | 1/1 | 3-147 | 218.1 | 1.3e−61 | Globin |
| 1559 | ANATO | 1/1 | 96-102 | 5.5 | 0.18 | Anaphylotoxin- |
| | | | | | | like domain |
| 1559 | fn3 | 3/4 | 429-516 | 13.0 | 0.027 | Fibronectin |
| | | | | | | type III domain |
| 1559 | fn3 | 4/4 | 527-609 | 33.7 | 2.8e−08 | Fibronectin |
| | | | | | | type III domain |
| 1560 | IGFBP | 1/1 | 40-99 | 97.4 | 2e−26 | Insulin-like |
| | | | | | | growth factor |
| | | | | | | binding pr |
| 1560 | thyroglobulin_1 | 1/1 | 213-285 | 119.6 | 5.9e−32 | Thyroglobulin |
| | | | | | | type-1 repeat |
| 1561 | IGFBP | 1/1 | 30-89 | 86.8 | 2.1e−23 | Insulin-like |
| | | | | | | growth factor |
| | | | | | | binding pr |
| 1561 | thyroglobulin_1 | 1/1 | 176-251 | 144.3 | 2.1e−39 | Thyroglobulin |
| | | | | | | type-1 repeat |
| 1562 | histone | 1/1 | 17-135 | 100.3 | 3.6e−27 | Core histone |
| | | | | | | H2A/H2B/H3/H4 |
| 1563 | MHC_I | 1/1 | 22-200 | 473.5 | 1.7e−138 | Class I |
| | | | | | | Histocompatibility |
| | | | | | | antigen, |
| | | | | | | domains |
| 1563 | ig | 1/1 | 217-282 | 36.6 | 1.7e−08 | Immunoglobulin |
| | | | | | | domain |
| 1564 | AT_hook | 1/1 | 244-256 | 12.0 | 0.12 | AT hook motif |
| 1564 | Ets | 1/1 | 272-357 | 127.6 | 8.8e−35 | Ets-domain |
| 1564 | SAM_PNT | 1/1 | 48-132 | 123.5 | 4.9e−35 | Sterile alpha |
| | | | | | | motif |
| | | | | | | (SAM)/Pointed |
| | | | | | | domain |
| 1565 | MHC_I | 1/1 | 25-203 | 481.8 | 5.6e−141 | Class I |
| | | | | | | Histocompatibility |
| | | | | | | antigen, |
| | | | | | | domains |
| 1565 | ig | 1/1 | 220-285 | 33.3 | 1.4e−07 | Immunoglobulin |
| | | | | | | domain |
| 1566 | ubiquitin | 1/2 | 3-78 | 28.4 | 2e−06 | Ubiquitin |
| | | | | | | family |
| 1566 | ubiquitin | 2/2 | 82-155 | 84.4 | 3.8e−22 | Ubiquitin |
| | | | | | | family |
| 1567 | C2 | 1/2 | 310-396 | 92.2 | 3.8e−25 | C2 domain |
| 1567 | C2 | 2/2 | 461-539 | 30.4 | 2.6e−07 | C2 domain |
| 1568 | EMP24_GP25L | 1/1 | 8-211 | 142.6 | 7.2e−39 | emp24/gp25L/p24 |
| | | | | | | family |
| 1569 | DSPc | 1/1 | 173-311 | 261.6 | 1.1e−74 | Dual |
| | | | | | | specificity |
| | | | | | | phosphatase, |
| | | | | | | catalytic |
| 1569 | Rhodanese | 1/1 | 9-131 | 92.1 | 6e−26 | Rhodanese-like |
| | | | | | | domain |
| 1569 | Y_phosphatase | 1/1 | 237-290 | 19.8 | 0.00013 | Protein- |
| | | | | | | tyrosine |
| | | | | | | phosphatase |
| 1570 | Ribosomal_S17e | 1/1 | 1-122 | 305.6 | 2.5e−95 | Ribosomal S17 |
| 1571 | proteasome | 1/1 | 29-215 | 145.9 | 1.4e−40 | Proteasome A- |
| | | | | | | type and B-type |
| 1572 | TCTP | 1/1 | 1-135 | 287.4 | 4.2e−87 | Translationally |
| | | | | | | controlled |
| | | | | | | tumor prot |
| 1573 | HATPase_c | 1/1 | 1-96 | 27.5 | 1.8e−06 | Histidine |
| | | | | | | kinase-, DNA |
| | | | | | | gyrase B-, and H |
| 1573 | HSP90 | 1/1 | 99-635 | 1270.1 | 0 | Hsp90 protein |
| 1574 | Alpha_adaptin_C | 1/1 | 226-237 | 6.3 | 0.25 | Alpha adaptin |
| | | | | | | AP2, C-terminal |
| | | | | | | domain |
| 1574 | Amino_oxidase | 1/1 | 23-460 | 326.9 | 2.3e−94 | Flavin |
| | | | | | | containing |
| | | | | | | amine |
| | | | | | | oxidoreductas |
| 1574 | DAO | 1/1 | 14-46 | 21.0 | 9.2e−05 | FAD dependent |
| | | | | | | oxidoreductase |
| 1574 | FAD_binding_3 | 1/1 | 16-48 | 31.1 | 7.2e−09 | FAD binding |
| | | | | | | domain |
| 1574 | GMC_oxred | 1/1 | 14-44 | 8.1 | 0.11 | GMC |
| | | | | | | oxidoreductase |
| 1574 | Thi4 | 1/1 | 15-45 | 14.8 | 0.00093 | Thi4 family |
| 1574 | TrkA-N | 1/1 | 15-43 | 13.2 | 0.037 | TrkA-N domain |
| 1574 | pyr_redox | 1/1 | 15-50 | 21.8 | 1.6e−05 | Pyridine |
| | | | | | | nucleotide- |
| | | | | | | disulphide |
| | | | | | | oxidor |
| 1575 | MHC_I | 1/1 | 25-203 | 482.4 | 3.5e−141 | Class I |
| | | | | | | Histocompatibility |
| | | | | | | antigen, |
| | | | | | | domains |
| 1575 | ig | 1/1 | 220-285 | 36.3 | 2.2e−08 | Immunoglobulin |
| | | | | | | domain |
| 1576 | MHC_II_alpha | 1/1 | 29-109 | 158.0 | 1.4e−46 | Class II |
| | | | | | | histocompatibility |
| | | | | | | antigen, |
| | | | | | | alp |
| 1576 | ig | 1/1 | 125-190 | 32.0 | 3.4e−07 | Immunoglobulin |
| | | | | | | domain |
| 1577 | NDK | 1/1 | 5-152 | 396.9 | 2e−115 | Nucleoside |
| | | | | | | diphosphate |
| | | | | | | kinase |
| 1578 | AAA | 1/1 | 140-157 | 12.4 | 0.01 | ATPase family |
| | | | | | | associated with |
| | | | | | | various ce |
| 1578 | ras | 1/2 | 140-154 | 14.4 | 0.0034 | Ras family |
| 1578 | ras | 2/2 | 213-321 | 96.7 | 1.2e−27 | Ras family |
| 1579 | Ribosomal_L10e | 1/1 | 1-176 | 465.4 | 3.7e−138 | Ribosomal L10 |
| 1580 | RHD | 1/1 | 18-186 | 416.3 | 6.5e−125 | Rel homology |
| | | | | | | domain (RHD) |
| 1580 | TIG | 1/1 | 194-289 | 80.1 | 4.5e−20 | IPT/TIG domain |
| 1581 | serpin | 1/1 | 28-402 | 583.7 | 5.8e−172 | Serpin (serine |
| | | | | | | protease |
| | | | | | | inhibitor) |
| 1582 | PCNA | 1/1 | 1-125 | 319.7 | 3.3e−92 | Proliferating |
| | | | | | | cell nuclear |
| | | | | | | antigen, N- |
| | | | | | | termin |
| 1582 | PCNA_C | 1/1 | 127-254 | 317.2 | 1.9e−91 | Proliferating |
| | | | | | | cell nuclear |
| | | | | | | antigen, C- |
| | | | | | | termin |
| 1583 | Herpes_glycop_D | 1/1 | 352-386 | 7.7 | 0.43 | Herpesvirus |
| | | | | | | glycoprotein D |
| 1583 | ig | 1/3 | 43-110 | 19.4 | 0.001 | Immunoglobulin |
| | | | | | | domain |
| 1583 | ig | 2/3 | 165-209 | 18.5 | 0.0018 | Immunoglobulin |
| | | | | | | domain |
| 1583 | ig | 3/3 | 251-328 | 26.9 | 8.5e−06 | Immunoglobulin |
| | | | | | | domain |
| 1584 | WD40 | 2/6 | 84-123 | 9.0 | 0.94 | WD domain, G- |
| | | | | | | beta repeat |
| 1585 | ig | 1/4 | 85-121 | 10.1 | 0.39 | Immunoglobulin |
| | | | | | | domain |
| 1585 | ig | 3/4 | 255-312 | 16.3 | 0.0076 | Immunoglobulin |
| | | | | | | domain |
| 1585 | ig | 4/4 | 347-396 | 32.3 | 2.7e−07 | Immunoglobulin |
| | | | | | | domain |
| 1586 | lipocalin | 1/1 | 4-134 | 110.6 | 6e−31 | Lipocalin/ |
| | | | | | | cytosolic |
| | | | | | | fatty-acid |
| | | | | | | binding pr |
| 1587 | Grp1_Fun34_YaaH | 1/1 | 557-575 | 6.3 | 0.3 | GPR1/FUN34/yaaH |
| | | | | | | family |
| 1587 | IGA1 | 1/1 | 63-81 | 5.6 | 0.59 | Immunoglobulin |
| | | | | | | A1 protease |
| 1587 | ig | 1/4 | 35-85 | 13.5 | 0.043 | Immunoglobulin |
| | | | | | | domain |
| 1587 | ig | 2/4 | 217-280 | 31.4 | 4.9e−07 | Immunoglobulin |
| | | | | | | domain |
| 1587 | ig | 4/4 | 412-487 | 22.3 | 0.00016 | Immunoglobulin |
| | | | | | | domain |
| 1587 | pkinase | 1/1 | 582-910 | 253.7 | 2.5e−72 | Protein kinase |
| | | | | | | domain |
| 1588 | RNA_pol_Rpb7_N | 1/1 | 1-77 | 135.3 | 2.5e−39 | RNA polymerase |
| | | | | | | Rpb7, N- |
| | | | | | | terminal domain |
| 1588 | S1 | 1/1 | 78-161 | 69.4 | 1.4e−17 | S1 RNA binding |
| | | | | | | domain |
| 1590 | GATase | 1/1 | 204-249 | 8.3 | 0.33 | Glutamine |
| | | | | | | amidotransferase |
| | | | | | | class-I |
| 1591 | Ribosomal_S2 | 1/1 | 18-186 | 340.5 | 1.8e−98 | Ribosomal |
| | | | | | | protein S2 |
| 1592 | Gelsolin | 1/6 | 76-126 | 64.7 | 6.4e−17 | Gelsolin repeat |
| 1592 | Gelsolin | 2/6 | 198-238 | 70.6 | 1.3e−18 | Gelsolin repeat |
| 1592 | Gelsolin | 3/6 | 314-356 | 62.2 | 3.2e−16 | Gelsolin repeat |
| 1592 | Gelsolin | 4/6 | 453-504 | 73.6 | 1.7e−19 | Gelsolin repeat |
| 1592 | Gelsolin | 5/6 | 576-616 | 42.9 | 1.1e−10 | Gelsolin repeat |
| 1592 | Gelsolin | 6/6 | 679-721 | 63.4 | 1.5e−16 | Gelsolin repeat |
| 1593 | ion_trans | 1/1 | 239-410 | 59.6 | 5.4e−15 | Ion transport |
| | | | | | | protein |
| 1594 | ig | 1/2 | 148-206 | 24.5 | 4.1e−05 | Immunoglobulin |
| | | | | | | domain |
| 1594 | ig | 2/2 | 256-310 | 25.3 | 2.4e−05 | Immunoglobulin |
| | | | | | | domain |
| 1595 | DUF258 | 1/1 | 15-30 | 6.4 | 0.79 | Protein of |
| | | | | | | unknown |
| | | | | | | function, |
| | | | | | | DUF258 |
| 1595 | ras | 1/1 | 13-218 | 366.4 | 9.7e−108 | Ras family |
| 1596 | Exonuc_V_gamma | 1/1 | 187-229 | 5.0 | 0.51 | Exodeoxyribonuclease |
| | | | | | | V, gamma |
| | | | | | | subunit |
| 1596 | Ribosomal_S6e | 1/1 | 1-127 | 312.1 | 6.7e−90 | Ribosomal |
| | | | | | | protein S6e |
| 1597 | IL8 | 1/1 | 23-90 | 47.3 | 6.7e−12 | Small cytokines |
| | | | | | | (intecrine/chemokine), |
| | | | | | | inter |
| 1598 | Exo_endo_phos | 1/1 | 8-237 | 141.2 | 1.9e−38 | Endonuclease/Exonuclease/ |
| | | | | | | phosphatase |
| | | | | | | fa |
| 1598 | rvt | 1/1 | 508-773 | 263.0 | 3.9e−75 | Reverse |
| | | | | | | transcriptase |
| | | | | | | (RNA-dependent |
| | | | | | | DN |
| 1599 | Mov34 | 1/1 | 26-139 | 173.8 | 2.9e−48 | Mov34/MPN/PAD-1 |
| | | | | | | family |
| 1600 | histone | 1/1 | 19-137 | 100.3 | 3.6e−27 | Core histone |
| | | | | | | H2A/H2B/H3/H4 |
| 1601 | 2-Hacid_DH | 1/1 | 44-137 | 133.7 | 2.6e−36 | D-isomer |
| | | | | | | specific 2- |
| | | | | | | hydroxyacid |
| | | | | | | dehydrog |
| 1601 | 2-Hacid_DH_C | 1/1 | 139-320 | 199.8 | 4.1e−81 | D-isomer |
| | | | | | | specific 2- |
| | | | | | | hydroxyacid |
| | | | | | | dehydrog |
| 1601 | PDH | 1/1 | 187-213 | 8.1 | 0.35 | Prephenate |
| | | | | | | dehydrogenase |
| 1602 | GST_C | 1/1 | 127-217 | 11.9 | 0.048 | Glutathione S- |
| | | | | | | transferase, C- |
| | | | | | | terminal |
| 1603 | proteasome | 1/1 | 31-217 | 238.3 | 1.1e−67 | Proteasome A- |
| | | | | | | type and B-type |
| 1604 | Ribosomal_S8 | 1/1 | 5-130 | 192.1 | 6.6e−58 | Ribosomal |
| | | | | | | protein S8 |
| 1605 | PAE | 1/1 | 17-102 | 7.4 | 0.2 | Pectinacetylest |
| | | | | | | erase |
| 1606 | PCI | 1/1 | 328-408 | 80.5 | 7.2e−22 | PCI domain |
| 1607 | Ribosomal_L6e | 1/1 | 181-288 | 251.0 | 8e−73 | Ribosomal |
| | | | | | | protein L6e |
| 1607 | Ribosomal_L6e_N | 1/1 | 34-96 | 128.0 | 1.2e−36 | Ribosomal |
| | | | | | | protein L6, N- |
| | | | | | | terminal doma |
| 1608 | EF1G_domain | 1/1 | 275-381 | 303.5 | 2.3e−87 | Elongation |
| | | | | | | factor 1 gamma, |
| | | | | | | conserved dom |
| 1608 | GST_C | 1/1 | 86-198 | 113.3 | 8.8e−31 | Glutathione S- |
| | | | | | | transferase, C- |
| | | | | | | terminal do |
| 1608 | GST_N | 1/1 | 1-81 | 89.1 | 1.9e−24 | Glutathione S- |
| | | | | | | transferase, N- |
| | | | | | | terminal do |
| 1609 | CH | 1/1 | 25-138 | 75.3 | 2e−19 | Calponin |
| | | | | | | homology (CH) |
| | | | | | | domain |
| 1609 | calponin | 1/1 | 175-200 | 51.8 | 1.7e−14 | Calponin family |
| | | | | | | repeat |
| 1610 | E7 | 1/1 | 1561-1570 | 6.3 | 0.41 | E7 protein, |
| | | | | | | Early protein |
| 1610 | Glyco_hydro_16 | 1/1 | 1773-1802 | 9.3 | 0.15 | Glycosyl |
| | | | | | | hydrolases |
| | | | | | | family 16 |
| 1610 | Mov34 | 1/1 | 2099-2205 | 99.9 | 5e−26 | Mov34/MPN/PAD-1 |
| | | | | | | family |
| 1610 | toxin_3 | 1/2 | 955-973 | 8.9 | 0.15 | |
| 1611 | ATP-bind | 1/1 | 488-526 | 6.9 | 0.49 | Conserved |
| | | | | | | hypothetical |
| | | | | | | ATP binding |
| | | | | | | protei |
| 1611 | Ku_C | 1/1 | 471-559 | 143.1 | 4.9e−39 | Ku70/Ku80 C- |
| | | | | | | terminal arm |
| 1611 | Ku_N | 1/1 | 37-256 | 337.7 | 1.3e−97 | Ku70/Ku80 N- |
| | | | | | | terminal |
| | | | | | | alpha/beta |
| | | | | | | domain |
| 1611 | SAP | 1/1 | 573-607 | 39.5 | 1.5e−09 | SAP domain |
| 1611 | ku | 1/1 | 261-468 | 296.2 | 2.7e−92 | Ku70/Ku80 beta- |
| | | | | | | barrel domain |
| 1612 | Nop | 1/1 | 197-345 | 201.6 | 1.2e−56 | Putative snoRNA |
| | | | | | | binding domain |
| 1614 | 3Beta_HSD | 1/2 | 5-26 | 8.8 | 0.15 | 3-beta |
| | | | | | | hydroxysteroid |
| | | | | | | dehydrogenase/i |
| 1614 | 3Beta_HSD | 2/2 | 84-135 | 8.4 | 0.18 | 3-beta |
| | | | | | | hydroxysteroid |
| | | | | | | dehydrogenase/i |
| 1614 | Epimerase | 1/1 | 5-341 | 499.3 | 3e−146 | NAD dependent |
| | | | | | | epimerase/dehydratase f |
| 1614 | adh_short | 1/1 | 1-33 | 11.7 | 0.029 | short chain |
| | | | | | | dehydrogenase |
| 1616 | ATP-synt_C | 1/1 | 67-135 | 107.9 | 1.9e−28 | ATP synthase |
| | | | | | | subunit C |
| 1618 | Flavi_NS2A | 1/1 | 332-354 | 8.3 | 0.74 | Flavivirus non- |
| | | | | | | structural |
| | | | | | | protein NS2A |
| 1618 | Lamp | 1/1 | 1-354 | 612.3 | 2.8e−180 | Lysosome- |
| | | | | | | associated |
| | | | | | | membrane |
| | | | | | | glycoprote |
| 1618 | Peptidase_M50 | 1/1 | 3-341 | 6.7 | 0.82 | Peptidase |
| | | | | | | family M50 |
| 1619 | A4_EXTRA | 1/1 | 42-204 | 413.4 | 2e−209 | Amyloid A4 |
| | | | | | | extracellular |
| | | | | | | domain |
| 1619 | Coprogen_oxidas | 1/1 | 164-182 | 5.4 | 0.13 | Coproporphyrinogen |
| | | | | | | III oxidase |
| 1619 | Kunitz_BPTI | 1/1 | 310-360 | 95.4 | 6.6e−30 | Kunitz/Bovine |
| | | | | | | pancreatic |
| | | | | | | trypsin inhi |
| 1620 | Ribosomal_L30 | 1/1 | 88-140 | 98.3 | 2.3e−28 | Ribosomal |
| | | | | | | protein |
| | | | | | | L30p/L7e |
| 1621 | PX | 1/1 | 26-148 | 128.2 | 1.5e−34 | PX domain |
| 1622 | ig | 1/7 | 90-109 | 9.4 | 0.59 | Immunoglobulin |
| | | | | | | domain |
| 1622 | ig | 3/7 | 245-313 | 31.5 | 4.5e−07 | Immunoglobulin |
| | | | | | | domain |
| 1622 | ig | 4/7 | 359-404 | 16.6 | 0.006 | Immunoglobulin |
| | | | | | | domain |
| 1622 | ig | 6/7 | 570-638 | 31.6 | 4.4e−07 | Immunoglobulin |
| | | | | | | domain |
| 1622 | ig | 7/7 | 675-733 | 45.6 | 5.8e−11 | Immunoglobulin |
| | | | | | | domain |
| 1622 | pkinase | 1/1 | 827-1152 | 259.7 | 3.8e−74 | Protein kinase |
| | | | | | | domain |
| 1624 | zf-C3HC4 | 1/1 | 521-560 | 8.8 | 0.21 | Zinc finger, |
| | | | | | | C3HC4 type |
| | | | | | | (RING finger) |
| 1625 | hormone6 | 1/1 | 21-116 | 202.4 | 7e−57 | Glycoprotein |
| | | | | | | hormone |
| 1626 | G-alpha | 1/1 | 13-393 | 687.4 | 7.2e−203 | G-protein alpha |
| | | | | | | subunit |
| 1626 | arf | 1/1 | 213-296 | 26.1 | 2.9e−06 | ADP- |
| | | | | | | ribosylation |
| | | | | | | factor family |
| 1627 | rrm | 1/2 | 16-86 | 84.2 | 2.5e−23 | RNA recognition |
| | | | | | | motif. (a.k.a. |
| | | | | | | RRM, RBD, or |
| 1627 | rrm | 2/2 | 107-177 | 91.0 | 2.4e−25 | RNA recognition |
| | | | | | | motif. (a.k.a. |
| | | | | | | RRM, RBD, or |
| 1628 | HMG_box | 1/1 | 1-36 | 34.8 | 3.8e−08 | HMG (high |
| | | | | | | mobility group) |
| | | | | | | box |
| 1629 | OEP | 1/1 | 92-130 | 7.6 | 0.42 | Outer membrane |
| | | | | | | efflux protein |
| 1629 | Ribosomal_L7Ae | 1/1 | 122-216 | 102.0 | 4.7e−29 | Ribosomal |
| | | | | | | protein |
| | | | | | | L7Ae/L30e/S12e/ |
| | | | | | | Gadd4 |
| 1630 | Ribosomal_S24e | 1/1 | 23-105 | 192.0 | 8.1e−55 | Ribosomal |
| | | | | | | protein S24e |
| 1631 | SAPA | 1/2 | 21-54 | 85.7 | 5.9e−33 | Saposin A-type |
| | | | | | | domain |
| 1631 | SAPA | 2/2 | 491-524 | 78.1 | 6.4e−30 | Saposin A-type |
| | | | | | | domain |
| 1631 | Surfactant_B | 2/3 | 357-389 | 9.8 | 0.1 | 1/3 240 |
| | | | | | | 272 . . . 4578 |
| 1632 | Tropomyosin | 2/2 | 48-284 | 501.7 | 5.5e−147 | Tropomyosin |
| 1633 | hormone | 1/1 | 12-227 | 352.4 | 2.1e−130 | Somatotropin |
| | | | | | | hormone family |
| 1635 | DSPc | 2/2 | 1806-1840 | 8.7 | 0.36 | Dual |
| | | | | | | specificity |
| | | | | | | phosphatase, |
| | | | | | | catalytic |
| 1635 | Y_phosphatase | 1/2 | 1365-1596 | 454.3 | 1.1e−132 | Protein- |
| | | | | | | tyrosine |
| | | | | | | phosphatase |
| 1635 | Y_phosphatase | 2/2 | 1654-1887 | 413.6 | 1.8e−120 | Protein- |
| | | | | | | tyrosine |
| | | | | | | phosphatase |
| 1635 | fn3 | 1/8 | 309-391 | 73.7 | 8e−20 | Fibronectin |
| | | | | | | type III domain |
| 1635 | fn3 | 2/8 | 403-490 | 66.5 | 9.6e−18 | Fibronectin |
| | | | | | | type III domain |
| 1635 | fn3 | 3/8 | 502-584 | 70.5 | 6.7e−19 | Fibronectin |
| | | | | | | type III domain |
| 1635 | fn3 | 4/8 | 596-686 | 69.3 | 1.5e−18 | Fibronectin |
| | | | | | | type III domain |
| 1635 | fn3 | 5/8 | 698-799 | 58.7 | 1.7e−15 | Fibronectin |
| | | | | | | type III domain |
| 1635 | fn3 | 6/8 | 811-894 | 50.4 | 4.3e−13 | Fibronectin |
| | | | | | | type III domain |
| 1635 | fn3 | 7/8 | 905-990 | 67.0 | 6.8e−18 | Fibronectin |
| | | | | | | type III domain |
| 1635 | ig | 1/3 | 37-99 | 29.7 | 1.4e−06 | Immunoglobulin |
| | | | | | | domain |
| 1635 | ig | 2/3 | 139-199 | 23.2 | 9.1e−05 | Immunoglobulin |
| | | | | | | domain |
| 1635 | ig | 3/3 | 236-290 | 26.7 | 1e−05 | Immunoglobulin |
| | | | | | | domain |
| 1636 | ATP-synt_ab | 1/1 | 138-421 | 550.0 | 1.5e−161 | ATP synthase |
| | | | | | | alpha/beta |
| | | | | | | family, nucleot |
| 1636 | ATP-synt_ab_C | 1/1 | 423-531 | 138.7 | 9.9e−39 | ATP synthase |
| | | | | | | alpha/beta |
| | | | | | | chain, C termin |
| 1636 | ATP-synt_ab_N | 1/1 | 67-135 | 74.5 | 1e−23 | ATP synthase |
| | | | | | | alpha/beta |
| | | | | | | family, beta-ba |
| 1637 | S_100 | 1/1 | 8-51 | 87.9 | 1.9e−23 | S-100/ICaBP |
| | | | | | | type calcium |
| | | | | | | binding domain |
| 1637 | efhand | 1/1 | 58-86 | 23.8 | 0.00011 | EF hand |
| 1638 | GLTT | 1/1 | 40-68 | 7.6 | 0.44 | GLTT repeat (6 |
| | | | | | | copies) |
| 1639 | PGK | 1/1 | 2-418 | 1017.1 | 3.9e−302 | Phosphoglycerate |
| | | | | | | kinase |
| 1640 | C2 | 1/8 | 2-85 | 87.2 | 1.1e−23 | C2 domain |
| 1640 | C2 | 2/8 | 222-302 | 52.5 | 1.1e−13 | C2 domain |
| 1640 | C2 | 3/8 | 381-479 | 66.0 | 1.4e−17 | C2 domain |
| 1640 | C2 | 4/8 | 1154-1244 | 90.3 | 1.3e−24 | C2 domain |
| 1640 | C2 | 5/8 | 1338-1421 | 17.4 | 0.0014 | C2 domain |
| 1640 | C2 | 6/8 | 1580-1663 | 79.2 | 2.2e−21 | C2 domain |
| 1640 | C2 | 8/8 | 1904-1926 | 15.3 | 0.0059 | C2 domain |
| 1641 | RNA_pol_A | 1/2 | 246-895 | 1289.3 | 0 | RNA polymerase |
| | | | | | | alpha subunit |
| 1641 | RNA_pol_A2 | 1/1 | 1060-1477 | 762.0 | 2.4e−225 | RNA polymerase |
| | | | | | | A/beta′/A″ |
| | | | | | | subunit |
| 1643 | HATPase_c | 1/1 | 96-254 | 54.7 | 3.4e−14 | Histidine |
| | | | | | | kinase-, DNA |
| | | | | | | gyrase B-, and |
| | | | | | | HSP90 |
| 1643 | HSP90 | 1/1 | 257-783 | 1105.0 | 0 | Hsp90 protein |
| 1644 | Ribosomal_L40e | 1/1 | 77-128 | 111.5 | 1.6e−29 | Ribosomal L40e |
| | | | | | | family |
| 1644 | ubiquitin | 1/1 | 1-74 | 153.1 | 4.8e−42 | Ubiquitin |
| | | | | | | family |
| 1646 | Ribosomal_S13 | 1/1 | 14-142 | 274.7 | 1.2e−78 | Ribosomal |
| | | | | | | protein S13/S18 |
| 1647 | Ribosomal_L5 | 1/1 | 10-63 | 87.8 | 2.2e−22 | Ribosomal |
| | | | | | | protein L5 |
| 1647 | Ribosomal_L5_C | 1/1 | 67-166 | 210.1 | 1.7e−62 | ribosomal L5P |
| | | | | | | family C- |
| | | | | | | terminus |
| 1648 | Armadillo_seg | 1/2 | 1017-1044 | 10.7 | 0.3 | Armadillo/beta- |
| | | | | | | catenin-like |
| | | | | | | repeat |
| 1649 | ig | 1/1 | 38-102 | 33.8 | 1e−07 | Immunoglobulin |
| | | | | | | domain |
| 1650 | ICE_p10 | 1/1 | 244-329 | 180.7 | 2.3e−50 | ICE-like |
| | | | | | | protease |
| | | | | | | (caspase) p10 |
| | | | | | | domain |
| 1650 | ICE_p20 | 1/1 | 88-219 | 293.9 | 5.7e−88 | ICE-like |
| | | | | | | protease |
| | | | | | | (caspase) p20 |
| | | | | | | domain |
| 1650 | TAF | 1/1 | 133-143 | 4.8 | 1 | TATA box |
| | | | | | | binding protein |
| | | | | | | associated |
| | | | | | | factor ( |
| 1651 | Ribosomal_L6 | 1/2 | 12-87 | 84.5 | 1.9e−22 | Ribosomal |
| | | | | | | protein L6 |
| 1651 | Ribosomal_L6 | 2/2 | 99-178 | 66.8 | 2e−17 | Ribosomal |
| | | | | | | protein L6 |
| 1652 | Ribosomal_S12 | 1/1 | 7-142 | 279.8 | 3.4e−80 | Ribosomal |
| | | | | | | protein S12 |
| 1653 | ubiquitin | 1/1 | 1-74 | 116.3 | 4.1e−31 | Ubiquitin |
| | | | | | | family |
| 1654 | Fragilysin | 1/1 | 212-238 | 11.4 | 0.019 | Fragilysin |
| | | | | | | metallopeptidase |
| | | | | | | (M10C) en |
| 1654 | Peptidase_M10 | 1/1 | 98-204 | 163.6 | 3.3e−45 | Matrixin |
| 1654 | Peptidase_M10_N | 1/1 | 75-84 | 10.2 | 0.014 | Matrix |
| | | | | | | metalloprotease, |
| | | | | | | N-terminal do |
| 1654 | hemopexin | 1/4 | 298-341 | 58.5 | 3.3e−16 | Hemopexin |
| 1654 | hemopexin | 2/4 | 343-384 | 48.6 | 3.6e−13 | Hemopexin |
| 1654 | hemopexin | 3/4 | 387-434 | 54.2 | 7.1e−15 | Hemopexin |
| 1654 | hemopexin | 4/4 | 436-480 | 53.4 | 1.3e−14 | Hemopexin |
| 1655 | Sec61_beta | 1/1 | 49-94 | 98.9 | 2.4e−26 | Sec61beta |
| | | | | | | family |
| 1656 | ras | 1/1 | 66-134 | 36.7 | 7.9e−10 | Ras family |
| 1657 | Hist_deacetyl | 1/1 | 681-1028 | 374.2 | 1.3e−108 | Histone |
| | | | | | | deacetylase |
| | | | | | | family |
| 1658 | RA | 1/1 | 648-735 | 97.5 | 2.6e−25 | Ras association |
| | | | | | | (RalGDS/AF-6) |
| | | | | | | domain |
| 1658 | RasGEF | 1/1 | 240-462 | 194.3 | 1.9e−54 | RasGEF domain |
| 1658 | RasGEFN | 1/1 | 86-140 | 31.4 | 2.4e−07 | Guanine |
| | | | | | | nucleotide |
| | | | | | | exchange factor |
| | | | | | | for Ras-l |
| 1659 | UPF0023 | 1/1 | 5-244 | 332.7 | 4.1e−96 | Uncharacterized |
| | | | | | | protein family |
| | | | | | | UPF0023 |
| 1660 | NNMT_PNMT_TEMT | 1/1 | 1-259 | 593.3 | 1.5e−174 | NNMT/PNMT/TEMT |
| | | | | | | family |
| 1661 | KH | 1/1 | 47-95 | 22.7 | 6e−05 | KH domain |
| 1661 | Ribosomal_S3_C | 1/1 | 104-188 | 112.8 | 2.6e−34 | Ribosomal |
| | | | | | | protein S3, C- |
| | | | | | | terminal domai |
| 1663 | Neurokinin_B | 1/1 | 1-55 | 126.0 | 2.2e−37 | Neurokinin B |
| 1664 | ig | 1/4 | 85-121 | 9.2 | 0.71 | Immunoglobulin |
| | | | | | | domain |
| 1664 | ig | 2/4 | 162-219 | 8.8 | 0.89 | Immunoglobulin |
| | | | | | | domain |
| 1664 | ig | 3/4 | 255-312 | 18.4 | 0.0019 | Immunoglobulin |
| | | | | | | domain |
| 1664 | ig | 4/4 | 347-396 | 30.7 | 7.8e−07 | Immunoglobulin |
| | | | | | | domain |
| 1665 | Ran_BP1 | 1/1 | 37-161 | 306.1 | 4.3e−88 | RanBP1 domain |
| 1666 | bromodomain | 1/1 | 136-223 | 128.7 | 5e−36 | Bromodomain |
| 1668 | WD40 | 1/2 | 171-205 | 12.4 | 0.098 | WD domain, G- |
| | | | | | | beta repeat |
| 1669 | BRICHOS | 1/1 | 68-164 | 144.0 | 1.7e−40 | BRICHOS domain |
| 1670 | Osteopontin | 1/1 | 1-18 | 4.6 | 0.78 | Osteopontin |
| 1670 | TILa | 1/1 | 433-455 | 8.8 | 0.41 | TILa domain |
| 1670 | efhand | 1/1 | 626-654 | 10.9 | 0.4 | EF hand |
| 1670 | kazal | 1/2 | 456-509 | 71.9 | 1.3e−17 | Kazal-type |
| | | | | | | serine protease |
| | | | | | | inhibitor doma |
| 1671 | adh_short | 1/1 | 2-288 | 223.8 | 2.5e−63 | short chain |
| | | | | | | dehydrogenase |
| 1672 | Peptidase_C1 | 1/1 | 114-332 | 442.9 | 5.2e−132 | Papain family |
| | | | | | | cysteine |
| | | | | | | protease |
| 1673 | SNF | 1/1 | 52-597 | 1309.0 | 0 | Sodium: neurotransmitter |
| | | | | | | symporter |
| | | | | | | family |
| 1674 | Gal-bind_lectin | 1/1 | 5-137 | 103.2 | 1e−28 | Galactoside- |
| | | | | | | binding lectin |
| 1675 | helicase_C | 1/1 | 382-477 | 53.7 | 9.4e−14 | Helicase |
| | | | | | | conserved C- |
| | | | | | | terminal domain |
| 1676 | Ribosomal_L7Ae | 1/1 | 16-111 | 143.0 | 2.8e−41 | Ribosomal |
| | | | | | | protein |
| | | | | | | L7Ae/L30e/S12e/ |
| | | | | | | Gadd4 |
| 1677 | GST_C | 1/1 | 83-192 | 106.0 | 1e−28 | Glutathione S- |
| | | | | | | transferase, C- |
| | | | | | | terminal domain |
| 1677 | GST_N | 1/1 | 4-77 | 100.0 | 1.3e−27 | Glutathione S- |
| | | | | | | transferase, N- |
| | | | | | | terminal domain |
| 1678 | Peptidase_S26 | 1/1 | 86-244 | 185.1 | 7.9e−56 | Signal |
| | | | | | | peptidase I |
| 1679 | DNA_pol_delta_4 | 1/1 | 1-107 | 207.1 | 9.2e−63 | DNA polymerase |
| | | | | | | delta, subunit 4 |
| 1680 | Rhomboid | 1/1 | 99-250 | 78.6 | 6.6e−21 | Rhomboid family |
| 1683 | ras | 1/1 | 24-217 | 301.2 | 2.2e−88 | Ras family |
| 1684 | Synaptophysin | 1/1 | 35-260 | 245.2 | 8.9e−70 | Synaptophysin/ |
| | | | | | | synaptoporin |
| 1685 | Pep_M12B_propep | 1/1 | 88-204 | 200.2 | 3.2e−56 | Reprolysin |
| | | | | | | family |
| | | | | | | propeptide |
| 1685 | Reprolysin | 1/1 | 220-414 | 367.1 | 1.9e−106 | Reprolysin |
| | | | | | | (M12B) family |
| | | | | | | zinc metallo |
| 1685 | disintegrin | 1/1 | 431-507 | 82.2 | 3.1e−26 | Disintegrin |
| 1686 | transmembrane4 | 1/1 | 70-316 | 332.6 | 1e−103 | Tetraspanin |
| | | | | | | family |
| 1688 | MBD | 1/1 | 207-260 | 100.1 | 4.5e−26 | Methyl-CpG |
| | | | | | | binding domain |
| 1689 | Sm | 1/1 | 43-122 | 63.7 | 1.2e−16 | Sm protein |
| 1691 | pkinase | 1/2 | 162-383 | 183.1 | 4.5e−51 | Protein kinase |
| | | | | | | domain |
| 1691 | pkinase | 2/2 | 455-482 | 22.9 | 2.9e−05 | Protein kinase |
| | | | | | | domain |

### Example 5

### eMatrix Annotation of Polypeptides of the Invention

[0286] Using the eMATRIX software package (Stanford University, Stanford, Calif.) (Wu et al., J. Comp. Biol., vol. 6, pp. 219-235 (1999), herein incorporated by reference), the polypeptides of the invention (SEQ ID NO 853 through 1704) we analyzed. The following table describes the polypeptides of the invention that have significant eMatrix hits:

TABLE 4

| SEQ ID NO: | Domain_ID | Score | p-value | Domain_position | Model_ID | Model_Description |
|---|---|---|---|---|---|---|
| 856 | BL01115A | 10.22 | 6.705e−10 | 7-50 | BL01115 | GTP-binding nuclear |
| | | | | | | protein ran proteins. |
| 856 | BL01115B | 10.81 | 7.308e−09 | 87-130 | BL01115 | GTP-binding nuclear |
| | | | | | | protein ran proteins. |
| 856 | PR00449A | 13.20 | 3.045e−17 | 7-28 | PR00449 | TRANSFORMING PROTEIN |
| | | | | | | P21 RAS SIGNATURE |
| 856 | PR00449B | 14.34 | 6.318e−11 | 30-46 | PR00449 | TRANSFORMING PROTEIN |
| | | | | | | P21 RAS SIGNATURE |
| 856 | PR00449C | 17.27 | 2.895e−18 | 47-69 | PR00449 | TRANSFORMING PROTEIN |
| | | | | | | P21 RAS SIGNATURE |
| 856 | PR00449D | 10.79 | 2.800e−15 | 109-122 | PR00449 | TRANSFORMING PROTEIN |
| | | | | | | P21 RAS SIGNATURE |
| 856 | PR00449E | 13.50 | 9.100e−16 | 157-179 | PR00449 | TRANSFORMING PROTEIN |
| | | | | | | P21 RAS SIGNATURE |
| 857 | BL00222C | 22.97 | 1.333e−26 | 38-65 | BL00222 | Insulin-like growth |
| | | | | | | factor binding |
| | | | | | | proteins. |
| 857 | BL00484B | 9.04 | 2.385e−15 | 39-52 | BL00484 | Thyroglobulin type-1 |
| | | | | | | repeat proteins |
| | | | | | | proteins. |
| 857 | BL00484C | 17.01 | 7.158e−15 | 63-77 | BL00484 | Thyroglobulin type-1 |
| | | | | | | repeat proteins |
| | | | | | | proteins. |
| 860 | BL00194 | 12.16 | 3.348e−13 | 86-98 | BL00194 | Thioredoxin family |
| | | | | | | proteins. |
| 860 | PR00421B | 11.40 | 2.241e−11 | 93-102 | PR00421 | THIOREDOXIN FAMILY |
| | | | | | | SIGNATURE |
| 860 | PR00421C | 13.60 | 5.500e−09 | 136-147 | PR00421 | THIOREDOXIN FAMILY |
| | | | | | | SIGNATURE |
| 861 | BL00288A | 17.47 | 2.059e−36 | 64-93 | BL00288 | Tissue inhibitors of |
| | | | | | | metalloproteinases |
| | | | | | | proteins. |
| 861 | BL00288B | 9.44 | 7.000e−15 | 108-118 | BL00288 | Tissue inhibitors of |
| | | | | | | metalloproteinases |
| | | | | | | proteins. |
| 861 | BL00288C | 14.62 | 6.500e−18 | 127-141 | BL00288 | Tissue inhibitors of |
| | | | | | | metalloproteinases |
| | | | | | | proteins. |
| 861 | BL00288D | 25.76 | 1.000e−40 | 151-195 | BL00288 | Tissue inhibitors of |
| | | | | | | metalloproteinases |
| | | | | | | proteins. |
| 861 | BL00288E | 17.24 | 1.667e−26 | 197-219 | BL00288 | Tissue inhibitors of |
| | | | | | | metalloproteinases |
| | | | | | | proteins. |
| 862 | BL00229A | 23.57 | 9.182e−09 | 216-254 | BL00229 | Tau and MAP proteins |
| | | | | | | tubulin-binding domain |
| | | | | | | proteins. |
| 862 | BL00412D | 16.54 | 3.296e−09 | 175-225 | BL00412 | Neuromodulin (GAP-43) |
| | | | | | | proteins. |
| 862 | BL00412D | 16.54 | 4.398e−09 | 103-153 | BL00412 | Neuromodulin (GAP-43) |
| | | | | | | proteins. |
| 862 | BL00412D | 16.54 | 4.717e−10 | 107-157 | BL00412 | Neuromodulin (GAP-43) |
| | | | | | | proteins. |
| 862 | BL00412D | 16.54 | 5.684e−09 | 128-178 | BL00412 | Neuromodulin (GAP-43) |
| | | | | | | proteins. |
| 862 | BL00412D | 16.54 | 9.724e−09 | 90-140 | BL00412 | Neuromodulin (GAP-43) |
| | | | | | | proteins. |
| 862 | BL00826C | 7.63 | 6.400e−09 | 197-223 | BL00826 | MARCKS family proteins. |
| 863 | BL01033A | 16.94 | 3.250e−20 | 44-65 | BL01033 | Globins profile. |
| 863 | BL01033B | 13.81 | 7.000e−14 | 106-117 | BL01033 | Globins profile. |
| 863 | PR00611A | 15.91 | 5.829e−09 | 44-66 | PR00611 | ERYTHROCRUORIN FAMILY |
| | | | | | | SIGNATURE |
| 863 | PR00612A | 8.64 | 5.800e−14 | 34-46 | PR00612 | ALPHA HAEMOGLOBIN |
| | | | | | | SIGNATURE |
| 863 | PR00612B | 10.92 | 1.000e−13 | 51-61 | PR00612 | ALPHA HAEMOGLOBIN |
| | | | | | | SIGNATURE |
| 863 | PR00612C | 12.16 | 2.286e−13 | 66-75 | PR00612 | ALPHA HAEMOGLOBIN |
| | | | | | | SIGNATURE |
| 863 | PR00612D | 9.76 | 3.400e−15 | 93-106 | PR00612 | ALPHA HAEMOGLOBIN |
| | | | | | | SIGNATURE |
| 863 | PR00612E | 9.04 | 7.000e−19 | 141-157 | PR00612 | ALPHA HAEMOGLOBIN |
| | | | | | | SIGNATURE |
| 864 | BL00077A | 19.44 | 6.478e−34 | 5-45 | BL00077 | Heme-copper oxidase |
| | | | | | | catalytic subunit, |
| | | | | | | copper B binding regio. |
| 864 | BL00077B | 10.15 | 7.750e−36 | 67-112 | BL00077 | Heme-copper oxidase |
| | | | | | | catalytic subunit, |
| | | | | | | copper B binding regio. |
| 864 | BL00077C | 18.98 | 1.000e−40 | 127-177 | BL00077 | Heme-copper oxidase |
| | | | | | | catalytic subunit, |
| | | | | | | copper B binding regio. |
| 864 | BL00077D | 11.17 | 1.000e−40 | 200-254 | BL00077 | Heme-copper oxidase |
| | | | | | | catalytic subunit, |
| | | | | | | copper B binding regio. |
| 864 | BL00077E | 13.71 | 5.179e−38 | 265-313 | BL00077 | Heme-copper oxidase |
| | | | | | | catalytic subunit, |
| | | | | | | copper B binding regio. |
| 864 | BL00077F | 11.35 | 1.000e−40 | 348-398 | BL00077 | Heme-copper oxidase |
| | | | | | | catalytic subunit, |
| | | | | | | copper B binding regio. |
| 864 | BL00077G | 15.93 | 1.000e−40 | 413-461 | BL00077 | Heme-copper oxidase |
| | | | | | | catalytic subunit, |
| | | | | | | copper B binding regio. |
| 866 | BL00175A | 15.42 | 8.333e−20 | 15-34 | BL00175 | Phosphoglycerate mutase |
| | | | | | | family phosphohistidine |
| | | | | | | proteins. |
| 866 | BL00175B | 12.60 | 1.000e−12 | 64-76 | BL00175 | Phosphoglycerate mutase |
| | | | | | | family phosphohistidine |
| | | | | | | proteins. |
| 866 | BL00175C | 23.75 | 5.000e−25 | 88-119 | BL00175 | Phosphoglycerate mutase |
| | | | | | | family phosphohistidine |
| | | | | | | proteins. |
| 866 | BL00175D | 27.67 | 8.500e−40 | 173-224 | BL00175 | Phosphoglycerate mutase |
| | | | | | | family phosphohistidine |
| | | | | | | proteins. |
| 870 | BL00478B | 14.79 | 6.870e−14 | 300-314 | BL00478 | LIM domain proteins. |
| 870 | PD00289 | 9.97 | 6.276e−09 | 72-85 | PD00289 | PROTEIN SH3 DOMAIN |
| | | | | | | REPEAT PRESYNA. |
| 873 | PD01922B | 21.83 | 7.328e−14 | 251-286 | PD01922 | PROTEIN |
| | | | | | | PHOSPHODIESTERASE |
| | | | | | | HYDROL. |
| 874 | BL00030A | 14.39 | 6.294e−11 | 301-319 | BL00030 | Eukaryotic RNA-binding |
| | | | | | | region RNP-1 proteins. |
| 874 | BL00030B | 7.03 | 4.789e−09 | 340-349 | BL00030 | Eukaryotic RNA-binding |
| | | | | | | region RNP-1 proteins. |
| 874 | BL00048 | 6.39 | 1.563e−09 | 122-148 | BL00048 | Protamine P1 proteins. |
| 874 | BL00048 | 6.39 | 1.563e−09 | 123-149 | BL00048 | Protamine P1 proteins. |
| 874 | BL00048 | 6.39 | 1.711e−10 | 106-132 | BL00048 | Protamine P1 proteins. |
| 874 | BL00048 | 6.39 | 1.947e−10 | 117-143 | BL00048 | Protamine P1 proteins. |
| 874 | BL00048 | 6.39 | 2.125e−11 | 120-146 | BL00048 | Protamine P1 proteins. |
| 874 | BL00048 | 6.39 | 3.025e−09 | 121-147 | BL00048 | Protamine P1 proteins. |
| 874 | BL00048 | 6.39 | 3.132e−10 | 127-153 | BL00048 | Protamine P1 proteins. |
| 874 | BL00048 | 6.39 | 3.813e−09 | 110-136 | BL00048 | Protamine P1 proteins. |
| 874 | BL00048 | 6.39 | 4.197e−10 | 118-144 | BL00048 | Protamine P1 proteins. |
| 874 | BL00048 | 6.39 | 5.725e−09 | 108-134 | BL00048 | Protamine P1 proteins. |
| 874 | BL00048 | 6.39 | 6.329e−10 | 114-140 | BL00048 | Protamine P1 proteins. |
| 874 | BL00048 | 6.39 | 6.566e−10 | 116-142 | BL00048 | Protamine P1 proteins. |
| 874 | BL00048 | 6.39 | 6.963e−09 | 125-151 | BL00048 | Protamine P1 proteins. |
| 874 | BL00048 | 6.39 | 7.039e−10 | 119-145 | BL00048 | Protamine P1 proteins. |
| 874 | BL00048 | 6.39 | 7.075e−09 | 115-141 | BL00048 | Protamine P1 proteins. |
| 874 | BL00048 | 6.39 | 7.395e−10 | 112-138 | BL00048 | Protamine P1 proteins. |
| 874 | BL00048 | 6.39 | 7.618e−12 | 124-150 | BL00048 | Protamine P1 proteins. |
| 874 | BL00048 | 6.39 | 7.638e−09 | 126-152 | BL00048 | Protamine P1 proteins. |
| 874 | BL00048 | 6.39 | 9.213e−09 | 113-139 | BL00048 | Protamine P1 proteins. |
| 874 | BL00970C | 14.80 | 9.168e−09 | 99-136 | BL00970 | Nuclear transition |
| | | | | | | protein 2 proteins. |
| 874 | PR00308A | 5.90 | 4.646e−10 | 14-28 | PR00308 | TYPE I ANTIFREEZE |
| | | | | | | PROTEIN SIGNATURE |
| 874 | PR00308A | 5.90 | 4.706e−09 | 16-30 | PR00308 | TYPE I ANTIFREEZE |
| | | | | | | PROTEIN SIGNATURE |
| 874 | PR00308C | 3.83 | 8.831e−09 | 17-26 | PR00308 | TYPE I ANTIFREEZE |
| | | | | | | PROTEIN SIGNATURE |
| 874 | PR00308C | 3.83 | 8.892e−10 | 18-27 | PR00308 | TYPE I ANTIFREEZE |
| | | | | | | PROTEIN SIGNATURE |
| 874 | PR00308C | 3.83 | 8.892e−10 | 19-28 | PR00308 | TYPE I ANTIFREEZE |
| | | | | | | PROTEIN SIGNATURE |
| 874 | PR00308C | 3.83 | 8.892e−10 | 20-29 | PR00308 | TYPE I ANTIFREEZE |
| | | | | | | PROTEIN SIGNATURE |
| 874 | PR00833H | 2.30 | 6.250e−10 | 15-29 | PR00833 | POLLEN ALLERGEN POA PI |
| | | | | | | SIGNATURE |
| 875 | BL00226A | 12.77 | 4.484e−13 | 181-195 | BL00226 | Intermediate filaments |
| | | | | | | proteins. |
| 875 | BL00226B | 23.86 | 7.120e−33 | 282-329 | BL00226 | Intermediate filaments |
| | | | | | | proteins. |
| 875 | BL00226B | 23.86 | 8.744e−09 | 233-280 | BL00226 | Intermediate filaments |
| | | | | | | proteins. |
| 875 | BL00226C | 13.23 | 2.714e−24 | 348-378 | BL00226 | Intermediate filaments |
| | | | | | | proteins. |
| 875 | BL00226D | 19.10 | 2.216e−29 | 451-497 | BL00226 | Intermediate filaments |
| | | | | | | proteins. |
| 875 | BL00970B | 10.09 | 7.033e−09 | 11-36 | BL00970 | Nuclear transition |
| | | | | | | protein 2 proteins. |
| 879 | BL00282 | 16.88 | 3.640e−09 | 478-500 | BL00282 | Kazal serine protease |
| | | | | | | inhibitors family |
| | | | | | | proteins. |
| 880 | BL50058 | 27.23 | 9.654e−33 | 17-64 | BL50058 | G-protein gamma subunit |
| | | | | | | profile. |
| 880 | PR00321A | 11.91 | 6.727e−14 | 16-31 | PR00321 | GAMMA G-PROTEIN |
| | | | | | | (TRANSDUCIN) SIGNATURE |
| 880 | PR00321B | 12.62 | 3.647e−14 | 32-46 | PR00321 | GAMMA G-PROTEIN |
| | | | | | | (TRANSDUCIN) SIGNATURE |
| 880 | PR00321C | 15.39 | 8.816e−16 | 52-69 | PR00321 | GAMMA G-PROTEIN |
| | | | | | | (TRANSDUCIN) SIGNATURE |
| 881 | BL00036 | 9.02 | 3.571e−13 | 331-343 | BL00036 | bZIP transcription |
| | | | | | | factors basic domain |
| | | | | | | proteins. |
| 881 | BL00048 | 6.39 | 2.238e−09 | 6-32 | BL00048 | Protamine P1 proteins. |
| 881 | BL00048 | 6.39 | 5.145e−10 | 5-31 | BL00048 | Protamine P1 proteins. |
| 881 | PR00043A | 9.07 | 1.600e−25 | 309-329 | PR00043 | JUN TRANSCRIPTION |
| | | | | | | FACTOR SIGNATURE |
| 881 | PR00043B | 8.73 | 1.310e−22 | 331-347 | PR00043 | JUN TRANSCRIPTION |
| | | | | | | FACTOR SIGNATURE |
| 881 | PR00043C | 10.55 | 6.824e−16 | 349-361 | PR00043 | JUN TRANSCRIPTION |
| | | | | | | FACTOR SIGNATURE |
| 881 | PR00043D | 11.91 | 5.737e−17 | 364-378 | PR00043 | JUN TRANSCRIPTION |
| | | | | | | FACTOR SIGNATURE |
| 881 | PR00043E | 8.20 | 1.947e−18 | 378-393 | PR00043 | JUN TRANSCRIPTION |
| | | | | | | FACTOR SIGNATURE |
| 881 | PR00308C | 3.83 | 8.013e−09 | 210-219 | PR00308 | TYPE I ANTIFREEZE |
| | | | | | | PROTEIN SIGNATURE |
| 881 | PR00308C | 3.83 | 8.892e−10 | 211-220 | PR00308 | TYPE I ANTIFREEZE |
| | | | | | | PROTEIN SIGNATURE |
| 881 | PR00649B | 8.21 | 9.206e−10 | 212-229 | PR00649 | GPR6 ORPHAN RECEPTOR |
| | | | | | | SIGNATURE |
| 888 | PD00289 | 9.97 | 8.560e−10 | 328-341 | PD00289 | PROTEIN SH3 DOMAIN |
| | | | | | | REPEAT PRESYNA. |
| 888 | PF00424A | 14.34 | 6.266e−09 | 236-267 | PF00424 | REV protein (anti- |
| | | | | | | repression |
| | | | | | | transactivator |
| | | | | | | protein). |
| 889 | BL00226A | 12.77 | 4.960e−14 | 158-172 | BL00226 | Intermediate filaments |
| | | | | | | proteins. |
| 889 | BL00226B | 23.86 | 4.600e−33 | 263-310 | BL00226 | Intermediate filaments |
| | | | | | | proteins. |
| 889 | BL00226C | 13.23 | 8.125e−22 | 328-358 | BL00226 | Intermediate filaments |
| | | | | | | proteins. |
| 889 | BL00226D | 19.10 | 8.054e−29 | 429-475 | BL00226 | Intermediate filaments |
| | | | | | | proteins. |
| 889 | PR00581E | 3.48 | 6.494e−09 | 46-61 | PR00581 | PROSTANOID EP2 RECEPTOR |
| | | | | | | SIGNATURE |
| 891 | BL00406A | 9.95 | 1.000e−40 | 84-118 | BL00406 | Actins proteins. |
| 891 | BL00406B | 5.47 | 1.000e−40 | 160-214 | BL00406 | Actins proteins. |
| 891 | PR00190A | 7.24 | 1.375e−13 | 103-112 | PR00190 | ACTIN SIGNATURE |
| 891 | PR00190B | 9.98 | 1.000e−15 | 126-137 | PR00190 | ACTIN SIGNATURE |
| 891 | PR00190C | 11.49 | 4.789e−30 | 138-160 | PR00190 | ACTIN SIGNATURE |
| 891 | PR00190D | 19.23 | 3.520e−24 | 161-179 | PR00190 | ACTIN SIGNATURE |
| 891 | PR00190E | 7.16 | 1.450e−19 | 192-205 | PR00190 | ACTIN SIGNATURE |
| 891 | PR00190F | 7.80 | 4.349e−21 | 217-236 | PR00190 | ACTIN SIGNATURE |
| 892 | PD02870B | 18.83 | 8.094e−11 | 219-251 | PD02870 | RECEPTOR INTERLEUKIN-1 |
| | | | | | | PRECURSOR. |
| 893 | BL00049A | 13.86 | 8.333e−19 | 32-54 | BL00049 | Ribosomal protein L14 |
| | | | | | | proteins. |
| 893 | BL00049B | 18.42 | 6.806e−24 | 67-98 | BL00049 | Ribosomal protein L14 |
| | | | | | | proteins. |
| 893 | BL00049C | 17.38 | 2.688e−28 | 105-140 | BL00049 | Ribosomal protein L14 |
| | | | | | | proteins. |
| 893 | BL00049D | 13.47 | 5.765e−12 | 142-152 | BL00049 | Ribosomal protein L14 |
| | | | | | | proteins. |
| 894 | BL01221A | 17.26 | 3.739e−27 | 73-100 | BL01221 | PMP-22/EMP/MP20 |
| | | | | | | family proteins. |
| 894 | BL01221B | 13.29 | 7.231e−14 | 108-121 | BL01221 | PMP-22/EMP/MP20 |
| | | | | | | family proteins. |
| 894 | BL01221A | 17.26 | 3.739e−27 | 73-100 | BL01221 | PMP-22/EMP/MP20 |
| | | | | | | family proteins. |
| 894 | BL01221B | 13.29 | 7.231e−14 | 108-121 | BL01221 | PMP-22/EMP/MP20 |
| | | | | | | family proteins. |
| 894 | BL01221C | 26.20 | 8.333e−38 | 131-175 | BL01221 | PMP-22/EMP/MP20 |
| | | | | | | family proteins. |
| 894 | BL01221C | 26.20 | 8.405e−11 | 128-172 | BL01221 | PMP-22/EMP/MP20 |
| | | | | | | family proteins. |
| 894 | BL01221D | 13.99 | 7.577e−28 | 202-228 | BL01221 | PMP-22/EMP/MP20 |
| | | | | | | family proteins. |
| 895 | BL00123A | 10.80 | 6.786e−28 | 77-101 | BL00123 | Alkaline phosphatase |
| | | | | | | proteins. |
| 895 | BL00123B | 19.31 | 1.900e−40 | 115-157 | BL00123 | Alkaline phosphatase |
| | | | | | | proteins. |
| 895 | BL00123C | 24.61 | 1.000e−40 | 170-219 | BL00123 | Alkaline phosphatase |
| | | | | | | proteins. |
| 895 | BL00123D | 12.73 | 5.263e−15 | 241-253 | BL00123 | Alkaline phosphatase |
| | | | | | | proteins. |
| 895 | BL00123E | 22.25 | 1.000e−40 | 329-382 | BL00123 | Alkaline phosphatase |
| | | | | | | proteins. |
| 895 | BL00123F | 19.03 | 6.625e−33 | 389-423 | BL00123 | Alkaline phosphatase |
| | | | | | | proteins. |
| 895 | BL00123G | 26.01 | 1.000e−40 | 463-512 | BL00123 | Alkaline phosphatase |
| | | | | | | proteins. |
| 895 | PR00113A | 11.74 | 9.182e−25 | 77-97 | PR00113 | ALKALINE PHOSPHATASE |
| | | | | | | SIGNATURE |
| 895 | PR00113B | 14.32 | 9.526e−19 | 133-148 | PR00113 | ALKALINE PHOSPHATASE |
| | | | | | | SIGNATURE |
| 895 | PR00113C | 10.88 | 5.846e−25 | 180-200 | PR00113 | ALKALINE PHOSPHATASE |
| | | | | | | SIGNATURE |
| 895 | PR00113D | 6.87 | 6.063e−14 | 239-249 | PR00113 | ALKALINE PHOSPHATASE |
| | | | | | | SIGNATURE |
| 895 | PR00113E | 14.04 | 2.636e−35 | 330-360 | PR00113 | ALKALINE PHOSPHATASE |
| | | | | | | SIGNATURE |
| 898 | BL00236D | 25.66 | 6.860e−19 | 9-50 | BL00236 | Neurotransmitter-gated |
| | | | | | | ion-channels proteins. |
| 898 | PR00253A | 9.15 | 4.667e−15 | 25-45 | PR00253 | GAMMA-AMINOBUTYRIC ACID |
| | | | | | | (GABA) RECEPTOR |
| | | | | | | SIGNATURE |
| 898 | PR00253B | 13.47 | 4.162e−18 | 51-72 | PR00253 | GAMMA-AMINOBUTYRIC ACID |
| | | | | | | (GABA) RECEPTOR |
| | | | | | | SIGNATURE |
| 898 | PR00253C | 13.85 | 3.302e−16 | 85-106 | PR00253 | GAMMA-AMINOBUTYRIC ACID |
| | | | | | | (GABA) RECEPTOR |
| | | | | | | SIGNATURE |
| 898 | PR00253D | 16.68 | 1.000e−18 | 228-248 | PR00253 | GAMMA-AMINOBUTYRIC ACID |
| | | | | | | (GABA) RECEPTOR |
| | | | | | | SIGNATURE |
| 899 | BL00048 | 6.39 | 1.000e−08 | 1924-1950 | BL00048 | Protamine P1 proteins. |
| 899 | BL00048 | 6.39 | 1.132e−12 | 1873-1899 | BL00048 | Protamine P1 proteins. |
| 899 | BL00048 | 6.39 | 1.500e−11 | 1859-1885 | BL00048 | Protamine P1 proteins. |
| 899 | BL00048 | 6.39 | 2.303e−10 | 1996-2022 | BL00048 | Protamine P1 proteins. |
| 899 | BL00048 | 6.39 | 2.421e−10 | 1870-1896 | BL00048 | Protamine P1 proteins. |
| 899 | BL00048 | 6.39 | 2.421e−10 | 1965-1991 | BL00048 | Protamine P1 proteins. |
| 899 | BL00048 | 6.39 | 2.421e−10 | 1972-1998 | BL00048 | Protamine P1 proteins. |
| 899 | BL00048 | 6.39 | 2.456e−12 | 1858-1884 | BL00048 | Protamine P1 proteins. |
| 899 | BL00048 | 6.39 | 2.721e−12 | 1988-2014 | BL00048 | Protamine P1 proteins. |
| 899 | BL00048 | 6.39 | 3.000e−11 | 1866-1892 | BL00048 | Protamine P1 proteins. |
| 899 | BL00048 | 6.39 | 3.132e−10 | 1850-1876 | BL00048 | Protamine P1 proteins. |
| 899 | BL00048 | 6.39 | 3.475e−09 | 1875-1901 | BL00048 | Protamine P1 proteins. |
| 899 | BL00048 | 6.39 | 3.487e−10 | 1857-1883 | BL00048 | Protamine P1 proteins. |
| 899 | BL00048 | 6.39 | 3.605e−10 | 1935-1961 | BL00048 | Protamine P1 proteins. |
| 899 | BL00048 | 6.39 | 3.647e−12 | 1927-1953 | BL00048 | Protamine P1 proteins. |
| 899 | BL00048 | 6.39 | 3.813e−09 | 1855-1881 | BL00048 | Protamine P1 proteins. |
| 899 | BL00048 | 6.39 | 3.875e−11 | 1960-1986 | BL00048 | Protamine P1 proteins. |
| 899 | BL00048 | 6.39 | 3.875e−11 | 1967-1993 | BL00048 | Protamine P1 proteins. |
| 899 | BL00048 | 6.39 | 3.875e−11 | 1974-2000 | BL00048 | Protamine P1 proteins. |
| 899 | BL00048 | 6.39 | 4.044e−12 | 1871-1897 | BL00048 | Protamine P1 proteins. |
| 899 | BL00048 | 6.39 | 4.125e−11 | 1863-1889 | BL00048 | Protamine P1 proteins. |
| 899 | BL00048 | 6.39 | 4.323e−13 | 1860-1886 | BL00048 | Protamine P1 proteins. |
| 899 | BL00048 | 6.39 | 4.375e−09 | 1941-1967 | BL00048 | Protamine P1 proteins. |
| 899 | BL00048 | 6.39 | 4.713e−09 | 1961-1987 | BL00048 | Protamine P1 proteins. |
| 899 | BL00048 | 6.39 | 4.713e−09 | 1968-1994 | BL00048 | Protamine P1 proteins. |
| 899 | BL00048 | 6.39 | 4.713e−09 | 1975-2001 | BL00048 | Protamine P1 proteins. |
| 899 | BL00048 | 6.39 | 4.750e−11 | 1852-1878 | BL00048 | Protamine P1 proteins. |
| 899 | BL00048 | 6.39 | 4.838e−12 | 1861-1887 | BL00048 | Protamine P1 proteins. |
| 899 | BL00048 | 6.39 | 5.103e−12 | 1989-2015 | BL00048 | Protamine P1 proteins. |
| 899 | BL00048 | 6.39 | 5.125e−11 | 1958-1984 | BL00048 | Protamine P1 proteins. |
| 899 | BL00048 | 6.39 | 5.500e−10 | 1867-1893 | BL00048 | Protamine P1 proteins. |
| 899 | BL00048 | 6.39 | 5.500e−12 | 1874-1900 | BL00048 | Protamine P1 proteins. |
| 899 | BL00048 | 6.39 | 5.618e−10 | 1983-2009 | BL00048 | Protamine P1 proteins. |
| 899 | BL00048 | 6.39 | 5.632e−12 | 1981-2007 | BL00048 | Protamine P1 proteins. |
| 899 | BL00048 | 6.39 | 5.737e−10 | 2025-2051 | BL00048 | Protamine P1 proteins. |
| 899 | BL00048 | 6.39 | 5.855e−10 | 1932-1958 | BL00048 | Protamine P1 proteins. |
| 899 | BL00048 | 6.39 | 6.123e−13 | 1862-1888 | BL00048 | Protamine P1 proteins. |
| 899 | BL00048 | 6.39 | 6.125e−11 | 1869-1895 | BL00048 | Protamine P1 proteins. |
| 899 | BL00048 | 6.39 | 6.175e−09 | 1980-2006 | BL00048 | Protamine P1 proteins. |
| 899 | BL00048 | 6.39 | 6.294e−12 | 1853-1879 | BL00048 | Protamine P1 proteins. |
| 899 | BL00048 | 6.39 | 6.294e−12 | 1865-1891 | BL00048 | Protamine P1 proteins. |
| 899 | BL00048 | 6.39 | 6.329e−10 | 1856-1882 | BL00048 | Protamine P1 proteins. |
| 899 | BL00048 | 6.39 | 6.375e−11 | 1986-2012 | BL00048 | Protamine P1 proteins. |
| 899 | BL00048 | 6.39 | 6.500e−11 | 1979-2005 | BL00048 | Protamine P1 proteins. |
| 899 | BL00048 | 6.39 | 6.513e−09 | 1930-1956 | BL00048 | Protamine P1 proteins. |
| 899 | BL00048 | 6.39 | 6.566e−10 | 1951-1977 | BL00048 | Protamine P1 proteins. |
| 899 | BL00048 | 6.39 | 6.684e−10 | 2026-2052 | BL00048 | Protamine P1 proteins. |
| 899 | BL00048 | 6.39 | 6.738e−09 | 2002-2028 | BL00048 | Protamine P1 proteins. |
| 899 | BL00048 | 6.39 | 6.850e−09 | 1993-2019 | BL00048 | Protamine P1 proteins. |
| 899 | BL00048 | 6.39 | 6.875e−11 | 1868-1894 | BL00048 | Protamine P1 proteins. |
| 899 | BL00048 | 6.39 | 6.963e−09 | 1854-1880 | BL00048 | Protamine P1 proteins. |
| 899 | BL00048 | 6.39 | 7.221e−12 | 1982-2008 | BL00048 | Protamine P1 proteins. |
| 899 | BL00048 | 6.39 | 7.231e−13 | 1926-1952 | BL00048 | Protamine P1 proteins. |
| 899 | BL00048 | 6.39 | 7.638e−09 | 1946-1972 | BL00048 | Protamine P1 proteins. |
| 899 | BL00048 | 6.39 | 8.200e−09 | 1950-1976 | BL00048 | Protamine P1 proteins. |
| 899 | BL00048 | 6.39 | 8.375e−11 | 1990-2016 | BL00048 | Protamine P1 proteins. |
| 899 | BL00048 | 6.39 | 8.477e−13 | 1864-1890 | BL00048 | Protamine P1 proteins. |
| 899 | BL00048 | 6.39 | 8.500e−11 | 1928-1954 | BL00048 | Protamine P1 proteins. |
| 899 | BL00048 | 6.39 | 8.544e−12 | 1872-1898 | BL00048 | Protamine P1 proteins. |
| 899 | BL00048 | 6.39 | 8.579e−10 | 1936-1962 | BL00048 | Protamine P1 proteins. |
| 899 | BL00048 | 6.39 | 8.625e−11 | 2021-2047 | BL00048 | Protamine P1 proteins. |
| 899 | BL00048 | 6.39 | 8.875e−09 | 2030-2056 | BL00048 | Protamine P1 proteins. |
| 899 | BL00048 | 6.39 | 9.100e−09 | 1959-1985 | BL00048 | Protamine P1 proteins. |
| 899 | BL00048 | 6.39 | 9.100e−09 | 1966-1992 | BL00048 | Protamine P1 proteins. |
| 899 | BL00048 | 6.39 | 9.100e−09 | 1973-1999 | BL00048 | Protamine P1 proteins. |
| 899 | BL00048 | 6.39 | 9.213e−09 | 1908-1934 | BL00048 | Protamine P1 proteins. |
| 899 | BL00048 | 6.39 | 9.289e−10 | 1848-1874 | BL00048 | Protamine P1 proteins. |
| 899 | BL00048 | 6.39 | 9.289e−10 | 1925-1951 | BL00048 | Protamine P1 proteins. |
| 899 | BL00048 | 6.39 | 9.526e−10 | 2024-2050 | BL00048 | Protamine P1 proteins. |
| 899 | BL00048 | 6.39 | 9.603e−12 | 1851-1877 | BL00048 | Protamine P1 proteins. |
| 899 | BL00048 | 6.39 | 9.625e−11 | 1953-1979 | BL00048 | Protamine P1 proteins. |
| 899 | BL00048 | 6.39 | 9.625e−11 | 1987-2013 | BL00048 | Protamine P1 proteins. |
| 899 | BL00048 | 6.39 | 9.763e−10 | 1849-1875 | BL00048 | Protamine P1 proteins. |
| 899 | BL00048 | 6.39 | 9.775e−09 | 1997-2023 | BL00048 | Protamine P1 proteins. |
| 899 | BL00048 | 6.39 | 9.888e−09 | 1964-1990 | BL00048 | Protamine P1 proteins. |
| 899 | BL00048 | 6.39 | 9.888e−09 | 1971-1997 | BL00048 | Protamine P1 proteins. |
| 899 | BL00048 | 6.39 | 9.888e−09 | 1978-2004 | BL00048 | Protamine P1 proteins. |
| 899 | BL00348F | 23.19 | 8.169e−10 | 103-145 | BL00348 | p53 tumor antigen |
| | | | | | | proteins. |
| 899 | BL00970B | 10.09 | 6.736e−09 | 1952-1977 | BL00970 | Nuclear transition |
| | | | | | | protein 2 proteins. |
| 899 | DM00215 | 19.43 | 4.706e−11 | 1151-1183 | DM00215 | PROLINE-RICH PROTEIN 3. |
| 899 | DM00215 | 19.43 | 6.644e−09 | 1150-1182 | DM00215 | PROLINE-RICH PROTEIN 3. |
| 899 | DM00215 | 19.43 | 8.780e−09 | 1154-1186 | DM00215 | PROLINE-RICH PROTEIN 3. |
| 899 | DM00892C | 23.55 | 7.207e−28 | 2318-2351 | DM00892 | 3 RETROVIRAL |
| | | | | | | PROTEINASE. |
| 899 | DM01206B | 10.69 | 2.139e−09 | 1860-1879 | DM01206 | CORONAVIRUS |
| | | | | | | NUCLEOCAPSID PROTEIN. |
| 900 | BL00284A | 15.64 | 2.565e−18 | 35-58 | BL00284 | Serpins proteins. |
| 900 | BL00284B | 17.99 | 1.621e−13 | 173-193 | BL00284 | Serpins proteins. |
| 900 | BL00284C | 28.56 | 2.038e−29 | 202-243 | BL00284 | Serpins proteins. |
| 900 | BL00284D | 16.34 | 2.241e−17 | 315-341 | BL00284 | Serpins proteins. |
| 900 | BL00284E | 19.15 | 7.158e−21 | 399-423 | BL00284 | Serpins proteins. |
| 901 | BL01160B | 19.54 | 4.203e−09 | 982-1035 | BL01160 | Kinesin light chain |
| | | | | | | repeat proteins. |
| 901 | BL01160B | 19.54 | 8.932e−09 | 1480-1533 | BL01160 | Kinesin light chain |
| | | | | | | repeat proteins. |
| 901 | PR00381A | 9.55 | 1.321e−10 | 969-986 | PR00381 | KINESIN LIGHT CHAIN |
| | | | | | | SIGNATURE |
| 901 | PR00820B | 3.97 | 7.038e−09 | 1132-1146 | PR00820 | CBXX/CFQX PROTEIN |
| | | | | | | SIGNATURE |
| 902 | PR00981A | 11.62 | 4.240e−14 | 336-348 | PR00981 | SERYL-TRNA SYNTHETASE |
| | | | | | | SIGNATURE |
| 902 | PR00981B | 11.68 | 2.552e−15 | 348-361 | PR00981 | SERYL-TRNA SYNTHETASE |
| | | | | | | SIGNATURE |
| 902 | PR00981C | 15.34 | 3.919e−12 | 390-403 | PR00981 | SERYL-TRNA SYNTHETASE |
| | | | | | | SIGNATURE |
| 902 | PR00981D | 18.10 | 1.000e−15 | 407-423 | PR00981 | SERYL-TRNA SYNTHETASE |
| | | | | | | SIGNATURE |
| 902 | PR00981E | 13.40 | 6.667e−20 | 425-441 | PR00981 | SERYL-TRNA SYNTHETASE |
| | | | | | | SIGNATURE |
| 903 | BL00509B | 10.28 | 5.000e−09 | 234-244 | BL00509 | Ras GTPase-activating |
| | | | | | | proteins. |
| 903 | BL01052C | 18.51 | 7.204e−09 | 146-185 | BL01052 | Calponin family repeat |
| | | | | | | proteins. |
| 903 | BL01159 | 13.85 | 5.959e−10 | 650-664 | BL01159 | WW/rsp5/WWP domain |
| | | | | | | proteins. |
| 903 | PR00403B | 12.19 | 3.593e−09 | 650-664 | PR00403 | WW DOMAIN SIGNATURE |
| 904 | BL00385A | 11.67 | 6.727e−39 | 38-69 | BL00385 | Alpha-L-fucosidase |
| | | | | | | proteins. |
| 904 | BL00385B | 24.10 | 1.000e−40 | 79-130 | BL00385 | Alpha-L-fucosidase |
| | | | | | | proteins. |
| 904 | BL00385C | 13.73 | 1.000e−40 | 132-175 | BL00385 | Alpha-L-fucosidase |
| | | | | | | proteins. |
| 904 | BL00385D | 15.93 | 7.923e−29 | 176-199 | BL00385 | Alpha-L-fucosidase |
| | | | | | | proteins. |
| 904 | BL00385E | 16.21 | 1.000e−40 | 213-256 | BL00385 | Alpha-L-fucosidase |
| | | | | | | proteins. |
| 904 | BL00385F | 16.09 | 1.000e−40 | 257-302 | BL00385 | Alpha-L-fucosidase |
| | | | | | | proteins. |
| 904 | BL00385G | 15.69 | 2.800e−36 | 321-354 | BL00385 | Alpha-L-fucosidase |
| | | | | | | proteins. |
| 904 | BL00385H | 11.86 | 7.545e−28 | 355-378 | BL00385 | Alpha-L-fucosidase |
| | | | | | | proteins. |
| 904 | BL00385I | 16.17 | 1.000e−40 | 388-426 | BL00385 | Alpha-L-fucosidase |
| | | | | | | proteins. |
| 904 | PR00741A | 9.24 | 9.308e−20 | 93-108 | PR00741 | GLYCOSYL HYDROLASE |
| | | | | | | FAMILY 29 SIGNATURE |
| 904 | PR00741B | 14.23 | 1.409e−23 | 132-148 | PR00741 | GLYCOSYL HYDROLASE |
| | | | | | | FAMILY 29 SIGNATURE |
| 904 | PR00741C | 9.16 | 1.000e−25 | 151-169 | PR00741 | GLYCOSYL HYDROLASE |
| | | | | | | FAMILY 29 SIGNATURE |
| 904 | PR00741D | 16.11 | 1.621e−25 | 178-197 | PR00741 | GLYCOSYL HYDROLASE |
| | | | | | | FAMILY 29 SIGNATURE |
| 904 | PR00741E | 13.39 | 2.385e−21 | 218-234 | PR00741 | GLYCOSYL HYDROLASE |
| | | | | | | FAMILY 29 SIGNATURE |
| 904 | PR00741F | 14.66 | 8.000e−29 | 246-267 | PR00741 | GLYCOSYL HYDROLASE |
| | | | | | | FAMILY 29 SIGNATURE |
| 904 | PR00741G | 9.29 | 6.870e−26 | 321-342 | PR00741 | GLYCOSYL HYDROLASE |
| | | | | | | FAMILY 29 SIGNATURE |
| 904 | PR00741H | 10.32 | 1.409e−27 | 354-376 | PR00741 | GLYCOSYL HYDROLASE |
| | | | | | | FAMILY 29 SIGNATURE |
| 905 | BL00319C | 17.12 | 6.373e−11 | 371-404 | BL00319 | Amyloidogenic |
| | | | | | | glycoprotein |
| | | | | | | extracellular domain |
| | | | | | | proteins. |
| 905 | BL00319C | 17.12 | 9.171e−09 | 374-407 | BL00319 | Amyloidogenic |
| | | | | | | glycoprotein |
| | | | | | | extracellular domain |
| | | | | | | proteins. |
| 906 | BL00266A | 15.69 | 6.478e−12 | 41-67 | BL00266 | Somatotropin, prolactin |
| | | | | | | and related hormones |
| | | | | | | proteins. |
| 907 | BL00030A | 14.39 | 5.714e−09 | 307-325 | BL00030 | Eukaryotic RNA-binding |
| | | | | | | region RNP-1 proteins. |
| 907 | BL00048 | 6.39 | 1.225e−09 | 461-487 | BL00048 | Protamine P1 proteins. |
| 907 | BL00048 | 6.39 | 1.338e−09 | 452-478 | BL00048 | Protamine P1 proteins. |
| 907 | BL00048 | 6.39 | 1.829e−10 | 457-483 | BL00048 | Protamine P1 proteins. |
| 907 | BL00048 | 6.39 | 2.013e−09 | 552-578 | BL00048 | Protamine P1 proteins. |
| 907 | BL00048 | 6.39 | 2.125e−09 | 474-500 | BL00048 | Protamine P1 proteins. |
| 907 | BL00048 | 6.39 | 2.191e−12 | 454-480 | BL00048 | Protamine P1 proteins. |
| 907 | BL00048 | 6.39 | 2.575e−09 | 455-481 | BL00048 | Protamine P1 proteins. |
| 907 | BL00048 | 6.39 | 2.776e−10 | 450-476 | BL00048 | Protamine P1 proteins. |
| 907 | 9L00048 | 6.39 | 3.842e−10 | 453-479 | BL00048 | Protamine P1 proteins. |
| 907 | 9L00048 | 6.39 | 4.375e−11 | 456-482 | BL00048 | Protamine P1 proteins. |
| 907 | BL00048 | 6.39 | 4.488e−09 | 460-486 | BL00048 | Protamine P1 proteins. |
| 907 | BL00048 | 6.39 | 4.500e−11 | 440-466 | BL00048 | Protamine P1 proteins. |
| 907 | BL00048 | 6.39 | 4.825e−09 | 444-470 | BL00048 | Protamine P1 proteins. |
| 907 | BL00048 | 6.39 | 5.163e−09 | 555-581 | BL00048 | Protamine P1 proteins. |
| 907 | BL00048 | 6.39 | 5.382e−10 | 445-471 | BL00048 | Protamine P1 proteins. |
| 907 | BL00048 | 6.39 | 6.000e−11 | 447-473 | BL00048 | Protamine P1 proteins. |
| 907 | BL00048 | 6.39 | 6.447e−10 | 448-474 | BL00048 | Protamine P1 proteins. |
| 907 | BL00048 | 6.39 | 6.625e−09 | 449-475 | BL00048 | Protamine P1 proteins. |
| 907 | BL00048 | 6.39 | 6.625e−09 | 550-576 | BL00048 | Protamine P1 proteins. |
| 907 | BL00048 | 6.39 | 6.684e−09 | 458-484 | BL00048 | Protamine P1 proteins. |
| 907 | BL00048 | 6.39 | 7.300e−09 | 436-462 | BL00048 | Protamine P1 proteins. |
| 907 | BL00048 | 6.39 | 7.500e−11 | 442-468 | BL00048 | Protamine P1 proteins. |
| 907 | BL00048 | 6.39 | 7.525e−09 | 551-577 | BL00048 | Protamine P1 proteins. |
| 907 | BL00048 | 6.39 | 7.868e−10 | 451-477 | BL00048 | Protamine P1 proteins. |
| 907 | BL00048 | 6.39 | 7.975e−09 | 462-488 | BL00048 | Protamine P1 proteins. |
| 907 | BL00048 | 6.39 | 7.975e−09 | 476-502 | BL00048 | Protamine P1 proteins. |
| 907 | BL00048 | 6.39 | 8.000e−11 | 441-467 | BL00048 | Protamine P1 proteins. |
| 907 | 2L00048 | 6.39 | 8.500e−11 | 459-485 | BL00048 | Protamine P1 proteins. |
| 907 | BL00048 | 6.39 | 8.934e−10 | 438-464 | BL00048 | Protamine P1 proteins. |
| 907 | BL00048 | 6.39 | 9.053e−10 | 446-472 | BL00048 | Protamine P1 proteins. |
| 907 | BL00048 | 6.39 | 9.289e−10 | 443-469 | BL00048 | Protamine P1 proteins. |
| 907 | BL00048 | 6.39 | 9.408e−10 | 439-465 | BL00048 | Protamine P1 proteins. |
| 907 | PF01140D | 15.54 | 6.625e−10 | 559-593 | PF01140 | Matrix protein (MA), |
| | | | | | | p15. |
| 907 | PF01140D | 15.54 | 6.860e−09 | 435-469 | PF01140 | Matrix protein (MA), |
| | | | | | | p15. |
| 909 | BL00450D | 21.14 | 9.534e−09 | 33-56 | BL00450 | Aconitase family |
| | | | | | | proteins. |
| 909 | PR00764F | 16.89 | 9.766e−09 | 51-71 | PR00764 | COMPLEMENT C9 SIGNATURE |
| 910 | BL00048 | 6.39 | 4.938e−09 | 47-73 | BL00048 | Protamine P1 proteins. |
| 911 | BL00292A | 22.87 | 4.115e−25 | 105-138 | BL00292 | Cyclins proteins. |
| 911 | BL00292B | 20.31 | 8.826e−19 | 148-178 | BL00292 | Cyclins proteins. |
| 911 | PD02331A | 19.76 | 8.990e−11 | 121-167 | PD02331 | CYCLIN CELL CYCLE |
| | | | | | | DIVISION PROTE. |
| 912 | BL00888B | 14.79 | 1.310e−13 | 308-331 | BL00888 | Cyclic nucleotide- |
| | | | | | | binding domain |
| | | | | | | proteins. |
| 912 | BL00888B | 14.79 | 7.600e−19 | 190-213 | BL00888 | Cyclic nucleotide- |
| | | | | | | binding domain |
| | | | | | | proteins. |
| 912 | DM01513B | 6.81 | 2.833e−14 | 351-402 | DM01513 | CAMP-DEPENDENT PROTEIN |
| | | | | | | KINASE REGULATORY |
| | | | | | | CHAIN. |
| 912 | DM01513B | 6.81 | 9.871e−34 | 227-278 | DM01513 | CAMP-DEPENDENT PROTEIN |
| | | | | | | KINASE REGULATORY |
| | | | | | | CHAIN. |
| 912 | PR00103A | 9.59 | 3.483e−13 | 305-319 | PR00103 | CAMP-DEPENDENT PROTEIN |
| | | | | | | KINASE SIGNATURE |
| 912 | PR00103A | 9.59 | 5.846e−16 | 187-201 | PR00103 | CAMP-DEPENDENT PROTEIN |
| | | | | | | KINASE SIGNATURE |
| 912 | PR00103B | 13.39 | 5.950e−15 | 202-216 | PR00103 | CAMP-DEPENDENT PROTEIN |
| | | | | | | KINASE SIGNATURE |
| 912 | PR00103B | 13.39 | 7.300e−11 | 320-334 | PR00103 | CAMP-DEPENDENT PROTEIN |
| | | | | | | KINASE SIGNATURE |
| 912 | PR00103C | 15.68 | 2.800e−13 | 351-360 | PR00103 | CAMP-DEPENDENT PROTEIN |
| | | | | | | KINASE SIGNATURE |
| 912 | PR00103D | 10.83 | 2.980e−09 | 239-250 | PR00103 | CAMP-DEPENDENT PROTEIN |
| | | | | | | KINASE SIGNATURE |
| 912 | PR00103D | 10.83 | 3.700e−14 | 363-374 | PR00103 | CAMP-DEPENDENT PROTEIN |
| | | | | | | KINASE SIGNATURE |
| 912 | PR00103E | 17.80 | 2.227e−15 | 384-396 | PR00103 | CAMP-DEPENDENT PROTEIN |
| | | | | | | KINASE SIGNATURE |
| 913 | BL01154A | 18.70 | 3.000e−22 | 57-77 | BL01154 | RNA polymerases L/13 |
| | | | | | | to 16 Kd subunits |
| | | | | | | proteins. |
| 913 | BL01154B | 24.55 | 5.500e−36 | 78-113 | BL01154 | RNA polymerases L/13 |
| | | | | | | to 16 Kd subunits |
| | | | | | | proteins. |
| 914 | BL00048 | 6.39 | 9.100e−09 | 1321-1347 | BL00048 | Protamine P1 proteins. |
| 914 | BL00048 | 6.39 | 9.663e−09 | 1322-1348 | BL00048 | Protamine P1 proteins. |
| 914 | BL00291A | 4.49 | 6.690e−09 | 894-928 | BL00291 | Prion protein. |
| 914 | BL00415C | 7.09 | 3.182e−09 | 450-479 | BL00415 | Synapsins proteins. |
| 914 | BL00420A | 20.42 | 2.938e−09 | 856-884 | BL00420 | Speract receptor repeat |
| | | | | | | proteins domain |
| | | | | | | proteins. |
| 914 | BL00420A | 20.42 | 3.361e−10 | 763-791 | BL00420 | Speract receptor repeat |
| | | | | | | proteins domain |
| | | | | | | proteins. |
| 914 | BL00420A | 20.42 | 3.400e−14 | 1482-1510 | BL00420 | Speract receptor repeat |
| | | | | | | proteins domain |
| | | | | | | proteins. |
| 914 | BL00420A | 20.42 | 3.782e−11 | 617-645 | BL00420 | Speract receptor repeat |
| | | | | | | proteins domain |
| | | | | | | proteins. |
| 914 | BL00420A | 20.42 | 4.246e−10 | 808-836 | BL00420 | Speract receptor repeat |
| | | | | | | proteins domain |
| | | | | | | proteins. |
| 914 | BL00420A | 20.42 | 4.836e−10 | 1485-1513 | BL00420 | Speract receptor repeat |
| | | | | | | proteins domain |
| | | | | | | proteins. |
| 914 | BL00420A | 20.42 | 5.500e−12 | 614-642 | BL00420 | Speract receptor repeat |
| | | | | | | proteins domain |
| | | | | | | proteins. |
| 914 | BL00420A | 20.42 | 6.236e−11 | 679-707 | BL00420 | Speract receptor repeat |
| | | | | | | proteins domain |
| | | | | | | proteins. |
| 914 | BL00420A | 20.42 | 6.400e−09 | 859-887 | BL00420 | Speract receptor repeat |
| | | | | | | proteins domain |
| | | | | | | proteins. |
| 914 | BL00420A | 20.42 | 6.677e−09 | 802-830 | BL00420 | Speract receptor repeat |
| | | | | | | proteins domain |
| | | | | | | proteins. |
| 914 | BL00420A | 20.42 | 7.709e−11 | 620-648 | BL00420 | Speract receptor repeat |
| | | | | | | proteins domain |
| | | | | | | proteins. |
| 914 | BL00420A | 20.42 | 7.923e−09 | 641-669 | BL00420 | Speract receptor repeat |
| | | | | | | proteins domain |
| | | | | | | proteins. |
| 914 | BL00420A | 20.42 | 8.672e−10 | 796-824 | BL00420 | Speract receptor repeat |
| | | | | | | proteins domain |
| | | | | | | proteins. |
| 914 | BL00420A | 20.42 | 9.018e−11 | 644-672 | BL00420 | Speract receptor repeat |
| | | | | | | proteins domain |
| | | | | | | proteins. |
| 914 | BL00420A | 20.42 | 9.031e−09 | 694-722 | BL00420 | Speract receptor repeat |
| | | | | | | proteins domain |
| | | | | | | proteins. |
| 914 | BL00420A | 20.42 | 9.705e−10 | 938-966 | BL00420 | Speract receptor repeat |
| | | | | | | proteins domain |
| | | | | | | proteins. |
| 914 | BL00420A | 20.42 | 9.827e−12 | 721-749 | BL00420 | Speract receptor repeat |
| | | | | | | proteins domain |
| | | | | | | proteins. |
| 914 | BL00420A | 20.42 | 9.836e−11 | 697-725 | BL00420 | Speract receptor repeat |
| | | | | | | proteins domain |
| | | | | | | proteins. |
| 914 | BL01113A | 17.99 | 1.000e−08 | 805-831 | BL01113 | C1q domain proteins. |
| 914 | BL01113A | 17.99 | 1.000e−13 | 802-828 | BL01113 | C1q domain proteins. |
| 914 | BL01113A | 17.99 | 1.173e−09 | 814-840 | BL01113 | C1q domain proteins. |
| 914 | BL01113A | 17.99 | 1.346e−09 | 1028-1054 | BL01113 | C1q domain proteins. |
| 914 | BL01113A | 17.99 | 1.383e−10 | 1244-1270 | BL01113 | C1q domain proteins. |
| 914 | BL01113A | 17.99 | 1.462e−12 | 1473-1499 | BL01113 | C1q domain proteins. |
| 914 | BL01113A | 17.99 | 1.766e−10 | 685-711 | BL01113 | C1q domain proteins. |
| 914 | BL01113A | 17.99 | 2.023e−11 | 617-643 | BL01113 | C1q domain proteins. |
| 914 | BL01113A | 17.99 | 2.038e−09 | 817-843 | BL01113 | C1q domain proteins. |
| 914 | BL01113A | 17.99 | 2.212e−09 | 793-819 | BL01113 | C1q domain proteins. |
| 914 | BL01113A | 17.99 | 2.227e−11 | 947-973 | BL01113 | C1q domain proteins. |
| 914 | BL01113A | 17.99 | 2.385e−09 | 632-658 | BL01113 | C1q domain proteins. |
| 914 | BL01113A | 17.99 | 2.385e−12 | 1491-1517 | BL01113 | C1q domain proteins. |
| 914 | BL01113A | 17.99 | 2.432e−11 | 859-885 | BL01113 | C1q domain proteins. |
| 914 | BL01113A | 17.99 | 2.558e−09 | 620-646 | BL01113 | C1q domain proteins. |
| 914 | BL01113A | 17.99 | 2.731e−09 | 682-708 | BL01113 | C1q domain proteins. |
| 914 | BL01113A | 17.99 | 2.731e−09 | 897-923 | BL01113 | C1q domain proteins. |
| 914 | BL01113A | 17.99 | 3.489e−10 | 1488-1514 | BL01113 | C1q domain proteins. |
| 914 | BL01113A | 17.99 | 3.769e−17 | 856-882 | BL01113 | C1q domain proteins. |
| 914 | BL01113A | 17.99 | 4.068e−11 | 941-967 | BL01113 | C1q domain proteins. |
| 914 | BL01113A | 17.99 | 4.288e−09 | 676-702 | BL01113 | C1q domain proteins. |
| 914 | BL01113A | 17.99 | 4.447e−10 | 862-888 | BL01113 | C1q domain proteins. |
| 914 | BL01113A | 17.99 | 4.462e−09 | 1213-1239 | BL01113 | C1q domain proteins. |
| 914 | BL01113A | 17.99 | 4.462e−09 | 989-1015 | BL01113 | C1q domain proteins. |
| 914 | BL01113A | 17.99 | 4.638e−10 | 811-837 | BL01113 | C1q domain proteins. |
| 914 | BL01113A | 17.99 | 4.981e−09 | 748-774 | BL01113 | C1q domain proteins. |
| 914 | BL01113A | 17.99 | 5.213e−10 | 697-723 | BL01113 | C1q domain proteins. |
| 914 | BL01113A | 17.99 | 5.500e−09 | 611-637 | BL01113 | C1q domain proteins. |
| 914 | BL01113A | 17.99 | 5.500e−11 | 727-753 | BL01113 | C1q domain proteins. |
| 914 | BL01113A | 17.99 | 5.846e−09 | 826-852 | BL01113 | C1q domain proteins. |
| 914 | BL01113A | 17.99 | 5.909e−11 | 944-970 | BL01113 | C1q domain proteins. |
| 914 | BL01113A | 17.99 | 6.365e−09 | 1181-1207 | BL01113 | C1q domain proteins. |
| 914 | BL01113A | 17.99 | 6.365e−09 | 614-640 | BL01113 | C1q domain proteins. |
| 914 | BL01113A | 17.99 | 7.128e−10 | 938-964 | BL01113 | C1q domain proteins. |
| 914 | BL01113A | 17.99 | 7.404e−09 | 820-846 | BL01113 | C1q domain proteins. |
| 914 | BL01113A | 17.99 | 7.404e−09 | 850-876 | BL01113 | C1q domain proteins. |
| 914 | BL01113A | 17.99 | 7.511e−10 | 1497-1523 | BL01113 | C1q domain proteins. |
| 914 | BL01113A | 17.99 | 7.577e−09 | 1253-1279 | BL01113 | C1q domain proteins. |
| 914 | BL01113A | 17.99 | 7.702e−10 | 799-825 | BL01113 | C1q domain proteins. |
| 914 | BL01113A | 17.99 | 7.818e−14 | 623-649 | BL01113 | C1q domain proteins. |
| 914 | BL01113A | 17.99 | 7.955e−11 | 1485-1511 | BL01113 | C1q domain proteins. |
| 914 | BL01113A | 17.99 | 7.955e−11 | 796-822 | BL01113 | C1q domain proteins. |
| 914 | BL01113A | 17.99 | 8.096e−09 | 871-897 | BL01113 | C1q domain proteins. |
| 914 | BL01113A | 17.99 | 8.159e−11 | 808-834 | BL01113 | C1q domain proteins. |
| 914 | BL01113A | 17.99 | 8.364e−11 | 626-652 | BL01113 | C1q domain proteins. |
| 914 | BL01113A | 17.99 | 8.468e−10 | 865-891 | BL01113 | C1q domain proteins. |
| 914 | BL01113A | 17.99 | 8.541e−13 | 1247-1273 | BL01113 | C1q domain proteins. |
| 914 | BL01113A | 17.99 | 8.962e−09 | 1494-1520 | BL01113 | C1q domain proteins. |
| 914 | BL01113A | 17.99 | 8.962e−09 | 691-717 | BL01113 | C1q domain proteins. |
| 914 | BL01113A | 17.99 | 9.308e−09 | 703-729 | BL01113 | C1q domain proteins. |
| 914 | BL01113A | 17.99 | 9.386e−11 | 1482-1508 | BL01113 | C1q domain proteins. |
| 914 | BL01113A | 17.99 | 9.426e−10 | 706-732 | BL01113 | C1q domain proteins. |
| 914 | BL01113A | 17.99 | 9.591e−11 | 853-879 | BL01113 | C1q domain proteins. |
| 914 | BL01113A | 17.99 | 9.617e−10 | 911-937 | BL01113 | C1q domain proteins. |
| 914 | BL01113A | 17.99 | 9.654e−09 | 736-762 | BL01113 | C1q domain proteins. |
| 914 | BL01113A | 17.99 | 9.727e−14 | 986-1012 | BL01113 | C1q domain proteins. |
| 914 | BL01113A | 17.99 | 9.757e−13 | 602-628 | BL01113 | C1q domain proteins. |
| 914 | BL01113A | 17.99 | 9.809e−10 | 739-765 | BL01113 | C1q domain proteins. |
| 914 | PR00049D | 0.00 | 6.339e−09 | 1490-1504 | PR00049 | WILM'S TUMOUR PROTEIN |
| | | | | | | SIGNATURE |
| 914 | PR00049D | 0.00 | 8.322e−09 | 856-870 | PR00049 | WILM'S TUMOUR PROTEIN |
| | | | | | | SIGNATURE |
| 914 | PR00524F | 5.36 | 3.394e−09 | 906-919 | PR00524 | CHOLECYSTOKININ TYPE A |
| | | | | | | RECEPTOR SIGNATURE |
| 914 | PR00524F | 5.36 | 5.552e−10 | 1497-1510 | PR00524 | CHOLECYSTOKININ TYPE A |
| | | | | | | RECEPTOR SIGNATURE |
| 916 | BL00022B | 7.54 | 1.000e−09 | 2640-2646 | BL00022 | EGF-like domain |
| | | | | | | proteins. |
| 916 | BL00022B | 7.54 | 1.000e−09 | 444-450 | BL00022 | EGF-like domain |
| | | | | | | proteins. |
| 916 | BL00022B | 7.54 | 1.900e−09 | 2129-2135 | BL00022 | EGF-like domain |
| | | | | | | proteins. |
| 916 | BL00243H | 17.53 | 4.682e−12 | 253-278 | BL00243 | Integrins beta chain |
| | | | | | | cysteine-rich domain |
| | | | | | | proteins. |
| 916 | BL01177C | 17.39 | 3.000e−09 | 629-647 | BL01177 | Anaphylatoxin domain |
| | | | | | | proteins. |
| 916 | BL01177D | 17.50 | 3.000e−09 | 2097-2114 | BL01177 | Anaphylatoxin domain |
| | | | | | | proteins. |
| 916 | BL01177D | 17.50 | 9.333e−09 | 1321-1338 | BL01177 | Anaphylatoxin domain |
| | | | | | | proteins. |
| 916 | BL01187A | 9.98 | 2.125e−09 | 742-753 | BL01187 | Calcium-binding EGF- |
| | | | | | | like domain proteins |
| | | | | | | pattern proteins. |
| 916 | BL01187A | 9.98 | 2.286e−10 | 1575-1586 | BL01187 | Calcium-binding EGF- |
| | | | | | | like domain proteins |
| | | | | | | pattern proteins. |
| 916 | BL01187A | 9.98 | 2.286e−10 | 2059-2070 | BL01187 | Calcium-binding EGF- |
| | | | | | | like domain proteins |
| | | | | | | pattern proteins. |
| 916 | BL01187A | 9.98 | 2.875e−09 | 375-386 | BL01187 | Calcium-binding EGF- |
| | | | | | | like domain proteins |
| | | | | | | pattern proteins. |
| 916 | BL01187A | 9.98 | 2.895e−11 | 1367-1378 | BL01187 | Calcium-binding EGF- |
| | | | | | | like domain proteins |
| | | | | | | pattern proteins. |
| 916 | BL01187A | 9.98 | 3.455e−14 | 936-947 | BL01187 | Calcium-binding EGF- |
| | | | | | | like domain proteins |
| | | | | | | pattern proteins. |
| 916 | BL01187A | 9.98 | 3.571e−10 | 1492-1503 | BL01187 | Calcium-binding EGF- |
| | | | | | | like domain proteins |
| | | | | | | pattern proteins. |
| 916 | BL01187A | 9.98 | 4.000e−09 | 2142-2153 | BL01187 | Calcium-binding EGF- |
| | | | | | | like domain proteins |
| | | | | | | pattern proteins. |
| 916 | BL01187A | 9.98 | 4.000e−10 | 1039-1050 | BL01187 | Calcium-binding EGF- |
| | | | | | | like domain proteins |
| | | | | | | pattern proteins. |
| 916 | BL01187A | 9.98 | 4.316e−11 | 1937-1948 | BL01187 | Calcium-binding EGF- |
| | | | | | | like domain proteins |
| | | | | | | pattern proteins. |
| 916 | BL01187A | 9.98 | 4.375e−12 | 619-630 | BL01187 | Calcium-binding EGF- |
| | | | | | | like domain proteins |
| | | | | | | pattern proteins. |
| 916 | BL01187A | 9.98 | 4.750e−09 | 1451-1462 | BL01187 | Calcium-binding EGF- |
| | | | | | | like domain proteins |
| | | | | | | pattern proteins. |
| 916 | BL01187A | 9.98 | 5.125e−09 | 1409-1420 | BL01187 | Calcium-binding EGF- |
| | | | | | | like domain proteins |
| | | | | | | pattern proteins. |
| 916 | BL01187A | 9.98 | 5.286e−10 | 417-428 | BL01187 | Calcium-binding EGF- |
| | | | | | | like domain proteins |
| | | | | | | pattern proteins. |
| 916 | BL01187A | 9.98 | 5.500e−09 | 1616-1627 | BL01187 | Calcium-binding EGF- |
| | | | | | | like domain proteins |
| | | | | | | pattern proteins. |
| 916 | BL01187A | 9.98 | 5.714e−10 | 2335-2346 | BL01187 | Calcium-binding EGF- |
| | | | | | | like domain proteins |
| | | | | | | pattern proteins. |
| 916 | BL01187A | 9.98 | 5.875e−09 | 1242-1253 | BL01187 | Calcium-binding EGF- |
| | | | | | | like domain proteins |
| | | | | | | pattern proteins. |
| 916 | BL01187A | 9.98 | 6.250e−09 | 2020-2031 | BL01187 | Calcium-binding EGF- |
| | | | | | | like domain proteins |
| | | | | | | pattern proteins. |
| 916 | BL01187A | 9.98 | 6.625e−09 | 659-670 | BL01187 | Calcium-binding EGF- |
| | | | | | | like domain proteins |
| | | | | | | pattern proteins. |
| 916 | BL01187A | 9.98 | 7.000e−09 | 1284-1295 | BL01187 | Calcium-binding EGF- |
| | | | | | | like domain proteins |
| | | | | | | pattern proteins. |
| 916 | BL01187A | 9.98 | 7.750e−09 | 1777-1788 | BL01187 | Calcium-binding EGF- |
| | | | | | | like domain proteins |
| | | | | | | pattern proteins. |
| 916 | BL01187A | 9.98 | 8.125e−09 | 2295-2306 | BL01187 | Calcium-binding EGF- |
| | | | | | | like domain proteins |
| | | | | | | pattern proteins. |
| 916 | BL01187A | 9.98 | 9.143e−10 | 1199-1210 | BL01187 | Calcium-binding EGF- |
| | | | | | | like domain proteins |
| | | | | | | pattern proteins. |
| 916 | BL01187A | 9.98 | 9.250e−09 | 2614-2625 | BL01187 | Calcium-binding EGF- |
| | | | | | | like domain proteins |
| | | | | | | pattern proteins. |
| 916 | BL01187B | 12.04 | 1.257e−10 | 1592-1607 | BL01187 | Calcium-binding EGF- |
| | | | | | | like domain proteins |
| | | | | | | pattern proteins. |
| 916 | BL01187B | 12.04 | 1.300e−11 | 393-408 | BL01187 | Calcium-binding EGF- |
| | | | | | | like domain proteins |
| | | | | | | pattern proteins. |
| 916 | BL01187B | 12.04 | 1.391e−13 | 435-450 | BL01187 | Calcium-binding EGF- |
| | | | | | | like domain proteins |
| | | | | | | pattern proteins. |
| 916 | BL01187B | 12.04 | 1.450e−14 | 1511-1526 | BL01187 | Calcium-binding EGF- |
| | | | | | | like domain proteins |
| | | | | | | pattern proteins. |
| 916 | BL01187B | 12.04 | 1.667e−12 | 1913-1928 | BL01187 | Calcium-binding EGF- |
| | | | | | | like domain proteins |
| | | | | | | pattern proteins. |
| 916 | BL01187B | 12.04 | 2.000e−12 | 596-611 | BL01187 | Calcium-binding EGF- |
| | | | | | | like domain proteins |
| | | | | | | pattern proteins. |
| 916 | BL01187B | 12.04 | 2.059e−15 | 2273-2288 | BL01187 | Calcium-binding EGF- |
| | | | | | | like domain proteins |
| | | | | | | pattern proteins. |
| 916 | BL01187B | 12.04 | 2.059e−15 | 2631-2646 | BL01187 | Calcium-binding EGF- |
| | | | | | | like domain proteins |
| | | | | | | pattern proteins. |
| 916 | BL01187B | 12.04 | 2.565e−13 | 1427-1442 | BL01187 | Calcium-binding EGF- |
| | | | | | | like domain proteins |
| | | | | | | pattern proteins. |
| 916 | BL01187B | 12.04 | 2.957e−13 | 2160-2175 | BL01187 | Calcium-binding EGF- |
| | | | | | | like domain proteins |
| | | | | | | pattern proteins. |
| 916 | BL01187B | 12.04 | 2.957e−13 | 2672-2687 | BL01187 | Calcium-binding EGF- |
| | | | | | | like domain proteins |
| | | | | | | pattern proteins. |
| 916 | BL01187B | 12.04 | 3.077e−16 | 2590-2605 | BL01187 | Calcium-binding EGF- |
| | | | | | | like domain proteins |
| | | | | | | pattern proteins. |
| 916 | BL01187B | 12.04 | 3.348e−13 | 912-927 | BL01187 | Calcium-binding EGF- |
| | | | | | | like domain proteins |
| | | | | | | pattern proteins. |
| 916 | BL01187B | 12.04 | 3.700e−14 | 1633-1648 | BL01187 | Calcium-binding EGF- |
| | | | | | | like domain proteins |
| | | | | | | pattern proteins. |
| 916 | BL01187B | 12.04 | 4.130e−13 | 1753-1768 | BL01187 | Calcium-binding EGF- |
| | | | | | | like domain proteins |
| | | | | | | pattern proteins. |
| 916 | BL01187B | 12.04 | 4.150e−14 | 1955-1970 | BL01187 | Calcium-binding EGF- |
| | | | | | | like domain proteins |
| | | | | | | pattern proteins. |
| 916 | BL01187B | 12.04 | 4.176e−15 | 2352-2367 | BL01187 | Calcium-binding EGF- |
| | | | | | | like domain proteins |
| | | | | | | pattern proteins. |
| 916 | BL01187B | 12.04 | 4.300e−11 | 870-885 | BL01187 | Calcium-binding EGF- |
| | | | | | | like domain proteins |
| | | | | | | pattern proteins. |
| 916 | BL01187B | 12.04 | 4.333e−12 | 759-774 | BL01187 | Calcium-binding EGF- |
| | | | | | | like domain proteins |
| | | | | | | pattern proteins. |
| 916 | BL01187B | 12.04 | 4.522e−13 | 1343-1358 | BL01187 | Calcium-binding EGF- |
| | | | | | | like domain proteins |
| | | | | | | pattern proteins. |
| 916 | BL01187B | 12.04 | 4.667e−12 | 1217-1232 | BL01187 | Calcium-binding EGF- |
| | | | | | | like domain proteins |
| | | | | | | pattern proteins. |
| 916 | BL01187B | 12.04 | 5.050e−14 | 2438-2453 | BL01187 | Calcium-binding EGF- |
| | | | | | | like domain proteins |
| | | | | | | pattern proteins. |
| 916 | BL01187B | 12.04 | 5.235e−15 | 635-650 | BL01187 | Calcium-binding EGF- |
| | | | | | | like domain proteins |
| | | | | | | pattern proteins. |
| 916 | BL01187B | 12.04 | 5.667e−12 | 1794-1809 | BL01187 | Calcium-binding EGF- |
| | | | | | | like domain proteins |
| | | | | | | pattern proteins. |
| 916 | BL01187B | 12.04 | 6.087e−13 | 1470-1485 | BL01187 | Calcium-binding EGF- |
| | | | | | | like domain proteins |
| | | | | | | pattern proteins. |
| 916 | BL01187B | 12.04 | 6.100e−11 | 1057-1072 | BL01187 | Calcium-binding EGF- |
| | | | | | | like domain proteins |
| | | | | | | pattern proteins. |
| 916 | BL01187B | 12.04 | 6.400e−14 | 2712-2727 | BL01187 | Calcium-binding EGF- |
| | | | | | | like domain proteins |
| | | | | | | pattern proteins. |
| 916 | BL01187B | 12.04 | 6.667e−12 | 1996-2011 | BL01187 | Calcium-binding EGF- |
| | | | | | | like domain proteins |
| | | | | | | pattern proteins. |
| 916 | BL01187B | 12.04 | 6.824e−15 | 2120-2135 | BL01187 | Calcium-binding EGF- |
| | | | | | | like domain proteins |
| | | | | | | pattern proteins. |
| 916 | BL01187B | 12.04 | 6.870e−13 | 2549-2564 | BL01187 | Calcium-binding EGF- |
| | | | | | | like domain proteins |
| | | | | | | pattern proteins. |
| 916 | BL01187B | 12.04 | 7.333e−12 | 2312-2327 | BL01187 | Calcium-binding EGF- |
| | | | | | | like domain proteins |
| | | | | | | pattern proteins. |
| 916 | BL01187B | 12.04 | 7.686e−10 | 1385-1400 | BL01187 | Calcium-binding EGF- |
| | | | | | | like domain proteins |
| | | | | | | pattern proteins. |
| 916 | BL01187B | 12.04 | 7.750e−14 | 2078-2093 | BL01187 | Calcium-binding EGF- |
| | | | | | | like domain proteins |
| | | | | | | pattern proteins. |
| 916 | BL01187B | 12.04 | 7.750e−14 | 2794-2809 | BL01187 | Calcium-binding EGF- |
| | | | | | | like domain proteins |
| | | | | | | pattern proteins. |
| 916 | BL01187B | 12.04 | 8.000e−12 | 1302-1317 | BL01187 | Calcium-binding EGF- |
| | | | | | | like domain proteins |
| | | | | | | pattern proteins. |
| 916 | BL01187B | 12.04 | 8.500e−17 | 2753-2768 | BL01187 | Calcium-binding EGF- |
| | | | | | | like domain proteins |
| | | | | | | pattern proteins. |
| 916 | BL01187B | 12.04 | 8.650e−14 | 677-692 | BL01187 | Calcium-binding EGF- |
| | | | | | | like domain proteins |
| | | | | | | pattern proteins. |
| 916 | BL01187B | 12.04 | 8.667e−12 | 2396-2411 | BL01187 | Calcium-binding EGF- |
| | | | | | | like domain proteins |
| | | | | | | pattern proteins. |
| 916 | BL01187B | 12.04 | 8.826e−13 | 1175-1190 | BL01187 | Calcium-binding EGF- |
| | | | | | | like domain proteins |
| | | | | | | pattern proteins. |
| 916 | BL01187B | 12.04 | 8.826e−13 | 2036-2051 | BL01187 | Calcium-binding EGF- |
| | | | | | | like domain proteins |
| | | | | | | pattern proteins. |
| 916 | BL01187B | 12.04 | 8.826e−13 | 718-733 | BL01187 | Calcium-binding EGF- |
| | | | | | | like domain proteins |
| | | | | | | pattern proteins. |
| 916 | BL01187B | 12.04 | 9.550e−14 | 1260-1275 | BL01187 | Calcium-binding EGF- |
| | | | | | | like domain proteins |
| | | | | | | pattern proteins. |
| 916 | BL01187B | 12.04 | 9.609e−13 | 1551-1566 | BL01187 | Calcium-binding EGF- |
| | | | | | | like domain proteins |
| | | | | | | pattern proteins. |
| 916 | DM00215 | 19.43 | 1.000e−09 | 530-562 | DM00215 | PROLINE-RICH PROTEIN 3. |
| 916 | DM00215 | 19.43 | 6.063e−12 | 545-577 | DM00215 | PROLINE-RICH PROTEIN 3. |
| 916 | DM00864B | 11.34 | 4.896e−10 | 1960-1978 | DM00864 | EGF-LIKE DOMAIN. |
| 916 | DM00864B | 11.34 | 6.577e−09 | 2799-2817 | DM00864 | EGF-LIKE DOMAIN. |
| 916 | DM00864B | 11.34 | 7.179e−10 | 601-619 | DM00864 | EGF-LIKE DOMAIN. |
| 916 | DM00864B | 11.34 | 8.732e−09 | 1556-1574 | DM00864 | EGF-LIKE DOMAIN. |
| 916 | PR00010A | 11.79 | 4.115e−11 | 938-949 | PR00010 | TYPE II EGF-LIKE |
| | | | | | | SIGNATURE |
| 916 | PR00010C | 11.16 | 1.000e−10 | 640-650 | PR00010 | TYPE II EGF-LIKE |
| | | | | | | SIGNATURE |
| 916 | PR00010C | 11.16 | 1.214e−09 | 2443-2453 | PR00010 | TYPE II EGF-LIKE |
| | | | | | | SIGNATURE |
| 916 | PR00010C | 11.16 | 2.286e−09 | 2758-2768 | PR00010 | TYPE II EGF-LIKE |
| | | | | | | SIGNATURE |
| 916 | PR00010C | 11.16 | 2.667e−11 | 1348-1358 | PR00010 | TYPE II EGF-LIKE |
| | | | | | | SIGNATURE |
| 916 | PR00010C | 11.16 | 3.357e−09 | 1918-1928 | PR00010 | TYPE II EGF-LIKE |
| | | | | | | SIGNATURE |
| 916 | PR00010C | 11.16 | 3.455e−10 | 2125-2135 | PR00010 | TYPE II EGF-LIKE |
| | | | | | | SIGNATURE |
| 916 | PR00010C | 11.16 | 3.571e−09 | 2165-2175 | PR00010 | TYPE II EGF-LIKE |
| | | | | | | SIGNATURE |
| 916 | PR00010C | 11.16 | 4.429e−09 | 2717-2727 | PR00010 | TYPE II EGF-LIKE |
| | | | | | | SIGNATURE |
| 916 | PR00010C | 11.16 | 4.818e−10 | 2357-2367 | PR00010 | TYPE II EGF-LIKE |
| | | | | | | SIGNATURE |
| 916 | PR00010C | 11.16 | 5.333e−11 | 917-927 | PR00010 | TYPE II EGF-LIKE |
| | | | | | | SIGNATURE |
| 916 | PR00010C | 11.16 | 5.364e−10 | 440-450 | PR00010 | TYPE II EGF-LIKE |
| | | | | | | SIGNATURE |
| 916 | PR00010C | 11.16 | 5.500e−09 | 2317-2327 | PR00010 | TYPE II EGF-LIKE |
| | | | | | | SIGNATURE |
| 916 | PR00010C | 11.16 | 6.182e−10 | 2677-2687 | PR00010 | TYPE II EGF-LIKE |
| | | | | | | SIGNATURE |
| 916 | PR00010C | 11.16 | 6.357e−09 | 1638-1648 | PR00010 | TYPE II EGF-LIKE |
| | | | | | | SIGNATURE |
| 916 | PR00010C | 11.16 | 7.000e−11 | 2636-2646 | PR00010 | TYPE II EGF-LIKE |
| | | | | | | SIGNATURE |
| 916 | PR00010C | 11.16 | 7.545e−10 | 2595-2605 | PR00010 | TYPE II EGF-LIKE |
| | | | | | | SIGNATURE |
| 916 | PR00010C | 11.16 | 9.143e−09 | 1265-1275 | PR00010 | TYPE II EGF-LIKE |
| | | | | | | SIGNATURE |
| 916 | PR00010C | 11.16 | 9.727e−10 | 2278-2288 | PR00010 | TYPE II EGF-LIKE |
| | | | | | | SIGNATURE |
| 916 | PR00010C | 11.16 | 9.727e−10 | 2799-2809 | PR00010 | TYPE II EGF-LIKE |
| | | | | | | SIGNATURE |
| 916 | PR00907B | 11.29 | 1.000e−08 | 2790-2806 | PR00907 | THROMBOMODULIN |
| | | | | | | SIGNATURE |
| 916 | PR00907B | 11.29 | 2.756e−09 | 2627-2643 | PR00907 | THROMBOMODULIN |
| | | | | | | SIGNATURE |
| 916 | PR00907B | 11.29 | 5.957e−12 | 2708-2724 | PR00907 | THROMBOMODULIN |
| | | | | | | SIGNATURE |
| 916 | PR00907B | 11.29 | 7.805e−09 | 2586-2602 | PR00907 | THROMBOMODULIN |
| | | | | | | SIGNATURE |
| 916 | PR00907D | 5.59 | 8.609e−09 | 2278-2303 | PR00907 | THROMBOMODULIN |
| | | | | | | SIGNATURE |
| 916 | PR00907G | 11.63 | 2.135e−09 | 1592-1618 | PR00907 | THROMBOMODULIN |
| | | | | | | SIGNATURE |
| 916 | PR00907G | 11.63 | 3.189e−09 | 1633-1659 | PR00907 | THROMBOMODULIN |
| | | | | | | SIGNATURE |
| 916 | PR00907G | 11.63 | 3.189e−09 | 2273-2299 | PR00907 | THROMBOMODULIN |
| | | | | | | SIGNATURE |
| 916 | PR00907G | 11.63 | 3.673e−11 | 1260-1286 | PR00907 | THROMBOMODULIN |
| | | | | | | SIGNATURE |
| 916 | PR00907G | 11.63 | 5.546e−12 | 2120-2146 | PR00907 | THROMBOMODULIN |
| | | | | | | SIGNATURE |
| 916 | PR00907G | 11.63 | 6.514e−09 | 718-744 | PR00907 | THROMBOMODULIN |
| | | | | | | SIGNATURE |
| 916 | PR00907G | 11.63 | 8.378e−09 | 1470-1496 | PR00907 | THROMBOMODULIN |
| | | | | | | SIGNATURE |
| 916 | PR00907G | 11.63 | 9.321e−10 | 2396-2422 | PR00907 | THROMBOMODULIN |
| | | | | | | SIGNATURE |
| 916 | PR00907G | 11.63 | 9.406e−10 | 1343-1369 | PR00907 | THROMBOMODULIN |
| | | | | | | SIGNATURE |
| 917 | BL00023 | 24.31 | 2.969e−28 | 332-368 | BL00023 | Type II fibronectin |
| | | | | | | collagen-binding domain |
| | | | | | | proteins. |
| 917 | BL00023 | 24.31 | 4.682e−35 | 390-426 | BL00023 | Type II fibronectin |
| | | | | | | collagen-binding domain |
| | | | | | | proteins. |
| 917 | BL00023 | 24.31 | 9.526e−24 | 274-310 | BL00023 | Type II fibronectin |
| | | | | | | collagen-binding domain |
| | | | | | | proteins. |
| 917 | BL00024A | 11.49 | 2.800e−13 | 145-155 | BL00024 | Hemopexin domain |
| | | | | | | proteins. |
| 917 | BL00024B | 21.53 | 9.591e−33 | 166-199 | BL00024 | Hemopexin domain |
| | | | | | | proteins. |
| 917 | BL00024C | 22.98 | 1.000e−40 | 214-262 | BL00024 | Hemopexin domain |
| | | | | | | proteins. |
| 917 | BL00024D | 17.28 | 3.571e−35 | 442-473 | BL00024 | Hemopexin domain |
| | | | | | | proteins. |
| 917 | BL00024E | 7.58 | 6.625e−16 | 481-494 | BL00024 | Hemopexin domain |
| | | | | | | proteins. |
| 917 | BL00024F | 11.30 | 2.038e−22 | 523-543 | BL00024 | Hemopexin domain |
| | | | | | | proteins. |
| 917 | BL00024G | 13.31 | 7.158e−14 | 561-573 | BL00024 | Hemopexin domain |
| | | | | | | proteins. |
| 917 | BL00024H | 11.35 | 1.794e−11 | 581-592 | BL00024 | Hemopexin domain |
| | | | | | | proteins. |
| 917 | BL00024H | 11.35 | 4.600e−09 | 629-640 | BL00024 | Hemopexin domain |
| | | | | | | proteins. |
| 917 | BL00142 | 8.38 | 6.000e−12 | 448-458 | BL00142 | Neutral zinc |
| | | | | | | metallopeptidases, |
| | | | | | | zinc-binding region |
| | | | | | | proteins. |
| 917 | BL00546A | 19.62 | 8.105e−30 | 125-154 | BL00546 | Matrixins cysteine |
| | | | | | | switch. |
| 917 | BL00546B | 20.11 | 1.000e−40 | 215-258 | BL00546 | Matrixins cysteine |
| | | | | | | switch. |
| 917 | BL00546C | 16.41 | 5.714e−35 | 442-473 | BL00546 | Matrixins cysteine |
| | | | | | | switch. |
| 917 | BL00546D | 10.34 | 4.000e−16 | 481-494 | BL00546 | Matrixins cysteine |
| | | | | | | switch. |
| 917 | BL00546E | 10.23 | 8.269e−23 | 523-543 | BL00546 | Matrixins cysteine |
| | | | | | | switch. |
| 917 | BL00546F | 12.40 | 7.955e−14 | 561-573 | BL00546 | Matrixins cysteine |
| | | | | | | switch. |
| 917 | BL00546G | 16.84 | 8.269e−17 | 582-601 | BL00546 | Matrixins cysteine |
| | | | | | | switch. |
| 917 | BL00546H | 10.76 | 1.257e−10 | 678-688 | BL00546 | Matrixins cysteine |
| | | | | | | switch. |
| 917 | BL00546H | 10.76 | 4.073e−09 | 629-639 | BL00546 | Matrixins cysteine |
| | | | | | | switch. |
| 917 | PR00013A | 12.26 | 5.333e−09 | 336-345 | PR00013 | FIBRONECTIN TYPE II |
| | | | | | | REPEAT SIGNATURE |
| 917 | PR00013A | 12.26 | 5.500e−13 | 394-403 | PR00013 | FIBRONECTIN TYPE II |
| | | | | | | REPEAT SIGNATURE |
| 917 | PR00013A | 12.26 | 7.833e−09 | 278-287 | PR00013 | FIBRONECTIN TYPE II |
| | | | | | | REPEAT SIGNATURE |
| 917 | PR00013B | 14.75 | 1.237e−11 | 405-417 | PR00013 | FIBRONECTIN TYPE II |
| | | | | | | REPEAT SIGNATURE |
| 917 | PR00013B | 14.75 | 4.000e−09 | 347-359 | PR00013 | FIBRONECTIN TYPE II |
| | | | | | | REPEAT SIGNATURE |
| 917 | PR00013C | 12.29 | 1.000e−20 | 422-437 | PR00013 | FIBRONECTIN TYPE II |
| | | | | | | REPEAT SIGNATURE |
| 917 | PR00013C | 12.29 | 3.571e−15 | 364-379 | PR00013 | FIBRONECTIN TYPE II |
| | | | | | | REPEAT SIGNATURE |
| 917 | PR00013C | 12.29 | 7.800e−14 | 306-321 | PR00013 | FIBRONECTIN TYPE II |
| | | | | | | REPEAT SIGNATURE |
| 917 | PR00138A | 15.14 | 8.773e−16 | 145-158 | PR00138 | MATRIXIN SIGNATURE |
| 917 | PR00138B | 15.82 | 5.500e−18 | 192-207 | PR00138 | MATRIXIN SIGNATURE |
| 917 | PR00138C | 16.41 | 1.783e−32 | 215-243 | PR00138 | MATRIXIN SIGNATURE |
| 917 | PR00138D | 16.56 | 8.920e−28 | 448-473 | PR00138 | MATRIXIN SIGNATURE |
| 917 | PR00138E | 6.01 | 5.000e−16 | 481-494 | PR00138 | MATRIXIN SIGNATURE |
| 917 | PR00480B | 15.41 | 2.286e−09 | 443-461 | PR00480 | ASTACIN FAMILY |
| | | | | | | SIGNATURE |
| 918 | PF01130B | 21.40 | 1.537e−15 | 223-268 | PF01130 | CD36 family. |
| 918 | PF01130C | 22.91 | 1.851e−18 | 278-327 | PF01130 | CD36 family. |
| 918 | PF01130D | 26.65 | 1.955e−23 | 360-413 | PF01130 | CD36 family. |
| 920 | BL01289A | 12.18 | 8.200e−33 | 141-167 | BL01289 | TSC-22/dip/bun |
| | | | | | | family proteins. |
| 920 | BL01289B | 10.45 | 8.071e−30 | 168-197 | BL01289 | TSC-22/dip/bun |
| | | | | | | family proteins. |
| 920 | DM00475B | 12.12 | 5.891e−10 | 162-181 | DM00475 | w LOW TRANSPOSASE SAPA |
| | | | | | | 12K. |
| 921 | PD01719A | 12.89 | 2.111e−09 | 416-443 | PD01719 | PRECURSOR GLYCOPROTEIN |
| | | | | | | SIGNAL RE. |
| 921 | PR00711D | 7.91 | 9.697e−09 | 255-272 | PR00711 | ATRIAL NATRIURETIC |
| | | | | | | PEPTIDE SIGNATURE |
| 923 | BL00139A | 10.29 | 6.478e−14 | 107-116 | BL00139 | Eukaryotic thiol |
| | | | | | | (cysteine) proteases |
| | | | | | | cysteine proteins. |
| 923 | BL00139B | 10.19 | 6.400e−10 | 152-160 | BL00139 | Eukaryotic thiol |
| | | | | | | (cysteine) proteases |
| | | | | | | cysteine proteins. |
| 923 | BL00139D | 9.24 | 9.182e−18 | 298-314 | BL00139 | Eukaryotic thiol |
| | | | | | | (cysteine) proteases |
| | | | | | | cysteine proteins. |
| 923 | PR00705A | 10.55 | 1.529e−16 | 107-122 | PR00705 | PAPAIN CYSTEINE |
| | | | | | | PROTEASE (C1) FAMILY |
| | | | | | | SIGNATURE |
| 923 | PR00705B | 10.22 | 4.115e−10 | 283-293 | PR00705 | PAPAIN CYSTEINE |
| | | | | | | PROTEASE (C1) FAMILY |
| | | | | | | SIGNATURE |
| 925 | PF01140D | 15.54 | 6.547e−09 | 176-210 | PF01140 | Matrix protein (MA), |
| | | | | | | p15. |
| 926 | BL00755A | 13.96 | 4.750e−14 | 50-68 | BL00755 | Protein secY proteins. |
| 926 | BL00755B | 12.12 | 7.469e−18 | 87-106 | BL00755 | Protein secY proteins. |
| 926 | BL00755C | 14.21 | 6.885e−13 | 203-218 | BL00755 | Protein secY proteins. |
| 926 | BL00755D | 11.88 | 4.214e−17 | 291-309 | BL00755 | Protein secY proteins. |
| 926 | BL00755E | 26.66 | 1.923e−26 | 385-425 | BL00755 | Protein secY proteins. |
| 926 | PR00303B | 10.17 | 9.769e−09 | 86-106 | PR00303 | PREPROTEIN TRANSLOCASE |
| | | | | | | SECY SUBUNIT SIGNATURE |
| 928 | BL01019A | 13.20 | 1.000e−40 | 69-108 | BL01019 | ADP-ribosylation |
| | | | | | | factors family |
| | | | | | | proteins. |
| 928 | BL01019B | 19.49 | 1.000e−40 | 113-167 | BL01019 | ADP-ribosylation |
| | | | | | | factors family |
| | | | | | | proteins. |
| 928 | BL01019C | 12.52 | 3.842e−26 | 170-195 | BL01019 | ADP-ribosylation |
| | | | | | | factors family |
| | | | | | | proteins. |
| 928 | BL01020C | 15.35 | 8.200e−15 | 97-147 | BL01020 | SAR1 family proteins. |
| 928 | PR00328A | 10.62 | 5.213e−11 | 41-64 | PR00328 | GTP-BINDING SAR1 |
| | | | | | | PROTEIN SIGNATURE |
| 928 | PR00328C | 13.16 | 2.444e−12 | 96-121 | PR00328 | GTP-BINDING SAR1 |
| | | | | | | PROTEIN SIGNATURE |
| 930 | BL00824A | 13.78 | 8.650e−14 | 55-69 | BL00824 | Elongation factor 1 |
| | | | | | | beta/beta′/delta chain |
| | | | | | | proteins. |
| 930 | BL00824B | 9.21 | 2.080e−21 | 132-151 | BL00824 | Elongation factor 1 |
| | | | | | | beta/beta′/delta chain |
| | | | | | | proteins. |
| 930 | BL00824C | 14.58 | 1.000e−40 | 165-202 | BL00824 | Elongation factor 1 |
| | | | | | | beta/beta′/delta chain |
| | | | | | | proteins. |
| 930 | BL00824D | 14.04 | 6.192e−39 | 203-237 | BL00824 | Elongation factor 1 |
| | | | | | | beta/beta′/delta chain |
| | | | | | | proteins. |
| 930 | BL00824E | 12.49 | 3.333e−19 | 246-261 | BL00824 | Elongation factor 1 |
| | | | | | | beta/beta′/delta chain |
| | | | | | | proteins. |
| 931 | BL00291A | 4.49 | 9.192e−11 | 140-174 | BL00291 | Prion protein. |
| 931 | PD01234B | 15.53 | 5.179e−09 | 227-244 | PD01234 | PROTEIN NUCLEAR |
| | | | | | | BROMODOMAIN TRANS. |
| 931 | PR00049D | 0.00 | 7.504e−11 | 85-99 | PR00049 | WILM'S TUMOUR PROTEIN |
| | | | | | | SIGNATURE |
| 931 | PR00049D | 0.00 | 9.214e−10 | 270-284 | PR00049 | WILM'S TUMOUR PROTEIN |
| | | | | | | SIGNATURE |
| 931 | PR00910A | 2.51 | 9.571e−09 | 272-284 | PR00910 | LUTEOVIRUS ORF6 PROTEIN |
| | | | | | | SIGNATURE |
| 933 | BL00415O | 3.44 | 3.368e−09 | 289-326 | BL00415 | Synapsins proteins. |
| 933 | BL01088A | 7.26 | 4.000e−17 | 16-30 | BL01088 | CAP protein. |
| 933 | BL01088B | 15.91 | 1.000e−40 | 150-191 | BL01088 | CAP protein. |
| 933 | BL01088C | 9.97 | 6.684e−26 | 194-216 | BL01088 | CAP protein. |
| 933 | BL01088D | 14.32 | 4.130e−36 | 264-296 | BL01088 | CAP protein. |
| 933 | BL01088E | 15.83 | 1.375e−28 | 326-353 | BL01088 | CAP protein. |
| 933 | BL01088F | 14.83 | 1.000e−40 | 358-403 | BL01088 | CAP protein. |
| 933 | BL01088G | 12.70 | 1.000e−40 | 408-451 | BL01088 | CAP protein. |
| 933 | BL01088H | 12.10 | 7.353e−24 | 453-472 | BL01088 | CAP protein. |
| 933 | PR00049D | 0.00 | 6.143e−11 | 235-249 | PR00049 | WILM'S TUMOUR PROTEIN |
| | | | | | | SIGNATURE |
| 933 | PR00049D | 0.00 | 8.714e−11 | 236-250 | PR00049 | WILM'S TUMOUR PROTEIN |
| | | | | | | SIGNATURE |
| 933 | PR00049D | 0.00 | 8.714e−11 | 237-251 | PR00049 | WILM'S TUMOUR PROTEIN |
| | | | | | | SIGNATURE |
| 933 | PR00049D | 0.00 | 8.790e−11 | 238-252 | PR00049 | WILM'S TUMOUR PROTEIN |
| | | | | | | SIGNATURE |
| 934 | BL00237A | 27.68 | 8.875e−27 | 228-267 | BL00237 | G-protein coupled |
| | | | | | | receptors proteins. |
| 934 | BL00237B | 5.28 | 9.438e−11 | 339-350 | BL00237 | G-protein coupled |
| | | | | | | receptors proteins. |
| 934 | BL00237C | 13.19 | 3.172e−12 | 366-392 | BL00237 | G-protein coupled |
| | | | | | | receptors proteins. |
| 934 | BL00237D | 11.23 | 9.308e−11 | 423-439 | BL00237 | G-protein coupled |
| | | | | | | receptors proteins. |
| 934 | PR00237A | 11.48 | 8.714e−12 | 164-188 | PR00237 | RHODOPSIN-LIKE GPCR |
| | | | | | | SUPERFAMILY SIGNATURE |
| 934 | PR00237B | 13.50 | 4.724e−11 | 197-218 | PR00237 | RHODOPSIN-LIKE GPCR |
| | | | | | | SUPERFAMILY SIGNATURE |
| 934 | PR00237C | 15.69 | 8.800e−18 | 242-264 | PR00237 | RHODOPSIN-LIKE GPCR |
| | | | | | | SUPERFAMILY SIGNATURE |
| 934 | PR00237D | 8.94 | 8.875e−10 | 278-299 | PR00237 | RHODOPSIN-LIKE GPCR |
| | | | | | | SUPERFAMILY SIGNATURE |
| 934 | PR00237E | 13.03 | 7.000e−11 | 331-354 | PR00237 | RHODOPSIN-LIKE GPCR |
| | | | | | | SUPERFAMILY SIGNATURE |
| 934 | PR00237F | 13.57 | 6.516e−11 | 371-395 | PR00237 | RHODOPSIN-LIKE GPCR |
| | | | | | | SUPERFAMILY SIGNATURE |
| 934 | PR00237G | 19.63 | 1.621e−13 | 413-439 | PR00237 | RHODOPSIN-LIKE GPCR |
| | | | | | | SUPERFAMILY SIGNATURE |
| 934 | PR00425C | 13.23 | 3.036e−10 | 228-247 | PR00425 | BRADYKININ RECEPTOR |
| | | | | | | SIGNATURE |
| 934 | PR00571E | 19.50 | 2.333e−09 | 227-238 | PR00571 | ENDOTHELIN-B RECEPTOR |
| | | | | | | SIGNATURE |
| 934 | PR00908A | 7.78 | 5.909e−19 | 65-81 | PR00908 | THROMBIN RECEPTOR |
| | | | | | | SIGNATURE |
| 934 | PR00908B | 16.82 | 2.029e−20 | 148-164 | PR00908 | THROMBIN RECEPTOR |
| | | | | | | SIGNATURE |
| 934 | PR00908C | 9.93 | 1.310e−19 | 190-203 | PR00908 | THROMBIN RECEPTOR |
| | | | | | | SIGNATURE |
| 934 | PR00908D | 11.10 | 4.429e−19 | 269-283 | PR00908 | THROMBIN RECEPTOR |
| | | | | | | SIGNATURE |
| 934 | PR00908E | 3.45 | 1.000e−17 | 326-339 | PR00908 | THROMBIN RECEPTOR |
| | | | | | | SIGNATURE |
| 934 | PR00908F | 8.01 | 1.000e−23 | 355-373 | PR00908 | THROMBIN RECEPTOR |
| | | | | | | SIGNATURE |
| 934 | PR00908G | 13.24 | 5.865e−24 | 438-456 | PR00908 | THROMBIN RECEPTOR |
| | | | | | | SIGNATURE |
| 934 | PR00908H | 11.64 | 1.450e−23 | 467-484 | PR00908 | THROMBIN RECEPTOR |
| | | | | | | SIGNATURE |
| 935 | BL00018 | 7.41 | 1.000e−09 | 79-91 | BL00018 | EF-hand calcium-binding |
| | | | | | | domain proteins. |
| 935 | BL00018 | 7.41 | 3.400e−12 | 152-164 | BL00018 | EF-hand calcium-binding |
| | | | | | | domain proteins. |
| 935 | BL00303B | 26.15 | 6.344e−10 | 67-103 | BL00303 | S-100/ICaBP type |
| | | | | | | calcium binding |
| | | | | | | protein. |
| 935 | PR00450C | 12.22 | 4.480e−10 | 111-132 | PR00450 | RECOVERIN FAMILY |
| | | | | | | SIGNATURE |
| 935 | PR00450C | 12.22 | 5.320e−10 | 38-59 | PR00450 | RECOVERIN FAMILY |
| | | | | | | SIGNATURE |
| 935 | PR00450C | 12.22 | 6.520e−10 | 74-95 | PR00450 | RECOVERIN FAMILY |
| | | | | | | SIGNATURE |
| 936 | BL00030A | 14.39 | 4.500e−10 | 107-125 | BL00030 | Eukaryotic RNA-binding |
| | | | | | | region RNP-1 proteins. |
| 936 | BL00030B | 7.03 | 1.474e−09 | 146-155 | BL00030 | Eukaryotic RNA-binding |
| | | | | | | region RNP-1 proteins. |
| 940 | PR00401B | 12.94 | 3.667e−09 | 129-139 | PR00401 | SH2 DOMAIN SIGNATURE |
| 943 | BL01052A | 16.12 | 7.618e−32 | 35-66 | BL01052 | Calponin family repeat |
| | | | | | | proteins. |
| 943 | BL01052B | 15.31 | 8.031e−26 | 84-109 | BL01052 | Calponin family repeat |
| | | | | | | proteins. |
| 943 | BL01052C | 18.51 | 6.806e−40 | 119-158 | BL01052 | Calponin family repeat |
| | | | | | | proteins. |
| 943 | BL01052D | 10.26 | 1.000e−24 | 206-225 | BL01052 | Calponin family repeat |
| | | | | | | proteins. |
| 943 | PR00888A | 11.87 | 2.350e−16 | 35-49 | PR00888 | SMOOTH MUSCLE |
| | | | | | | PROTEIN/CALPONIN FAMILY |
| | | | | | | SIGNATURE |
| 943 | PR00888B | 13.72 | 2.350e−12 | 54-67 | PR00888 | SMOOTH MUSCLE |
| | | | | | | PROTEIN/CALPONIN FAMILY |
| | | | | | | SIGNATURE |
| 943 | PR00888C | 12.27 | 5.179e−18 | 84-99 | PR00888 | SMOOTH MUSCLE |
| | | | | | | PROTEIN/CALPONIN FAMILY |
| | | | | | | SIGNATURE |
| 943 | PR00888D | 16.09 | 4.273e−17 | 120-136 | PR00888 | SMOOTH MUSCLE |
| | | | | | | PROTEIN/CALPONIN FAMILY |
| | | | | | | SIGNATURE |
| 943 | PR00888E | 11.81 | 3.432e−16 | 136-151 | PR00888 | SMOOTH MUSCLE |
| | | | | | | PROTEIN/CALPONIN FAMILY |
| | | | | | | SIGNATURE |
| 943 | PR00888F | 7.44 | 4.825e−14 | 157-171 | PR00888 | SMOOTH MUSCLE |
| | | | | | | PROTEIN/CALPONIN FAMILY |
| | | | | | | SIGNATURE |
| 943 | PR00888G | 12.73 | 8.759e−14 | 194-207 | PR00888 | SMOOTH MUSCLE |
| | | | | | | PROTEIN/CALPONIN FAMILY |
| | | | | | | SIGNATURE |
| 943 | PR00888H | 9.97 | 5.154e−20 | 207-222 | PR00888 | SMOOTH MUSCLE |
| | | | | | | PROTEIN/CALPONIN FAMILY |
| | | | | | | SIGNATURE |
| 943 | PR00889E | 12.18 | 2.726e−12 | 203-218 | PR00889 | CALPONIN SIGNATURE |
| 943 | PR00890A | 8.61 | 9.775e−21 | 66-85 | PR00890 | SMOOTH MUSCLE PROTEIN |
| | | | | | | 22-ALPHA (TRANSGELIN) |
| | | | | | | SIGNATURE |
| 943 | PR00890B | 8.75 | 3.455e−17 | 94-109 | PR00890 | SMOOTH MUSCLE PROTEIN |
| | | | | | | 22-ALPHA (TRANSGELIN) |
| | | | | | | SIGNATURE |
| 943 | PR00890C | 8.22 | 1.000e−17 | 116-129 | PR00890 | SMOOTH MUSCLE PROTEIN |
| | | | | | | 22-ALPHA (TRANSGELIN) |
| | | | | | | SIGNATURE |
| 943 | PR00890D | 16.17 | 5.174e−13 | 150-159 | PR00890 | SMOOTH MUSCLE PROTEIN |
| | | | | | | 22-ALPHA (TRANSGELIN) |
| | | | | | | SIGNATURE |
| 943 | PR00890E | 14.34 | 3.813e−21 | 167-186 | PR00890 | SMOOTH MUSCLE PROTEIN |
| | | | | | | 22-ALPHA (TRANSGELIN) |
| | | | | | | SIGNATURE |
| 943 | PR00890F | 12.92 | 4.064e−14 | 193-205 | PR00890 | SMOOTH MUSCLE PROTEIN |
| | | | | | | 22-ALPHA (TRANSGELIN) |
| | | | | | | SIGNATURE |
| 947 | BL00415N | 4.29 | 2.248e−09 | 276-319 | BL00415 | Synapsins proteins. |
| 950 | BL01031C | 17.68 | 6.400e−10 | 125-149 | BL01031 | Heat shock hsp20 |
| | | | | | | proteins family |
| | | | | | | profile. |
| 950 | PR00299D | 8.56 | 6.318e−09 | 115-128 | PR00299 | ALPHA CRYSTALLIN |
| | | | | | | SIGNATURE |
| 950 | PR00299F | 13.20 | 2.139e−09 | 152-173 | PR00299 | ALPHA CRYSTALLIN |
| | | | | | | SIGNATURE |
| 951 | BL00019A | 12.56 | 4.789e−15 | 56-66 | BL00019 | Actinin-type actin- |
| | | | | | | binding domain |
| | | | | | | proteins. |
| 951 | BL00019B | 13.34 | 9.250e−23 | 81-103 | BL00019 | Actinin-type actin- |
| | | | | | | binding domain |
| | | | | | | proteins. |
| 951 | BL00019C | 14.66 | 7.300e−37 | 127-162 | BL00019 | Actinin-type actin- |
| | | | | | | binding domain |
| | | | | | | proteins. |
| 951 | BL00019D | 15.33 | 7.000e−33 | 186-215 | BL00019 | Actinin-type actin- |
| | | | | | | binding domain |
| | | | | | | proteins. |
| 951 | BL00019E | 15.91 | 4.000e−13 | 341-350 | BL00019 | Actinin-type actin- |
| | | | | | | binding domain |
| | | | | | | proteins. |
| 951 | BL00019F | 19.68 | 6.464e−19 | 392-413 | BL00019 | Actinin-type actin- |
| | | | | | | binding domain |
| | | | | | | proteins. |
| 951 | BL00303B | 26.15 | 8.172e−10 | 815-851 | BL00303 | S-100/ICaBP type |
| | | | | | | calcium binding |
| | | | | | | protein. |
| 951 | PF00435A | 32.05 | 2.421e−19 | 243-271 | PF00435 | Spectrin repeat |
| | | | | | | proteins. |
| 951 | PF00435B | 13.41 | 2.174e−11 | 508-523 | PF00435 | Spectrin repeat |
| | | | | | | proteins. |
| 951 | PF00435C | 20.73 | 9.036e−09 | 526-545 | PF00435 | Spectrin repeat |
| | | | | | | proteins. |
| 952 | PR00111A | 11.49 | 4.150e−12 | 171-186 | PR00111 | ALPHA/BETA HYDROLASE |
| | | | | | | FOLD SIGNATURE |
| 952 | PR00412A | 13.23 | 6.400e−11 | 151-169 | PR00412 | EPOXIDE HYDROLASE |
| | | | | | | SIGNATURE |
| 952 | PR00412B | 12.59 | 2.929e−10 | 171-186 | PR00412 | EPOXIDE HYDROLASE |
| | | | | | | SIGNATURE |
| 954 | BL01221A | 17.26 | 7.750e−20 | 12-39 | BL01221 | PMP-22/EMP/MP20 |
| | | | | | | family proteins. |
| 954 | BL01221B | 13.29 | 6.182e−12 | 46-59 | BL01221 | PMP-22/EMP/MP20 |
| | | | | | | family proteins. |
| 954 | BL01221C | 26.20 | 8.159e−26 | 69-113 | BL01221 | PMP-22/EMP/MP20 |
| | | | | | | family proteins. |
| 954 | BL01221C | 26.20 | 9.100e−28 | 72-116 | BL01221 | PMP-22/EMP/MP20 |
| | | | | | | family proteins. |
| 955 | PF00783A | 11.91 | 4.214e−13 | 577-586 | PF00783 | Inositol polyphosphate |
| | | | | | | phosphatase, catalytic |
| | | | | | | domain proteins |
| | | | | | | homologu. |
| 955 | PF00783B | 10.54 | 2.552e−10 | 658-667 | PF00783 | Inositol polyphosphate |
| | | | | | | phosphatase, catalytic |
| | | | | | | domain proteins |
| | | | | | | homologu. |
| 955 | PR00049D | 0.00 | 3.071e−10 | 1019-1033 | PR00049 | WILM'S TUMOUR PROTEIN |
| | | | | | | SIGNATURE |
| 955 | PR00049D | 0.00 | 7.407e−09 | 1060-1074 | PR00049 | WILM'S TUMOUR PROTEIN |
| | | | | | | SIGNATURE |
| 956 | BL00030B | 7.03 | 3.368e−09 | 83-92 | BL00030 | Eukaryotic RNA-binding |
| | | | | | | region RNP-1 proteins. |
| 956 | BL00048 | 6.39 | 1.415e−13 | 157-183 | BL00048 | Protamine P1 proteins. |
| 956 | BL00048 | 6.39 | 1.750e−11 | 151-177 | BL00048 | Protamine P1 proteins. |
| 956 | BL00048 | 6.39 | 1.750e−11 | 240-266 | BL00048 | Protamine P1 proteins. |
| 956 | BL00048 | 6.39 | 2.184e−10 | 190-216 | BL00048 | Protamine P1 proteins. |
| 956 | BL00048 | 6.39 | 2.421e−10 | 198-224 | BL00048 | Protamine P1 proteins. |
| 956 | BL00048 | 6.39 | 2.588e−12 | 173-199 | BL00048 | Protamine P1 proteins. |
| 956 | BL00048 | 6.39 | 2.800e−09 | 188-214 | BL00048 | Protamine P1 proteins. |
| 956 | BL00048 | 6.39 | 2.895e−10 | 184-210 | BL00048 | Protamine P1 proteins. |
| 956 | BL00048 | 6.39 | 3.077e−13 | 160-186 | BL00048 | Protamine P1 proteins. |
| 956 | BL00048 | 6.39 | 3.813e−09 | 227-253 | BL00048 | Protamine P1 proteins. |
| 956 | BL00048 | 6.39 | 3.912e−12 | 175-201 | BL00048 | Protamine P1 proteins. |
| 956 | BL00048 | 6.39 | 3.925e−09 | 186-212 | BL00048 | Protamine P1 proteins. |
| 956 | BL00048 | 6.39 | 4.246e−14 | 166-192 | BL00048 | Protamine P1 proteins. |
| 956 | BL00048 | 6.39 | 4.316e−10 | 152-178 | BL00048 | Protamine P1 proteins. |
| 956 | BL00048 | 6.39 | 4.713e−09 | 153-179 | BL00048 | Protamine P1 proteins. |
| 956 | BL00048 | 6.39 | 5.375e−11 | 182-208 | BL00048 | Protamine P1 proteins. |
| 956 | BL00048 | 6.39 | 5.585e−17 | 163-189 | BL00048 | Protamine P1 proteins. |
| 956 | BL00048 | 6.39 | 5.708e−13 | 162-188 | BL00048 | Protamine P1 proteins. |
| 956 | BL00048 | 6.39 | 6.063e−09 | 176-202 | BL00048 | Protamine P1 proteins. |
| 956 | BL00048 | 6.39 | 6.143e−16 | 161-187 | BL00048 | Protamine P1 proteins. |
| 956 | BL00048 | 6.39 | 6.288e−09 | 189-215 | BL00048 | Protamine P1 proteins. |
| 956 | BL00048 | 6.39 | 6.311e−14 | 158-184 | BL00048 | Protamine P1 proteins. |
| 956 | BL00048 | 6.39 | 6.803e−10 | 223-249 | BL00048 | Protamine P1 proteins. |
| 956 | BL00048 | 6.39 | 7.188e−09 | 225-251 | BL00048 | Protamine P1 proteins. |
| 956 | BL00048 | 6.39 | 7.413e−09 | 183-209 | BL00048 | Protamine P1 proteins. |
| 956 | BL00048 | 6.39 | 7.618e−12 | 156-182 | BL00048 | Protamine P1 proteins. |
| 956 | BL00048 | 6.39 | 7.632e−10 | 180-206 | BL00048 | Protamine P1 proteins. |
| 956 | BL00048 | 6.39 | 7.639e−14 | 165-191 | BL00048 | Protamine P1 proteins. |
| 956 | BL00048 | 6.39 | 8.000e−11 | 164-190 | BL00048 | Protamine P1 proteins. |
| 956 | BL00048 | 6.39 | 8.000e−11 | 177-203 | BL00048 | Protamine P1 proteins. |
| 956 | BL00048 | 6.39 | 8.015e−12 | 167-193 | BL00048 | Protamine P1 proteins. |
| 956 | BL00048 | 6.39 | 8.088e−09 | 170-196 | BL00048 | Protamine P1 proteins. |
| 956 | BL00048 | 6.39 | 8.105e−10 | 154-180 | BL00048 | Protamine P1 proteins. |
| 956 | BL00048 | 6.39 | 8.302e−17 | 159-185 | BL00048 | Protamine P1 proteins. |
| 956 | BL00048 | 6.39 | 8.375e−11 | 169-195 | BL00048 | Protamine P1 proteins. |
| 956 | BL00048 | 6.39 | 8.377e−14 | 174-200 | BL00048 | Protamine P1 proteins. |
| 956 | BL00048 | 6.39 | 8.425e−09 | 168-194 | BL00048 | Protamine P1 proteins. |
| 956 | BL00048 | 6.39 | 8.625e−11 | 181-207 | BL00048 | Protamine P1 proteins. |
| 956 | BL00048 | 6.39 | 9.100e−09 | 232-258 | BL00048 | Protamine P1 proteins. |
| 956 | BL00048 | 6.39 | 9.375e−11 | 194-220 | BL00048 | Protamine P1 proteins. |
| 956 | BL00048 | 6.39 | 9.625e−11 | 155-181 | BL00048 | Protamine P1 proteins. |
| 956 | BL00048 | 6.39 | 9.735e−12 | 172-198 | BL00048 | Protamine P1 proteins. |
| 956 | BL00048 | 6.39 | 9.875e−11 | 171-197 | BL00048 | Protamine P1 proteins. |
| 956 | BL00048 | 6.39 | 9.882e−10 | 192-218 | BL00048 | Protamine P1 proteins. |
| 956 | DM01206B | 10.69 | 1.570e−09 | 169-188 | DM01206 | CORONAVIRUS |
| | | | | | | NUCLEOCAPSID PROTEIN. |
| 956 | DM01206B | 10.69 | 4.452e−10 | 163-182 | DM01206 | CORONAVIRUS |
| | | | | | | NUCLEOCAPSID PROTEIN. |
| 956 | DM01206B | 10.69 | 4.532e−09 | 157-176 | DM01206 | CORONAVIRUS |
| | | | | | | NUCLEOCAPSID PROTEIN. |
| 956 | DM01206B | 10.69 | 4.532e−09 | 223-242 | DM01206 | CORONAVIRUS |
| | | | | | | NUCLEOCAPSID PROTEIN. |
| 956 | DM01206B | 10.69 | 5.899e−09 | 155-174 | DM01206 | CORONAVIRUS |
| | | | | | | NUCLEOCAPSID PROTEIN. |
| 956 | DM01206B | 10.69 | 7.411e−10 | 159-178 | DM01206 | CORONAVIRUS |
| | | | | | | NUCLEOCAPSID PROTEIN. |
| 956 | PD02784B | 26.46 | 9.745e−09 | 79-121 | PD02784 | PROTEIN NUCLEAR |
| | | | | | | RIBONUCLEOPROTEIN. |
| 957 | BL01160B | 19.54 | 5.653e−09 | 253-306 | BL01160 | Kinesin light chain |
| | | | | | | repeat proteins. |
| 957 | BL01160B | 19.54 | 5.710e−11 | 260-313 | BL01160 | Kinesin light chain |
| | | | | | | repeat proteins. |
| 958 | PR00049D | 0.00 | 6.445e−11 | 430-444 | PR00049 | WILM'S TUMOUR PROTEIN |
| | | | | | | SIGNATURE |
| 959 | BL00250A | 21.24 | 7.000e−35 | 340-375 | BL00250 | TGF-beta family |
| | | | | | | proteins. |
| 959 | BL00250B | 27.37 | 8.071e−32 | 409-444 | BL00250 | TGF-beta family |
| | | | | | | proteins. |
| 959 | PR00438A | 13.54 | 7.300e−11 | 365-374 | PR00438 | GROWTH FACTOR CYSTINE |
| | | | | | | KNOT SUPERFAMILY |
| | | | | | | SIGNATURE |
| 959 | PR00669F | 5.57 | 9.494e−09 | 357-374 | PR00669 | INHIBIN ALPHA CHAIN |
| | | | | | | SIGNATURE |
| 959 | PR00670A | 11.24 | 1.750e−24 | 21-38 | PR00670 | INHIBIN BETA A CHAIN |
| | | | | | | SIGNATURE |
| 959 | PR00670B | 13.06 | 1.360e−28 | 38-59 | PR00670 | INHIBIN BETA A CHAIN |
| | | | | | | SIGNATURE |
| 959 | PR00670C | 11.98 | 3.250e−19 | 83-96 | PR00670 | INHIBIN BETA A CHAIN |
| | | | | | | SIGNATURE |
| 959 | PR00670D | 13.39 | 1.231e−22 | 123-139 | PR00670 | INHIBIN BETA A CHAIN |
| | | | | | | SIGNATURE |
| 959 | PR00670E | 3.63 | 1.333e−25 | 268-289 | PR00670 | INHIBIN BETA A CHAIN |
| | | | | | | SIGNATURE |
| 959 | PR00670F | 10.10 | 4.818e−13 | 298-308 | PR00670 | INHIBIN BETA A CHAIN |
| | | | | | | SIGNATURE |
| 960 | BL00154C | 12.38 | 6.580e−12 | 79-97 | BL00154 | E1-E2 ATPases |
| | | | | | | phosphorylation site |
| | | | | | | proteins. |
| 960 | BL00154E | 20.37 | 9.820e−15 | 347-387 | BL00154 | E1-E2 ATPases |
| | | | | | | phosphorylation site |
| | | | | | | proteins. |
| 960 | BL00154F | 8.23 | 8.859e−10 | 502-525 | BL00154 | E1-E2 ATPases |
| | | | | | | phosphorylation site |
| | | | | | | proteins. |
| 960 | BL00592E | 12.53 | 9.100e−09 | 168-184 | BL00592 | Glycosyl hydrolases |
| | | | | | | family 9 proteins. |
| 960 | BL01228D | 17.44 | 7.150e−11 | 503-527 | BL01228 | Hypothetical cof family |
| | | | | | | proteins. |
| 960 | PR00119B | 13.94 | 6.694e−12 | 83-97 | PR00119 | P-TYPE CATION- |
| | | | | | | TRANSPORTING ATPASE |
| | | | | | | SUPERFAMILY SIGNATURE |
| 960 | PR00119D | 9.56 | 2.432e−09 | 363-373 | PR00119 | P-TYPE CATION- |
| | | | | | | TRANSPORTING ATPASE |
| | | | | | | SUPERFAMILY SIGNATURE |
| 960 | PR00121D | 16.72 | 4.621e−11 | 76-97 | PR00121 | SODIUM/POTASSIUM- |
| | | | | | | TRANSPORTING ATPASE |
| | | | | | | SIGNATURE |
| 961 | BL00030A | 14.39 | 5.765e−11 | 14-32 | BL00030 | Eukaryotic RNA-binding |
| | | | | | | region RNP-1 proteins. |
| 961 | BL00030A | 14.39 | 6.571e−09 | 297-315 | BL00030 | Eukaryotic RNA-binding |
| | | | | | | region RNP-1 proteins. |
| 961 | BL00030B | 7.03 | 4.316e−09 | 334-343 | BL00030 | Eukaryotic RNA-binding |
| | | | | | | region RNP-1 proteins. |
| 961 | BL00030B | 7.03 | 6.400e−10 | 232-241 | BL00030 | Eukaryotic RNA-binding |
| | | | | | | region RNP-1 proteins. |
| 961 | BL00030B | 7.03 | 8.579e−09 | 139-148 | BL00030 | Eukaryotic RNA-binding |
| | | | | | | region RNP-1 proteins. |
| 961 | PD02784A | 21.09 | 4.583e−09 | 94-130 | PD02784 | PROTEIN NUCLEAR |
| | | | | | | RIBONUCLEOPROTEIN. |
| 961 | PD02784B | 26.46 | 4.651e−09 | 49-91 | PD02784 | PROTEIN NUCLEAR |
| | | | | | | RIBONUCLEOPROTEIN. |
| 961 | PF00658A | 19.88 | 1.000e−40 | 84-123 | PF00658 | Poly-adenylate binding |
| | | | | | | protein, unique domain |
| | | | | | | proteins. |
| 961 | PF00658B | 28.57 | 1.000e−40 | 263-309 | PF00658 | Poly-adenylate binding |
| | | | | | | protein, unique domain |
| | | | | | | proteins. |
| 961 | PF00658C | 16.33 | 8.500e−36 | 579-615 | PF00658 | Poly-adenylate binding |
| | | | | | | protein, unique domain |
| | | | | | | proteins. |
| 962 | BL00036 | 9.02 | 5.737e−11 | 682-694 | BL00036 | bZIP transcription |
| | | | | | | factors basic domain |
| | | | | | | proteins. |
| 962 | PF00624I | 9.10 | 4.331e−09 | 507-536 | PF00624 | Flocculin repeat |
| | | | | | | proteins. |
| 962 | PF00624I | 9.10 | 5.125e−10 | 510-539 | PF00624 | Flocculin repeat |
| | | | | | | proteins. |
| 962 | PF00624I | 9.10 | 5.800e−10 | 511-540 | PF00624 | Flocculin repeat |
| | | | | | | proteins. |
| 962 | PF00624I | 9.10 | 6.457e−09 | 505-534 | PF00624 | Flocculin repeat |
| | | | | | | proteins. |
| 962 | PF00624I | 9.10 | 6.811e−09 | 502-531 | PF00624 | Flocculin repeat |
| | | | | | | proteins. |
| 962 | PF00624I | 9.10 | 8.441e−09 | 503-532 | PF00624 | Flocculin repeat |
| | | | | | | proteins. |
| 962 | PR00043B | 8.73 | 9.241e−11 | 682-698 | PR00043 | JUN TRANSCRIPTION |
| | | | | | | FACTOR SIGNATURE |
| 963 | BL01160B | 19.54 | 9.676e−10 | 308-361 | BL01160 | Kinesin light chain |
| | | | | | | repeat proteins. |
| 964 | BL00291A | 4.49 | 1.000e−09 | 540-574 | BL00291 | Prion protein. |
| 964 | BL00415N | 4.29 | 8.095e−09 | 347-390 | BL00415 | Synapsins proteins. |
| 964 | BL00420A | 20.42 | 1.000e−12 | 345-373 | BL00420 | Speract receptor repeat |
| | | | | | | proteins domain |
| | | | | | | proteins. |
| 964 | BL00420A | 20.42 | 1.148e−10 | 810-838 | BL00420 | Speract receptor repeat |
| | | | | | | proteins domain |
| | | | | | | proteins. |
| 964 | BL00420A | 20.42 | 1.295e−10 | 873-901 | BL00420 | Speract receptor repeat |
| | | | | | | proteins domain |
| | | | | | | proteins. |
| 964 | BL00420A | 20.42 | 1.590e−10 | 840-868 | BL00420 | Speract receptor repeat |
| | | | | | | proteins domain |
| | | | | | | proteins. |
| 964 | BL00420A | 20.42 | 1.692e−09 | 438-466 | BL00420 | Speract receptor repeat |
| | | | | | | proteins domain |
| | | | | | | proteins. |
| 964 | BL00420A | 20.42 | 1.738e−10 | 459-487 | BL00420 | Speract receptor repeat |
| | | | | | | proteins domain |
| 964 | BL00420A | 20.42 | 1.885e−10 | 207-235 | BL00420 | Speract receptor repeat |
| | | | | | | proteins domain |
| | | | | | | proteins. |
| 964 | BL00420A | 20.42 | 1.969e−09 | 204-232 | BL00420 | Speract receptor repeat |
| | | | | | | proteins domain |
| | | | | | | proteins. |
| 964 | BL00420A | 20.42 | 2.108e−09 | 198-226 | BL00420 | Speract receptor repeat |
| | | | | | | proteins domain |
| | | | | | | proteins. |
| 964 | BL00420A | 20.42 | 2.108e−09 | 747-775 | BL00420 | Speract receptor repeat |
| | | | | | | proteins domain |
| | | | | | | proteins. |
| 964 | BL00420A | 20.42 | 2.108e−09 | 867-895 | BL00420 | Speract receptor repeat |
| | | | | | | proteins domain |
| | | | | | | proteins. |
| 964 | BL00420A | 20.42 | 2.246e−09 | 216-244 | BL00420 | Speract receptor repeat |
| | | | | | | proteins domain |
| | | | | | | proteins. |
| 964 | BL00420A | 20.42 | 2.246e−09 | 669-697 | BL00420 | Speract receptor repeat |
| | | | | | | proteins domain |
| | | | | | | proteins. |
| 964 | BL00420A | 20.42 | 2.523e−09 | 642-670 | BL00420 | Speract receptor repeat |
| | | | | | | proteins domain |
| | | | | | | proteins. |
| 964 | BL00420A | 20.42 | 2.800e−09 | 219-247 | BL00420 | Speract receptor repeat |
| | | | | | | proteins domain |
| | | | | | | proteins. |
| 964 | BL00420A | 20.42 | 2.800e−09 | 516-544 | BL00420 | Speract receptor repeat |
| | | | | | | proteins domain |
| | | | | | | proteins. |
| 964 | BL00420A | 20.42 | 2.800e−09 | 564-592 | BL00420 | Speract receptor repeat |
| | | | | | | proteins domain |
| | | | | | | proteins. |
| 964 | BL00420A | 20.42 | 3.066e−10 | 798-826 | BL00420 | Speract receptor repeat |
| | | | | | | proteins domain |
| | | | | | | proteins. |
| 964 | BL00420A | 20.42 | 3.077e−09 | 687-715 | BL00420 | Speract receptor repeat |
| | | | | | | proteins domain |
| | | | | | | proteins. |
| 964 | BL00420A | 20.42 | 3.213e−10 | 552-580 | BL00420 | Speract receptor repeat |
| | | | | | | proteins domain |
| | | | | | | proteins. |
| 964 | BL00420A | 20.42 | 3.215e−09 | 330-358 | BL00420 | Speract receptor repeat |
| | | | | | | proteins domain |
| | | | | | | proteins. |
| 964 | BL00420A | 20.42 | 3.354e−09 | 588-616 | BL00420 | Speract receptor repeat |
| | | | | | | proteins domain |
| | | | | | | proteins. |
| 964 | BL00420A | 20.42 | 3.361e−10 | 627-655 | BL00420 | Speract receptor repeat |
| | | | | | | proteins domain |
| | | | | | | proteins. |
| 964 | BL00420A | 20.42 | 3.492e−09 | 240-268 | BL00420 | Speract receptor repeat |
| | | | | | | proteins domain |
| | | | | | | proteins. |
| 964 | BL00420A | 20.42 | 3.508e−10 | 327-355 | BL00420 | Speract receptor repeat |
| | | | | | | proteins domain |
| | | | | | | proteins. |
| 964 | BL00420A | 20.42 | 3.618e−11 | 807-835 | BL00420 | Speract receptor repeat |
| | | | | | | proteins domain |
| | | | | | | proteins. |
| 964 | BL00420A | 20.42 | 3.631e−09 | 106-134 | BL00420 | Speract receptor repeat |
| | | | | | | proteins domain |
| | | | | | | proteins. |
| 964 | BL00420A | 20.42 | 3.631e−09 | 339-367 | BL00420 | Speract receptor repeat |
| | | | | | | proteins domain |
| | | | | | | proteins. |
| 964 | BL00420A | 20.42 | 4.098e−10 | 366-394 | BL00420 | Speract receptor repeat |
| | | | | | | proteins domain |
| | | | | | | proteins. |
| 964 | BL00420A | 20.42 | 4.098e−10 | 675-703 | BL00420 | Speract receptor repeat |
| | | | | | | proteins domain |
| | | | | | | proteins. |
| 964 | BL00420A | 20.42 | 4.185e−09 | 348-376 | BL00420 | Speract receptor repeat |
| | | | | | | proteins domain |
| | | | | | | proteins. |
| 964 | BL00420A | 20.42 | 4.185e−09 | 486-514 | BL00420 | Speract receptor repeat |
| | | | | | | proteins domain |
| | | | | | | proteins. |
| 964 | BL00420A | 20.42 | 4.185e−09 | 756-784 | BL00420 | Speract receptor repeat |
| | | | | | | proteins domain |
| | | | | | | proteins. |
| 964 | BL00420A | 20.42 | 4.306e−13 | 720-748 | BL00420 | Speract receptor repeat |
| | | | | | | proteins domain |
| | | | | | | proteins. |
| 964 | BL00420A | 20.42 | 4.689e−10 | 480-508 | BL00420 | Speract receptor repeat |
| | | | | | | proteins domain |
| | | | | | | proteins. |
| 964 | BL00420A | 20.42 | 4.689e−10 | 570-598 | BL00420 | Speract receptor repeat |
| | | | | | | proteins domain |
| | | | | | | proteins. |
| 964 | BL00420A | 20.42 | 4.836e−10 | 195-223 | BL00420 | Speract receptor repeat |
| | | | | | | proteins domain |
| | | | | | | proteins. |
| 964 | BL00420A | 20.42 | 4.927e−11 | 705-733 | BL00420 | Speract receptor repeat |
| | | | | | | proteins domain |
| | | | | | | proteins. |
| 964 | BL00420A | 20.42 | 5.015e−09 | 189-217 | BL00420 | Speract receptor repeat |
| | | | | | | proteins domain |
| | | | | | | proteins. |
| 964 | BL00420A | 20.42 | 5.091e−11 | 180-208 | BL00420 | Speract receptor repeat |
| | | | | | | proteins domain |
| | | | | | | proteins. |
| 964 | BL00420A | 20.42 | 5.154e−09 | 861-889 | BL00420 | Speract receptor repeat |
| | | | | | | proteins domain |
| | | | | | | proteins. |
| 964 | BL00420A | 20.42 | 5.426e−10 | 774-802 | BL00420 | Speract receptor repeat |
| | | | | | | proteins domain |
| | | | | | | proteins. |
| 964 | BL00420A | 20.42 | 5.600e−14 | 408-436 | BL00420 | Speract receptor repeat |
| | | | | | | proteins domain |
| | | | | | | proteins. |
| 964 | BL00420A | 20.42 | 5.708e−09 | 372-400 | BL00420 | Speract receptor repeat |
| | | | | | | proteins domain |
| | | | | | | proteins. |
| 964 | BL00420A | 20.42 | 5.721e−10 | 651-679 | BL00420 | Speract receptor repeat |
| | | | | | | proteins domain |
| | | | | | | proteins. |
| 964 | BL00420A | 20.42 | 5.776e−13 | 426-454 | BL00420 | Speract receptor repeat |
| | | | | | | proteins domain |
| | | | | | | proteins. |
| 964 | BL00420A | 20.42 | 5.846e−09 | 300-328 | BL00420 | Speract receptor repeat |
| | | | | | | proteins domain |
| | | | | | | proteins. |
| 964 | BL00420A | 20.42 | 5.869e−10 | 109-137 | BL00420 | Speract receptor repeat |
| | | | | | | proteins domain |
| | | | | | | proteins. |
| 964 | BL00420A | 20.42 | 6.016e−10 | 537-565 | BL00420 | Speract receptor repeat |
| | | | | | | proteins domain |
| | | | | | | proteins. |
| 964 | BL00420A | 20.42 | 6.073e−11 | 801-829 | BL00420 | Speract receptor repeat |
| | | | | | | proteins domain |
| | | | | | | proteins. |
| 964 | BL00420A | 20.42 | 6.123e−09 | 546-574 | BL00420 | Speract receptor repeat |
| | | | | | | proteins domain |
| | | | | | | proteins. |
| 964 | BL00420A | 20.42 | 6.123e−09 | 603-631 | BL00420 | Speract receptor repeat |
| | | | | | | proteins domain |
| | | | | | | proteins. |
| 964 | BL00420A | 20.42 | 6.164e−10 | 306-334 | BL00420 | Speract receptor repeat |
| | | | | | | proteins domain |
| | | | | | | proteins. |
| 964 | BL00420A | 20.42 | 6.164e−10 | 483-511 | BL00420 | Speract receptor repeat |
| | | | | | | proteins domain |
| | | | | | | proteins. |
| 964 | BL00420A | 20.42 | 6.164e−10 | 549-577 | BL00420 | Speract receptor repeat |
| | | | | | | proteins domain |
| | | | | | | proteins. |
| 964 | BL00420A | 20.42 | 6.164e−10 | 777-805 | BL00420 | Speract receptor repeat |
| | | | | | | proteins domain |
| | | | | | | proteins. |
| 964 | BL00420A | 20.42 | 6.262e−09 | 183-211 | BL00420 | Speract receptor repeat |
| | | | | | | proteins domain |
| | | | | | | proteins. |
| 964 | BL00420A | 20.42 | 6.262e−09 | 837-865 | BL00420 | Speract receptor repeat |
| | | | | | | proteins domain |
| | | | | | | proteins. |
| 964 | BL00420A | 20.42 | 6.400e−09 | 741-769 | BL00420 | Speract receptor repeat |
| | | | | | | proteins domain |
| | | | | | | proteins. |
| 964 | BL00420A | 20.42 | 6.400e−11 | 843-871 | BL00420 | Speract receptor repeat |
| | | | | | | proteins domain |
| | | | | | | proteins. |
| 964 | BL00420A | 20.42 | 6.607e−10 | 186-214 | BL00420 | Speract receptor repeat |
| | | | | | | proteins domain |
| | | | | | | proteins. |
| 964 | BL00420A | 20.42 | 6.754e−10 | 423-451 | BL00420 | Speract receptor repeat |
| | | | | | | proteins domain |
| | | | | | | proteins. |
| 964 | BL00420A | 20.42 | 6.815e−09 | 753-781 | BL00420 | Speract receptor repeat |
| | | | | | | proteins domain |
| | | | | | | proteins. |
| 964 | BL00420A | 20.42 | 7.049e−10 | 318-346 | BL00420 | Speract receptor repeat |
| | | | | | | proteins domain |
| | | | | | | proteins. |
| 964 | BL00420A | 20.42 | 7.092e−09 | 789-817 | BL00420 | Speract receptor repeat |
| | | | | | | proteins domain |
| | | | | | | proteins. |
| 964 | BL00420A | 20.42 | 7.231e−09 | 471-499 | BL00420 | Speract receptor repeat |
| | | | | | | proteins domain |
| | | | | | | proteins. |
| 964 | BL00420A | 20.42 | 7.344e−10 | 390-418 | BL00420 | Speract receptor repeat |
| | | | | | | proteins domain |
| | | | | | | proteins. |
| 964 | BL00420A | 20.42 | 7.923e−09 | 243-271 | BL00420 | Speract receptor repeat |
| | | | | | | proteins domain |
| | | | | | | proteins. |
| 964 | BL00420A | 20.42 | 7.923e−09 | 261-289 | BL00420 | Speract receptor repeat |
| | | | | | | proteins domain |
| | | | | | | proteins. |
| 964 | BL00420A | 20.42 | 7.923e−12 | 417-445 | BL00420 | Speract receptor repeat |
| | | | | | | proteins domain |
| | | | | | | proteins. |
| 964 | BL00420A | 20.42 | 8.082e−10 | 813-841 | BL00420 | Speract receptor repeat |
| | | | | | | proteins domain |
| | | | | | | proteins. |
| 964 | BL00420A | 20.42 | 8.200e−11 | 282-310 | BL00420 | Speract receptor repeat |
| | | | | | | proteins domain |
| | | | | | | proteins. |
| 964 | BL00420A | 20.42 | 8.230e−10 | 771-799 | BL00420 | Speract receptor repeat |
| | | | | | | proteins domain |
| | | | | | | proteins. |
| 964 | BL00420A | 20.42 | 8.338e−09 | 420-448 | BL00420 | Speract receptor repeat |
| | | | | | | proteins domain |
| | | | | | | proteins. |
| 964 | BL00420A | 20.42 | 8.615e−09 | 513-541 | BL00420 | Speract receptor repeat |
| | | | | | | proteins domain |
| | | | | | | proteins. |
| 964 | BL00420A | 20.42 | 8.754e−09 | 525-553 | BL00420 | Speract receptor repeat |
| | | | | | | proteins domain |
| 964 | BL00420A | 20.42 | 8.892e−09 | 681-709 | BL00420 | Speract receptor repeat |
| | | | | | | proteins domain |
| | | | | | | proteins. |
| 964 | BL00420A | 20.42 | 8.898e−13 | 534-562 | BL00420 | Speract receptor repeat |
| | | | | | | proteins domain |
| | | | | | | proteins. |
| 964 | BL00420A | 20.42 | 9.262e−10 | 249-277 | BL00420 | Speract receptor repeat |
| | | | | | | proteins domain |
| | | | | | | proteins. |
| 964 | BL00420A | 20.42 | 9.262e−10 | 576-604 | BL00420 | Speract receptor repeat |
| | | | | | | proteins domain |
| | | | | | | proteins. |
| 964 | BL00420A | 20.42 | 9.308e−09 | 201-229 | BL00420 | Speract receptor repeat |
| | | | | | | proteins domain |
| | | | | | | proteins. |
| 964 | BL00420A | 20.42 | 9.446e−09 | 717-745 | BL00420 | Speract receptor repeat |
| | | | | | | proteins domain |
| | | | | | | proteins. |
| 964 | BL00420A | 20.42 | 9.557e−10 | 297-325 | BL00420 | Speract receptor repeat |
| | | | | | | proteins domain |
| | | | | | | proteins. |
| 964 | BL00420A | 20.42 | 9.585e−09 | 165-193 | BL00420 | Speract receptor repeat |
| | | | | | | proteins domain |
| | | | | | | proteins. |
| 964 | BL00420A | 20.42 | 9.705e−10 | 684-712 | BL00420 | Speract receptor repeat |
| | | | | | | proteins domain |
| | | | | | | proteins. |
| 964 | BL00420A | 20.42 | 9.723e−09 | 315-343 | BL00420 | Speract receptor repeat |
| | | | | | | proteins domain |
| | | | | | | proteins. |
| 964 | BL00420A | 20.42 | 9.836e−11 | 498-526 | BL00420 | Speract receptor repeat |
| | | | | | | proteins domain |
| | | | | | | proteins. |
| 964 | BL00420A | 20.42 | 9.852e−10 | 795-823 | BL00420 | Speract receptor repeat |
| | | | | | | proteins domain |
| | | | | | | proteins. |
| 964 | BL00420A | 20.42 | 9.862e−09 | 118-146 | BL00420 | Speract receptor repeat |
| | | | | | | proteins domain |
| | | | | | | proteins. |
| 964 | BL01113A | 17.99 | 1.000e−10 | 282-308 | BL01113 | C1q domain proteins. |
| 964 | BL01113A | 17.99 | 1.000e−10 | 669-695 | BL01113 | C1q domain proteins. |
| 964 | BL01113A | 17.99 | 1.000e−11 | 591-617 | BL01113 | C1q domain proteins. |
| 964 | BL01113A | 17.99 | 1.000e−12 | 813-839 | BL01113 | C1q domain proteins. |
| 964 | BL01113A | 17.99 | 1.000e−14 | 534-560 | BL01113 | C1q domain proteins. |
| 964 | BL01113A | 17.99 | 1.173e−09 | 357-383 | BL01113 | C1q domain proteins. |
| 964 | BL01113A | 17.99 | 1.191e−10 | 462-488 | BL01113 | C1q domain proteins. |
| 964 | BL01113A | 17.99 | 1.205e−11 | 798-824 | BL01113 | C1q domain proteins. |
| 964 | BL01113A | 17.99 | 1.243e−13 | 660-686 | BL01113 | C1q domain proteins. |
| 964 | BL01113A | 17.99 | 1.519e−09 | 621-647 | BL01113 | C1q domain proteins. |
| 964 | BL01113A | 17.99 | 1.692e−12 | 789-815 | BL01113 | C1q domain proteins. |
| 964 | BL01113A | 17.99 | 1.766e−10 | 339-365 | BL01113 | C1q domain proteins. |
| 964 | BL01113A | 17.99 | 1.766e−10 | 648-674 | BL01113 | C1q domain proteins. |
| 964 | BL01113A | 17.99 | 1.957e−10 | 822-848 | BL01113 | C1q domain proteins. |
| 964 | BL01113A | 17.99 | 1.957e−10 | 879-905 | BL01113 | C1q domain proteins. |
| 964 | BL01113A | 17.99 | 2.149e−10 | 831-857 | BL01113 | C1q domain proteins. |
| 964 | BL01113A | 17.99 | 2.154e−12 | 543-569 | BL01113 | C1q domain proteins. |
| 964 | BL01113A | 17.99 | 2.212e−09 | 231-257 | BL01113 | C1q domain proteins. |
| 964 | BL01113A | 17.99 | 2.212e−09 | 327-353 | BL01113 | C1q domain proteins. |
| 964 | BL01113A | 17.99 | 2.558e−09 | 372-398 | BL01113 | C1q domain proteins. |
| 964 | BL01113A | 17.99 | 2.703e−13 | 112-138 | BL01113 | C1q domain proteins. |
| 964 | BL01113A | 17.99 | 2.723e−10 | 189-215 | BL01113 | C1q domain proteins. |
| 964 | BL01113A | 17.99 | 2.723e−10 | 219-245 | BL01113 | C1q domain proteins. |
| 964 | BL01113A | 17.99 | 2.731e−09 | 555-581 | BL01113 | C1q domain proteins. |
| 964 | BL01113A | 17.99 | 2.742e−15 | 336-362 | BL01113 | C1q domain proteins. |
| 964 | BL01113A | 17.99 | 2.846e−12 | 109-135 | BL01113 | C1q domain proteins. |
| 964 | BL01113A | 17.99 | 2.904e−09 | 207-233 | BL01113 | C1q domain proteins. |
| 964 | BL01113A | 17.99 | 2.904e−09 | 306-332 | BL01113 | C1q domain proteins. |
| 964 | BL01113A | 17.99 | 2.904e−09 | 387-413 | BL01113 | C1q domain proteins. |
| 964 | BL01113A | 17.99 | 2.904e−09 | 564-590 | BL01113 | C1q domain proteins. |
| 964 | BL01113A | 17.99 | 2.915e−10 | 210-236 | BL01113 | C1q domain proteins. |
| 964 | BL01113A | 17.99 | 2.915e−10 | 840-866 | BL01113 | C1q domain proteins. |
| 964 | BL01113A | 17.99 | 2.946e−13 | 846-872 | BL01113 | C1q domain proteins. |
| 964 | BL01113A | 17.99 | 3.077e−09 | 405-431 | BL01113 | C1q domain proteins. |
| 964 | BL01113A | 17.99 | 3.298e−10 | 756-782 | BL01113 | C1q domain proteins. |
| 964 | BL01113A | 17.99 | 3.423e−09 | 495-521 | BL01113 | C1q domain proteins. |
| 964 | BL01113A | 17.99 | 3.423e−09 | 720-746 | BL01113 | C1q domain proteins. |
| 964 | BL01113A | 17.99 | 3.455e−11 | 771-797 | BL01113 | C1q domain proteins. |
| 964 | BL01113A | 17.99 | 3.613e−15 | 115-141 | BL01113 | C1q domain proteins. |
| 964 | BL01113A | 17.99 | 4.000e−14 | 738-764 | BL01113 | C1q domain proteins. |
| 964 | BL01113A | 17.99 | 4.064e−10 | 192-218 | BL01113 | C1q domain proteins. |
| 964 | BL01113A | 17.99 | 4.064e−10 | 345-371 | BL01113 | C1q domain proteins. |
| 964 | BL01113A | 17.99 | 4.064e−10 | 723-749 | BL01113 | C1q domain proteins. |
| 964 | BL01113A | 17.99 | 4.068e−11 | 540-566 | BL01113 | C1q domain proteins. |
| 964 | BL01113A | 17.99 | 4.194e−15 | 118-144 | BL01113 | C1q domain proteins. |
| 964 | BL01113A | 17.99 | 4.231e−12 | 456-482 | BL01113 | C1q domain proteins. |
| 964 | BL01113A | 17.99 | 4.255e−10 | 324-350 | BL01113 | C1q domain proteins. |
| 964 | BL01113A | 17.99 | 4.273e−11 | 195-221 | BL01113 | C1q domain proteins. |
| 964 | BL01113A | 17.99 | 4.288e−09 | 103-129 | BL01113 | C1q domain proteins. |
| 964 | BL01113A | 17.99 | 4.288e−09 | 127-153 | BL01113 | C1q domain proteins. |
| 964 | BL01113A | 17.99 | 4.462e−09 | 246-272 | BL01113 | C1q domain proteins. |
| 964 | BL01113A | 17.99 | 4.635e−09 | 204-230 | BL01113 | C1q domain proteins. |
| 964 | BL01113A | 17.99 | 4.638e−10 | 480-506 | BL01113 | C1q domain proteins. |
| 964 | BL01113A | 17.99 | 4.774e−15 | 297-323 | BL01113 | C1q domain proteins. |
| 964 | BL01113A | 17.99 | 4.808e−09 | 381-407 | BL01113 | C1q domain proteins. |
| 964 | BL01113A | 17.99 | 4.886e−11 | 249-275 | BL01113 | C1q domain proteins. |
| 964 | BL01113A | 17.99 | 4.923e−12 | 531-557 | BL01113 | C1q domain proteins. |
| 964 | BL01113A | 17.99 | 4.981e−09 | 375-401 | BL01113 | C1q domain proteins. |
| 964 | BL01113A | 17.99 | 4.981e−09 | 837-863 | BL01113 | C1q domain proteins. |
| 964 | BL01113A | 17.99 | 5.021e−10 | 705-731 | BL01113 | C1q domain proteins. |
| 964 | BL01113A | 17.99 | 5.091e−11 | 645-671 | BL01113 | C1q domain proteins. |
| 964 | BL01113A | 17.99 | 5.091e−11 | 762-788 | BL01113 | C1q domain proteins. |
| 964 | BL01113A | 17.99 | 5.091e−14 | 807-833 | BL01113 | C1q domain proteins. |
| 964 | BL01113A | 17.99 | 5.385e−12 | 525-551 | BL01113 | C1q domain proteins. |
| 964 | BL01113A | 17.99 | 5.404e−10 | 291-317 | BL01113 | C1q domain proteins. |
| 964 | BL01113A | 17.99 | 5.404e−10 | 852-878 | BL01113 | C1q domain proteins. |
| 964 | BL01113A | 17.99 | 5.500e−11 | 573-599 | BL01113 | C1q domain proteins. |
| 964 | BL01113A | 17.99 | 5.615e−12 | 693-719 | BL01113 | C1q domain proteins. |
| 964 | BL01113A | 17.99 | 5.673e−09 | 447-473 | BL01113 | C1q domain proteins. |
| 964 | BL01113A | 17.99 | 5.673e−09 | 489-515 | BL01113 | C1q domain proteins. |
| 964 | BL01113A | 17.99 | 5.846e−12 | 546-572 | BL01113 | C1q domain proteins. |
| 964 | BL01113A | 17.99 | 5.909e−11 | 582-608 | BL01113 | C1q domain proteins. |
| 964 | BL01113A | 17.99 | 5.979e−10 | 471-497 | BL01113 | C1q domain proteins. |
| 964 | BL01113A | 17.99 | 6.108e−13 | 237-263 | BL01113 | C1q domain proteins. |
| 964 | BL01113A | 17.99 | 6.114e−11 | 804-830 | BL01113 | C1q domain proteins. |
| 964 | BL01113A | 17.99 | 6.318e−11 | 216-242 | BL01113 | C1q domain proteins. |
| 964 | BL01113A | 17.99 | 6.362e−10 | 513-539 | BL01113 | C1q domain proteins. |
| 964 | BL01113A | 17.99 | 6.365e−09 | 333-359 | BL01113 | C1q domain proteins. |
| 964 | BL01113A | 17.99 | 6.365e−09 | 816-842 | BL01113 | C1q domain proteins. |
| 964 | BL01113A | 17.99 | 6.523e−11 | 708-734 | BL01113 | C1q domain proteins. |
| 964 | BL01113A | 17.99 | 6.538e−09 | 732-758 | BL01113 | C1q domain proteins. |
| 964 | BL01113A | 17.99 | 6.538e−12 | 171-197 | BL01113 | C1q domain proteins. |
| 964 | BL01113A | 17.99 | 6.712e−09 | 408-434 | BL01113 | C1q domain proteins. |
| 964 | BL01113A | 17.99 | 6.712e−09 | 603-629 | BL01113 | C1q domain proteins. |
| 964 | BL01113A | 17.99 | 6.745e−10 | 234-260 | BL01113 | C1q domain proteins. |
| 964 | BL01113A | 17.99 | 6.769e−12 | 636-662 | BL01113 | C1q domain proteins. |
| 964 | BL01113A | 17.99 | 6.936e−10 | 777-803 | BL01113 | C1q domain proteins. |
| 964 | BL01113A | 17.99 | 7.128e−10 | 702-728 | BL01113 | C1q domain proteins. |
| 964 | BL01113A | 17.99 | 7.128e−10 | 867-893 | BL01113 | C1q domain proteins. |
| 964 | BL01113A | 17.99 | 7.136e−11 | 537-563 | BL01113 | C1q domain proteins. |
| 964 | BL01113A | 17.99 | 7.231e−09 | 561-587 | BL01113 | C1q domain proteins. |
| 964 | BL01113A | 17.99 | 7.231e−09 | 681-707 | BL01113 | C1q domain proteins. |
| 964 | BL01113A | 17.99 | 7.231e−09 | 855-881 | BL01113 | C1q domain proteins. |
| 964 | BL01113A | 17.99 | 7.273e−14 | 714-740 | BL01113 | C1q domain proteins. |
| 964 | BL01113A | 17.99 | 7.319e−10 | 876-902 | BL01113 | C1q domain proteins. |
| 964 | BL01113A | 17.99 | 7.324e−13 | 186-212 | BL01113 | C1q domain proteins. |
| 964 | BL01113A | 17.99 | 7.404e−09 | 528-554 | BL01113 | C1q domain proteins. |
| 964 | BL01113A | 17.99 | 7.511e−10 | 121-147 | BL01113 | C1q domain proteins. |
| 964 | BL01113A | 17.99 | 7.511e−10 | 657-683 | BL01113 | C1q domain proteins. |
| 964 | BL01113A | 17.99 | 7.545e−11 | 330-356 | BL01113 | C1q domain proteins. |
| 964 | BL01113A | 17.99 | 7.577e−09 | 711-737 | BL01113 | C1q domain proteins. |
| 964 | BL01113A | 17.99 | 7.692e−12 | 729-755 | BL01113 | C1q domain proteins. |
| 964 | BL01113A | 17.99 | 7.692e−12 | 747-773 | BL01113 | C1q domain proteins. |
| 964 | BL01113A | 17.99 | 7.702e−10 | 768-794 | BL01113 | C1q domain proteins. |
| 964 | BL01113A | 17.99 | 7.750e−09 | 684-710 | BL01113 | C1q domain proteins. |
| 964 | BL01113A | 17.99 | 7.750e−09 | 792-818 | BL01113 | C1q domain proteins. |
| 964 | BL01113A | 17.99 | 7.923e−09 | 402-428 | BL01113 | C1q domain proteins. |
| 964 | BL01113A | 17.99 | 7.923e−09 | 549-575 | BL01113 | C1q domain proteins. |
| 964 | BL01113A | 17.99 | 7.923e−09 | 627-653 | BL01113 | C1q domain proteins. |
| 964 | BL01113A | 17.99 | 7.923e−09 | 663-689 | BL01113 | C1q domain proteins. |
| 964 | BL01113A | 17.99 | 7.923e−12 | 180-206 | BL01113 | C1q domain proteins. |
| 964 | BL01113A | 17.99 | 8.054e−13 | 567-593 | BL01113 | C1q domain proteins. |
| 964 | BL01113A | 17.99 | 8.085e−10 | 861-887 | BL01113 | C1q domain proteins. |
| 964 | BL01113A | 17.99 | 8.096e−09 | 315-341 | BL01113 | C1q domain proteins. |
| 964 | BL01113A | 17.99 | 8.096e−09 | 717-743 | BL01113 | C1q domain proteins. |
| 964 | BL01113A | 17.99 | 8.159e−11 | 600-626 | BL01113 | C1q domain proteins. |
| 964 | BL01113A | 17.99 | 8.277e−10 | 642-668 | BL01113 | C1q domain proteins. |
| 964 | BL01113A | 17.99 | 8.297e−13 | 240-266 | BL01113 | C1q domain proteins. |
| 964 | BL01113A | 17.99 | 8.385e−12 | 124-150 | BL01113 | C1q domain proteins. |
| 964 | BL01113A | 17.99 | 8.442e−09 | 774-800 | BL01113 | C1q domain proteins. |
| 964 | BL01113A | 17.99 | 8.468e−10 | 873-899 | BL01113 | C1q domain proteins. |
| 964 | BL01113A | 17.99 | 8.548e−15 | 174-200 | BL01113 | C1q domain proteins. |
| 964 | BL01113A | 17.99 | 8.548e−15 | 672-698 | BL01113 | C1q domain proteins. |
| 964 | BL01113A | 17.99 | 8.636e−14 | 384-410 | BL01113 | C1q domain proteins. |
| 964 | BL01113A | 17.99 | 8.773e−11 | 522-548 | BL01113 | C1q domain proteins. |
| 964 | BL01113A | 17.99 | 8.773e−11 | 552-578 | BL01113 | C1q domain proteins. |
| 964 | BL01113A | 17.99 | 8.788e−09 | 252-278 | BL01113 | C1q domain proteins. |
| 964 | BL01113A | 17.99 | 8.846e−12 | 177-203 | BL01113 | C1q domain proteins. |
| 964 | BL01113A | 17.99 | 9.043e−10 | 366-392 | BL01113 | C1q domain proteins. |
| 964 | BL01113A | 17.99 | 9.129e−15 | 183-209 | BL01113 | C1q domain proteins. |
| 964 | BL01113A | 17.99 | 9.135e−09 | 243-269 | BL01113 | C1q domain proteins. |
| 964 | BL01113A | 17.99 | 9.135e−09 | 465-491 | BL01113 | C1q domain proteins. |
| 964 | BL01113A | 17.99 | 9.182e−14 | 651-677 | BL01113 | C1q domain proteins. |
| 964 | BL01113A | 17.99 | 9.234e−10 | 501-527 | BL01113 | C1q domain proteins. |
| 964 | BL01113A | 17.99 | 9.308e−12 | 198-224 | BL01113 | C1q domain proteins. |
| 964 | BL01113A | 17.99 | 9.308e−12 | 516-542 | BL01113 | C1q domain proteins. |
| 964 | BL01113A | 17.99 | 9.386e−11 | 228-254 | BL01113 | C1q domain proteins. |
| 964 | BL01113A | 17.99 | 9.455e−14 | 426-452 | BL01113 | C1q domain proteins. |
| 964 | BL01113A | 17.99 | 9.538e−12 | 106-132 | BL01113 | C1q domain proteins. |
| 964 | BL01113A | 17.99 | 9.617e−10 | 606-632 | BL01113 | C1q domain proteins. |
| 964 | BL01113A | 17.99 | 9.654e−09 | 585-611 | BL01113 | C1q domain proteins. |
| 964 | BL01113A | 17.99 | 9.654e−09 | 843-869 | BL01113 | C1q domain proteins. |
| 964 | BL01113A | 17.99 | 9.757e−13 | 417-443 | BL01113 | C1q domain proteins. |
| 964 | BL01113A | 17.99 | 9.757e−13 | 435-461 | BL01113 | C1q domain proteins. |
| 964 | BL01113A | 17.99 | 9.809e−10 | 558-584 | BL01113 | C1q domain proteins. |
| 964 | BL01113A | 17.99 | 9.809e−10 | 699-725 | BL01113 | C1q domain proteins. |
| 964 | BL01208B | 15.83 | 1.900e−13 | 77-91 | BL01208 | VWFC domain proteins. |
| 964 | DM01418A | 20.83 | 1.000e−40 | 955-1002 | DM01418 | 352 FIBRILLAR COLLAGEN |
| | | | | | | CARBOXYL-TERMINAL. |
| 964 | DM01418B | 22.51 | 1.000e−40 | 1053-1094 | DM01418 | 352 FIBRILLAR COLLAGEN |
| | | | | | | CARBOXYL-TERMINAL. |
| 964 | DM01418C | 20.48 | 1.000e−40 | 1124-1165 | DM01418 | 352 FIBRILLAR COLLAGEN |
| | | | | | | CARBOXYL-TERMINAL. |
| 964 | PR00049D | 0.00 | 7.559e−09 | 176-190 | PR00049 | WILM'S TUMOUR PROTEIN |
| | | | | | | SIGNATURE |
| 964 | PR00524F | 5.36 | 8.468e−09 | 513-526 | PR00524 | CHOLECYSTOKININ TYPE A |
| | | | | | | RECEPTOR SIGNATURE |
| 965 | BL00039A | 18.44 | 4.600e−31 | 211-249 | BL00039 | DEAD-box subfamily ATP- |
| | | | | | | dependent helicases |
| | | | | | | proteins. |
| 965 | BL00039B | 19.19 | 4.913e−17 | 269-294 | BL00039 | DEAD-box subfamily ATP- |
| | | | | | | dependent helicases |
| | | | | | | proteins. |
| 965 | BL00039C | 15.63 | 8.000e−27 | 353-376 | BL00039 | DEAD-box subfamily ATP- |
| | | | | | | dependent helicases |
| | | | | | | proteins. |
| 965 | BL00039D | 21.67 | 1.783e−40 | 506-551 | BL00039 | DEAD-box subfamily ATP- |
| | | | | | | dependent helicases |
| | | | | | | proteins. |
| 965 | BL00048 | 6.39 | 6.400e−09 | 612-638 | BL00048 | Protamine P1 proteins. |
| 965 | BL00291A | 4.49 | 9.458e−10 | 630-664 | BL00291 | Prion protein. |
| 965 | PF00271 | 7.99 | 3.250e−09 | 537-544 | PF00271 | Helicases conserved C- |
| | | | | | | terminal domain |
| | | | | | | proteins. |
| 966 | PR00308C | 3.83 | 2.169e−09 | 10-19 | PR00308 | TYPE I ANTIFREEZE |
| | | | | | | PROTEIN SIGNATURE |
| 966 | PR00456E | 3.06 | 6.625e−10 | 12-26 | PR00456 | RIBOSOMAL PROTEIN P2 |
| | | | | | | SIGNATURE |
| 970 | BL00460A | 28.67 | 1.514e−24 | 57-91 | BL00460 | Glutathione peroxidases |
| | | | | | | selenocysteine |
| | | | | | | proteins. |
| 970 | BL00460B | 9.73 | 4.600e−23 | 99-116 | BL00460 | Glutathione peroxidases |
| | | | | | | selenocysteine |
| | | | | | | proteins. |
| 970 | BL00460C | 14.35 | 4.724e−21 | 137-159 | BL00460 | Glutathione peroxidases |
| | | | | | | selenocysteine |
| | | | | | | proteins. |
| 970 | BL00460D | 16.89 | 1.818e−22 | 185-204 | BL00460 | Glutathione peroxidases |
| | | | | | | selenocysteine |
| | | | | | | proteins. |
| 971 | BL00262A | 12.48 | 4.600e−15 | 124-141 | BL00262 | Insulin family |
| | | | | | | proteins. |
| 971 | BL00262B | 16.89 | 8.286e−17 | 160-179 | BL00262 | Insulin family |
| | | | | | | proteins. |
| 971 | PR00276A | 11.84 | 4.750e−13 | 161-170 | PR00276 | INSULIN A CHAIN |
| | | | | | | SIGNATURE |
| 971 | PR00276B | 8.02 | 7.828e−10 | 170-179 | PR00276 | INSULIN A CHAIN |
| | | | | | | SIGNATURE |
| 971 | PR00277A | 14.82 | 2.421e−13 | 121-134 | PR00277 | INSULIN B CHAIN |
| | | | | | | SIGNATURE |
| 971 | PR00277B | 12.79 | 2.350e−11 | 135-147 | PR00277 | INSULIN B CHAIN |
| | | | | | | SIGNATURE |
| 975 | PF00023A | 16.03 | 5.500e−10 | 132-147 | PF00023 | Ank repeat proteins. |
| 975 | PF00791B | 28.49 | 1.818e−11 | 132-186 | PF00791 | Domain present in ZO-1 |
| | | | | | | and Unc5-like netrin |
| | | | | | | receptors. |
| 975 | PF00791B | 28.49 | 5.046e−09 | 165-219 | PF00791 | Domain present in ZO-1 |
| | | | | | | and Unc5-like netrin |
| | | | | | | receptors. |
| 975 | PF00791B | 28.49 | 6.942e−10 | 99-153 | PF00791 | Domain present in ZO-1 |
| | | | | | | and Unc5-like netrin |
| | | | | | | receptors. |
| 979 | PF00777A | 8.25 | 4.000e−10 | 52-63 | PF00777 | Sialyltransferase |
| | | | | | | family. |
| 979 | PF00777B | 29.69 | 1.500e−28 | 89-131 | PF00777 | Sialyltransferase |
| | | | | | | family. |
| 979 | PF00777C | 18.60 | 1.000e−40 | 158-212 | PF00777 | Sialyltransferase |
| | | | | | | family. |
| 979 | PF00777D | 22.05 | 9.325e−39 | 291-336 | PF00777 | Sialyltransferase |
| | | | | | | family. |
| 980 | BL00171B | 26.59 | 1.125e−16 | 69-119 | BL00171 | Triosephosphate |
| | | | | | | isomerase proteins. |
| 980 | BL00171C | 14.53 | 6.294e−36 | 163-195 | BL00171 | Triosephosphate |
| | | | | | | isomerase proteins. |
| 980 | BL00171D | 15.75 | 1.563e−37 | 211-245 | BL00171 | Triosephosphate |
| | | | | | | isomerase proteins. |
| 981 | BL00061A | 9.41 | 4.600e−13 | 139-149 | BL00061 | Short-chain |
| | | | | | | dehydrogenases/reductases |
| | | | | | | family proteins. |
| 981 | BL00061B | 25.79 | 9.250e−27 | 187-224 | BL00061 | Short-chain |
| | | | | | | dehydrogenases/reductases |
| | | | | | | family proteins. |
| 981 | BL00061C | 7.86 | 1.563e−10 | 231-240 | BL00061 | Short-chain |
| | | | | | | dehydrogenases/reductases |
| | | | | | | family proteins. |
| 981 | PR00080A | 9.32 | 3.143e−12 | 139-150 | PR00080 | ALCOHOL DEHYDROGENASE |
| | | | | | | SUPERFAMILY SIGNATURE |
| 981 | PR00080C | 17.16 | 4.429e−13 | 207-226 | PR00080 | ALCOHOL DEHYDROGENASE |
| | | | | | | SUPERFAMILY SIGNATURE |
| 981 | PR00081A | 10.53 | 4.333e−14 | 63-80 | PR00081 | GLUCOSE/RIBITOL |
| | | | | | | DEHYDROGENASE FAMILY |
| | | | | | | SIGNATURE |
| 981 | PR00081B | 10.38 | 8.800e−14 | 139-150 | PR00081 | GLUCOSE/RIBITOL |
| | | | | | | DEHYDROGENASE FAMILY |
| | | | | | | SIGNATURE |
| 981 | PR00081D | 15.80 | 5.800e−12 | 207-226 | PR00081 | GLUCOSE/RIBITOL |
| | | | | | | DEHYDROGENASE FAMILY |
| | | | | | | SIGNATURE |
| 981 | PR00081E | 17.54 | 9.250e−12 | 230-247 | PR00081 | GLUCOSE/RIBITOL |
| | | | | | | DEHYDROGENASE FAMILY |
| | | | | | | SIGNATURE |
| 982 | BL01073 | 24.30 | 1.000e−40 | 51-100 | BL01073 | Ribosomal protein L24e |
| | | | | | | proteins. |
| 985 | BL00223A | 15.59 | 2.253e−11 | 298-331 | BL00223 | Annexins repeat |
| | | | | | | proteins domain |
| | | | | | | proteins. |
| 985 | BL00223A | 15.59 | 8.250e−27 | 138-171 | BL00223 | Annexins repeat |
| | | | | | | proteins domain |
| | | | | | | proteins. |
| 985 | BL00223A | 15.59 | 8.750e−27 | 66-99 | BL00223 | Annexins repeat |
| | | | | | | proteins domain |
| | | | | | | proteins. |
| 985 | BL00223B | 28.47 | 3.032e−37 | 208-257 | BL00223 | Annexins repeat |
| | | | | | | proteins domain |
| | | | | | | proteins. |
| 985 | BL00223C | 24.79 | 1.000e−40 | 285-339 | BL00223 | Annexins repeat |
| | | | | | | proteins domain |
| | | | | | | proteins. |
| 985 | BL00223C | 24.79 | 2.735e−15 | 125-179 | BL00223 | Annexins repeat |
| | | | | | | proteins domain |
| | | | | | | proteins. |
| 985 | BL00223C | 24.79 | 9.438e−16 | 53-107 | BL00223 | Annexins repeat |
| | | | | | | proteins domain |
| | | | | | | proteins. |
| 985 | PR00196A | 11.16 | 4.676e−10 | 147-169 | PR00196 | ANNEXIN FAMILY |
| | | | | | | SIGNATURE |
| 985 | PR00196A | 11.16 | 8.773e−23 | 75-97 | PR00196 | ANNEXIN FAMILY |
| | | | | | | SIGNATURE |
| 985 | PR00196B | 10.68 | 5.050e−17 | 115-131 | PR00196 | ANNEXIN FAMILY |
| | | | | | | SIGNATURE |
| 985 | PR00196C | 10.36 | 1.443e−13 | 70-91 | PR00196 | ANNEXIN FAMILY |
| | | | | | | SIGNATURE |
| 985 | PR00196C | 10.36 | 7.968e−21 | 142-163 | PR00196 | ANNEXIN FAMILY |
| | | | | | | SIGNATURE |
| 985 | PR00196C | 10.36 | 9.609e−11 | 302-323 | PR00196 | ANNEXIN FAMILY |
| | | | | | | SIGNATURE |
| 985 | PR00196D | 21.86 | 1.818e−23 | 226-252 | PR00196 | ANNEXIN FAMILY |
| | | | | | | SIGNATURE |
| 985 | PR00196E | 9.19 | 1.900e−09 | 74-94 | PR00196 | ANNEXIN FAMILY |
| | | | | | | SIGNATURE |
| 985 | PR00196E | 9.19 | 9.100e−22 | 306-326 | PR00196 | ANNEXIN FAMILY |
| | | | | | | SIGNATURE |
| 985 | PR00196E | 9.19 | 9.763e−10 | 146-166 | PR00196 | ANNEXIN FAMILY |
| | | | | | | SIGNATURE |
| 985 | PR00196F | 13.89 | 1.720e−14 | 334-349 | PR00196 | ANNEXIN FAMILY |
| | | | | | | SIGNATURE |
| 985 | PR00196G | 11.72 | 9.333e−14 | 350-363 | PR00196 | ANNEXIN FAMILY |
| | | | | | | SIGNATURE |
| 985 | PR00197B | 7.56 | 9.786e−12 | 75-97 | PR00197 | ANNEXIN TYPE I |
| | | | | | | SIGNATURE |
| 985 | PR00197D | 7.50 | 6.242e−10 | 302-323 | PR00197 | ANNEXIN TYPE I |
| | | | | | | SIGNATURE |
| 985 | PR00197D | 7.50 | 7.207e−11 | 70-91 | PR00197 | ANNEXIN TYPE I |
| | | | | | | SIGNATURE |
| 985 | PR00197D | 7.50 | 8.500e−15 | 142-163 | PR00197 | ANNEXIN TYPE I |
| | | | | | | SIGNATURE |
| 985 | PR00197E | 11.89 | 3.415e−14 | 226-252 | PR00197 | ANNEXIN TYPE I |
| | | | | | | SIGNATURE |
| 985 | PR00197F | 9.03 | 5.757e−17 | 306-326 | PR00197 | ANNEXIN TYPE I |
| | | | | | | SIGNATURE |
| 985 | PR00197F | 9.03 | 9.724e−09 | 146-166 | PR00197 | ANNEXIN TYPE I |
| | | | | | | SIGNATURE |
| 985 | PR00198B | 8.71 | 5.400e−12 | 75-97 | PR00198 | ANNEXIN TYPE II |
| | | | | | | SIGNATURE |
| 985 | PR00198D | 7.65 | 2.113e−10 | 302-323 | PR00198 | ANNEXIN TYPE II |
| | | | | | | SIGNATURE |
| 985 | PR00198D | 7.65 | 4.812e−13 | 142-163 | PR00198 | ANNEXIN TYPE II |
| | | | | | | SIGNATURE |
| 985 | PR00198D | 7.65 | 6.155e−09 | 70-91 | PR00198 | ANNEXIN TYPE II |
| | | | | | | SIGNATURE |
| 985 | PR00198E | 14.67 | 7.698e−14 | 226-252 | PR00198 | ANNEXIN TYPE II |
| | | | | | | SIGNATURE |
| 985 | PR00198G | 8.09 | 9.407e−10 | 146-166 | PR00198 | ANNEXIN TYPE II |
| | | | | | | SIGNATURE |
| 985 | PR00198G | 8.09 | 9.486e−16 | 306-326 | PR00198 | ANNEXIN TYPE II |
| | | | | | | SIGNATURE |
| 985 | PR00198H | 12.05 | 3.025e−09 | 350-363 | PR00198 | ANNEXIN TYPE II |
| | | | | | | SIGNATURE |
| 985 | PR00199B | 6.86 | 9.316e−17 | 75-97 | PR00199 | ANNEXIN TYPE III |
| | | | | | | SIGNATURE |
| 985 | PR00199B | 6.86 | 9.518e−09 | 147-169 | PR00199 | ANNEXIN TYPE III |
| | | | | | | SIGNATURE |
| 985 | PR00199C | 13.84 | 5.680e−11 | 115-131 | PR00199 | ANNEXIN TYPE III |
| | | | | | | SIGNATURE |
| 985 | PR00199D | 5.65 | 6.013e−12 | 142-163 | PR00199 | ANNEXIN TYPE III |
| | | | | | | SIGNATURE |
| 985 | PR00199D | 5.65 | 9.609e−09 | 302-323 | PR00199 | ANNEXIN TYPE III |
| | | | | | | SIGNATURE |
| 985 | PR00199D | 5.65 | 9.750e−14 | 70-91 | PR00199 | ANNEXIN TYPE III |
| | | | | | | SIGNATURE |
| 985 | PR00199F | 16.19 | 5.565e−15 | 226-252 | PR00199 | ANNEXIN TYPE III |
| | | | | | | SIGNATURE |
| 985 | PR00199G | 9.09 | 5.821e−14 | 307-332 | PR00199 | ANNEXIN TYPE III |
| | | | | | | SIGNATURE |
| 985 | PR00199H | 12.62 | 5.632e−09 | 350-363 | PR00199 | ANNEXIN TYPE III |
| | | | | | | SIGNATURE |
| 985 | PR00200B | 7.39 | 1.429e−10 | 147-169 | PR00200 | ANNEXIN TYPE IV |
| | | | | | | SIGNATURE |
| 985 | PR00200B | 7.39 | 9.372e−15 | 75-97 | PR00200 | ANNEXIN TYPE IV |
| | | | | | | SIGNATURE |
| 985 | PR00200D | 10.01 | 8.012e−13 | 115-131 | PR00200 | ANNEXIN TYPE IV |
| | | | | | | SIGNATURE |
| 985 | PR00200E | 10.00 | 4.522e−11 | 70-91 | PR00200 | ANNEXIN TYPE IV |
| | | | | | | SIGNATURE |
| 985 | PR00200E | 10.00 | 6.157e−12 | 302-323 | PR00200 | ANNEXIN TYPE IV |
| | | | | | | SIGNATURE |
| 985 | PR00200E | 10.00 | 7.446e−17 | 142-163 | PR00200 | ANNEXIN TYPE IV |
| | | | | | | SIGNATURE |
| 985 | PR00200F | 13.72 | 1.228e−17 | 226-252 | PR00200 | ANNEXIN TYPE IV |
| | | | | | | SIGNATURE |
| 985 | PR00200G | 9.43 | 3.473e−16 | 306-332 | PR00200 | ANNEXIN TYPE IV |
| | | | | | | SIGNATURE |
| 985 | PR00200G | 9.43 | 6.218e−09 | 146-172 | PR00200 | ANNEXIN TYPE IV |
| | | | | | | SIGNATURE |
| 985 | PR00200H | 13.68 | 9.775e−10 | 350-363 | PR00200 | ANNEXIN TYPE IV |
| | | | | | | SIGNATURE |
| 985 | PR00201A | 6.05 | 4.623e−15 | 75-97 | PR00201 | ANNEXIN TYPE V |
| | | | | | | SIGNATURE |
| 985 | PR00201A | 6.05 | 8.958e−10 | 147-169 | PR00201 | ANNEXIN TYPE V |
| | | | | | | SIGNATURE |
| 985 | PR00201C | 11.13 | 1.947e−17 | 115-131 | PR00201 | ANNEXIN TYPE V |
| | | | | | | SIGNATURE |
| 985 | PR00201D | 10.49 | 5.330e−09 | 302-323 | PR00201 | ANNEXIN TYPE V |
| | | | | | | SIGNATURE |
| 985 | PR00201D | 10.49 | 6.764e−13 | 142-163 | PR00201 | ANNEXIN TYPE V |
| | | | | | | SIGNATURE |
| 985 | PR00201E | 12.37 | 9.780e−17 | 226-252 | PR00201 | ANNEXIN TYPE V |
| | | | | | | SIGNATURE |
| 985 | PR00201G | 11.02 | 5.375e−21 | 306-332 | PR00201 | ANNEXIN TYPE V |
| | | | | | | SIGNATURE |
| 985 | PR00201H | 12.04 | 9.859e−12 | 350-363 | PR00201 | ANNEXIN TYPE V |
| | | | | | | SIGNATURE |
| 985 | PR00202B | 11.44 | 8.590e−15 | 74-97 | PR00202 | ANNEXIN TYPE VI |
| | | | | | | SIGNATURE |
| 985 | PR00202C | 13.34 | 5.438e−16 | 115-131 | PR00202 | ANNEXIN TYPE VI |
| | | | | | | SIGNATURE |
| 985 | PR00202D | 5.58 | 8.813e−13 | 142-163 | PR00202 | ANNEXIN TYPE VI |
| | | | | | | SIGNATURE |
| 985 | PR00202E | 13.00 | 6.663e−14 | 226-252 | PR00202 | ANNEXIN TYPE VI |
| | | | | | | SIGNATURE |
| 985 | PR00202G | 8.01 | 5.703e−10 | 146-172 | PR00202 | ANNEXIN TYPE VI |
| | | | | | | SIGNATURE |
| 985 | PR00202G | 8.01 | 6.357e−18 | 306-332 | PR00202 | ANNEXIN TYPE VI |
| | | | | | | SIGNATURE |
| 985 | PR00202H | 9.20 | 3.588e−10 | 350-363 | PR00202 | ANNEXIN TYPE VI |
| | | | | | | SIGNATURE |
| 990 | BL01159 | 13.85 | 5.776e−10 | 166-180 | BL01159 | WW/rsp5/WWP domain |
| | | | | | | proteins. |
| 990 | PR00403A | 16.82 | 9.561e−09 | 151-164 | PR00403 | WW DOMAIN SIGNATURE |
| 990 | PR00403B | 12.19 | 1.184e−11 | 166-180 | PR00403 | WW DOMAIN SIGNATURE |
| 991 | BL01182F | 10.07 | 4.162e−16 | 9-23 | BL01182 | Glycosyl hydrolases |
| | | | | | | family 35 proteins. |
| 991 | PR00742I | 13.54 | 6.455e−18 | 9-25 | PR00742 | GLYCOSYL HYDROLASE |
| | | | | | | FAMILY 35 SIGNATURE |
| 994 | BL00563A | 16.73 | 7.097e−40 | 26-64 | BL00563 | Stathmin family |
| | | | | | | proteins. |
| 994 | BL00563B | 6.08 | 1.000e−32 | 65-91 | BL00563 | Stathmin family |
| | | | | | | proteins. |
| 994 | BL00563C | 12.83 | 2.174e−37 | 95-124 | BL00563 | Stathmin family |
| | | | | | | proteins. |
| 994 | BL00563D | 11.38 | 1.000e−40 | 125-160 | BL00563 | Stathmin family |
| | | | | | | proteins. |
| 994 | BL00563D | 11.38 | 9.609e−09 | 74-109 | BL00563 | Stathmin family |
| | | | | | | proteins. |
| 994 | PR00345A | 13.46 | 4.316e−22 | 30-48 | PR00345 | STATHMIN FAMILY |
| | | | | | | SIGNATURE |
| 994 | PR00345B | 7.12 | 7.750e−35 | 59-87 | PR00345 | STATHMIN FAMILY |
| | | | | | | SIGNATURE |
| 994 | PR00345C | 4.54 | 5.714e−29 | 88-111 | PR00345 | STATHMIN FAMILY |
| | | | | | | SIGNATURE |
| 994 | PR00345D | 10.97 | 6.850e−31 | 112-135 | PR00345 | STATHMIN FAMILY |
| | | | | | | SIGNATURE |
| 994 | PR00345E | 8.54 | 3.571e−29 | 136-160 | PR00345 | STATHMIN FAMILY |
| | | | | | | SIGNATURE |
| 998 | PF00846A | 11.74 | 5.537e−09 | 108-154 | PF00846 | Hantavirus nucleocapsid |
| | | | | | | protein. |
| 999 | BL00142 | 8.38 | 9.438e−10 | 528-538 | BL00142 | Neutral zinc |
| | | | | | | metallopeptidases, |
| | | | | | | zinc-binding region |
| | | | | | | proteins. |
| 999 | PR00756A | 12.90 | 6.500e−18 | 367-382 | PR00756 | MEMBRANE ALANYL |
| | | | | | | DIPEPTIDASE (M1) FAMILY |
| | | | | | | SIGNATURE |
| 999 | PR00756B | 14.06 | 4.000e−14 | 415-430 | PR00756 | MEMBRANE ALANYL |
| | | | | | | DIPEPTIDASE (M1) FAMILY |
| | | | | | | SIGNATURE |
| 999 | PR00756C | 11.60 | 6.087e−13 | 492-502 | PR00756 | MEMBRANE ALANYL |
| | | | | | | DIPEPTIDASE (M1) FAMILY |
| | | | | | | SIGNATURE |
| 999 | PR00756D | 10.58 | 8.412e−21 | 528-543 | PR00756 | MEMBRANE ALANYL |
| | | | | | | DIPEPTIDASE (M1) FAMILY |
| | | | | | | SIGNATURE |
| 999 | PR00756E | 11.91 | 4.375e−16 | 547-559 | PR00756 | MEMBRANE ALANYL |
| | | | | | | DIPEPTIDASE (M1) FAMILY |
| | | | | | | SIGNATURE |
| 1000 | BL00139A | 10.29 | 8.457e−11 | 277-286 | BL00139 | Eukaryotic thiol |
| | | | | | | (cysteine) proteases |
| | | | | | | cysteine proteins. |
| 1000 | BL00139C | 9.23 | 3.769e−12 | 429-438 | BL00139 | Eukaryotic thiol |
| | | | | | | (cysteine) proteases |
| | | | | | | cysteine proteins. |
| 1000 | BL00139D | 9.24 | 3.769e−21 | 447-463 | BL00139 | Eukaryotic thiol |
| | | | | | | (cysteine) proteases |
| | | | | | | cysteine proteins. |
| 1000 | PR00705A | 10.55 | 6.000e−13 | 277-292 | PR00705 | PAPAIN CYSTEINE |
| | | | | | | PROTEASE (C1) FAMILY |
| | | | | | | SIGNATURE |
| 1000 | PR00705B | 10.22 | 6.143e−12 | 430-440 | PR00705 | PAPAIN CYSTEINE |
| | | | | | | PROTEASE (C1) FAMILY |
| | | | | | | SIGNATURE |
| 1000 | PR00705C | 11.87 | 6.824e−09 | 447-453 | PR00705 | PAPAIN CYSTEINE |
| | | | | | | PROTEASE (C1) FAMILY |
| | | | | | | SIGNATURE |
| 1001 | PF01008A | 20.14 | 9.333e−14 | 144-164 | PF01008 | Initiation factor 2 |
| | | | | | | subunit. |
| 1001 | PF01008B | 25.59 | 1.964e−32 | 192-234 | PF01008 | Initiation factor 2 |
| | | | | | | subunit. |
| 1001 | PF01008C | 12.25 | 9.667e−18 | 273-292 | PF01008 | Initiation factor 2 |
| | | | | | | subunit. |
| 1002 | BL01164A | 19.74 | 6.063e−23 | 324-353 | BL01164 | Copper amine oxidase |
| | | | | | | topaquinone proteins. |
| 1002 | BL01164B | 19.21 | 1.818e−21 | 364-390 | BL01164 | Copper amine oxidase |
| | | | | | | topaquinone proteins. |
| 1002 | BL01164C | 17.88 | 1.563e−23 | 391-419 | BL01164 | Copper amine oxidase |
| | | | | | | topaquinone proteins. |
| 1002 | BL01164D | 19.79 | 1.333e−33 | 470-504 | BL01164 | Copper amine oxidase |
| | | | | | | topaquinone proteins. |
| 1002 | BL01164E | 13.77 | 6.000e−18 | 530-547 | BL01164 | Copper amine oxidase |
| | | | | | | topaquinone proteins. |
| 1002 | BL01164F | 19.03 | 5.091e−28 | 677-706 | BL01164 | Copper amine oxidase |
| | | | | | | topaquinone proteins. |
| 1002 | PR00766A | 16.19 | 5.500e−23 | 86-105 | PR00766 | AMILORIDE-SENSITIVE |
| | | | | | | AMINE OXIDASE SIGNATURE |
| 1002 | PR00766B | 10.58 | 4.706e−25 | 115-134 | PR00766 | AMILORIDE-SENSITIVE |
| | | | | | | AMINE OXIDASE SIGNATURE |
| 1002 | PR00766C | 15.50 | 4.130e−23 | 204-224 | PR00766 | AMILORIDE-SENSITIVE |
| | | | | | | AMINE OXIDASE SIGNATURE |
| 1002 | PR00766D | 9.15 | 1.000e−26 | 227-247 | PR00766 | AMILORIDE-SENSITIVE |
| | | | | | | AMINE OXIDASE SIGNATURE |
| 1002 | PR00766E | 9.59 | 2.421e−27 | 361-382 | PR00766 | AMILORIDE-SENSITIVE |
| | | | | | | AMINE OXIDASE SIGNATURE |
| 1002 | PR00766F | 15.10 | 4.522e−28 | 439-462 | PR00766 | AMILORIDE-SENSITIVE |
| | | | | | | AMINE OXIDASE SIGNATURE |
| 1002 | PR00766G | 11.62 | 1.643e−27 | 678-698 | PR00766 | AMILORIDE-SENSITIVE |
| | | | | | | AMINE OXIDASE SIGNATURE |
| 1004 | PF00642 | 11.59 | 3.700e−16 | 166-176 | PF00642 | Zinc finger C-x8-C-x5- |
| | | | | | | C-x3-H type (and |
| | | | | | | similar). |
| 1004 | PF00642 | 11.59 | 7.900e−12 | 128-138 | PF00642 | Zinc finger C-x8-C-x5- |
| | | | | | | C-x3-H type (and |
| | | | | | | similar). |
| 1007 | BL00142 | 8.38 | 4.857e−09 | 582-592 | BL00142 | Neutral zinc |
| | | | | | | metallopeptidases, |
| | | | | | | zinc-binding region |
| | | | | | | proteins. |
| 1007 | PR00786A | 11.12 | 4.857e−13 | 536-548 | PR00786 | NEPRILYSIN |
| | | | | | | METALLOPROTEASE (M13) |
| | | | | | | FAMILY SIGNATURE |
| 1007 | PR00786B | 9.59 | 8.000e−17 | 554-566 | PR00786 | NEPRILYSIN |
| | | | | | | METALLOPROTEASE (M13) |
| | | | | | | FAMILY SIGNATURE |
| 1007 | PR00786C | 9.76 | 2.000e−22 | 575-591 | PR00786 | NEPRILYSIN |
| | | | | | | METALLOPROTEASE (M13) |
| | | | | | | FAMILY SIGNATURE |
| 1007 | PR00786D | 9.78 | 5.500e−14 | 648-659 | PR00786 | NEPRILYSIN |
| | | | | | | METALLOPROTEASE (M13) |
| | | | | | | FAMILY SIGNATURE |
| 1008 | BL00232A | 27.72 | 3.739e−26 | 82-114 | BL00232 | Cadherins extracellular |
| | | | | | | repeat proteins domain |
| | | | | | | proteins. |
| 1008 | BL00232B | 32.79 | 5.125e−40 | 174-221 | BL00232 | Cadherins extracellular |
| | | | | | | repeat proteins domain |
| | | | | | | proteins. |
| 1008 | BL00232B | 32.79 | 9.286e−19 | 281-328 | BL00232 | Cadherins extracellular |
| | | | | | | repeat proteins domain |
| | | | | | | proteins. |
| 1008 | BL00232C | 10.65 | 6.143e−16 | 279-296 | BL00232 | Cadherins extracellular |
| | | | | | | repeat proteins domain |
| | | | | | | proteins. |
| 1008 | BL00232D | 16.25 | 3.842e−13 | 796-810 | BL00232 | Cadherins extracellular |
| | | | | | | repeat proteins domain |
| | | | | | | proteins. |
| 1008 | PR00205A | 14.73 | 4.000e−12 | 206-221 | PR00205 | CADHERIN SIGNATURE |
| 1008 | PR00205B | 11.39 | 2.241e−16 | 279-296 | PR00205 | CADHERIN SIGNATURE |
| 1008 | PR00205C | 13.65 | 2.688e−10 | 540-554 | PR00205 | CADHERIN SIGNATURE |
| 1009 | BL00262A | 12.48 | 3.829e−09 | 57-74 | BL00262 | Insulin family |
| | | | | | | proteins. |
| 1009 | BL00262B | 16.89 | 4.977e−11 | 146-165 | BL00262 | Insulin family |
| | | | | | | proteins. |
| 1010 | PF00013 | 5.78 | 4.150e−09 | 127-138 | PF00013 | KH domain proteins |
| | | | | | | family of RNA binding |
| | | | | | | proteins. |
| 1011 | BL00719A | 16.66 | 7.488e−09 | 88-101 | BL00719 | Glycosyl hydrolases |
| | | | | | | family 2 proteins. |
| 1013 | BL00412D | 16.54 | 6.969e−09 | 75-125 | BL00412 | Neuromodulin (GAP-43) |
| | | | | | | proteins. |
| 1014 | PR00449D | 10.79 | 8.364e−12 | 55-68 | PR00449 | TRANSFORMING PROTEIN |
| | | | | | | P21 RAS SIGNATURE |
| 1014 | PR00449E | 13.50 | 4.706e−11 | 90-112 | PR00449 | TRANSFORMING PROTEIN |
| | | | | | | P21 RAS SIGNATURE |
| 1015 | PD02870B | 18.83 | 3.872e−09 | 345-377 | PD02870 | RECEPTOR INTERLEUKIN-1 |
| | | | | | | PRECURSOR. |
| 1016 | BL00022B | 7.54 | 1.000e−08 | 328-334 | BL00022 | EGF-like domain |
| | | | | | | proteins. |
| 1016 | BL01177C | 17.39 | 3.286e−09 | 394-412 | BL01177 | Anaphylatoxin domain |
| | | | | | | proteins. |
| 1016 | BL01177C | 17.39 | 5.119e−10 | 352-370 | BL01177 | Anaphylatoxin domain |
| | | | | | | proteins. |
| 1016 | BL01187A | 9.98 | 2.286e−13 | 343-354 | BL01187 | Calcium-binding EGF- |
| | | | | | | like domain proteins |
| | | | | | | pattern proteins. |
| 1016 | BL01187A | 9.98 | 4.750e−09 | 383-394 | BL01187 | Calcium-binding EGF- |
| | | | | | | like domain proteins |
| | | | | | | pattern proteins. |
| 1016 | BL01187B | 12.04 | 1.900e−09 | 276-291 | BL01187 | Calcium-binding EGF- |
| | | | | | | like domain proteins |
| | | | | | | pattern proteins. |
| 1016 | BL01187B | 12.04 | 3.667e−12 | 358-373 | BL01187 | Calcium-binding EGF- |
| | | | | | | like domain proteins |
| | | | | | | pattern proteins. |
| 1016 | BL01187B | 12.04 | 8.200e−14 | 443-458 | BL01187 | Calcium-binding EGF- |
| | | | | | | like domain proteins |
| | | | | | | pattern proteins. |
| 1016 | BL01187B | 12.04 | 8.826e−13 | 400-415 | BL01187 | Calcium-binding EGF- |
| | | | | | | like domain proteins |
| | | | | | | pattern proteins. |
| 1016 | PD00919A | 11.53 | 5.227e−09 | 306-317 | PD00919 | CALCIUM-BINDING |
| | | | | | | PRECURSOR SIGNAL R. |
| 1016 | PR00255E | 15.23 | 9.882e−09 | 586-608 | PR00255 | NATRIURETIC PEPTIDE |
| | | | | | | RECEPTOR SIGNATURE |
| 1016 | PR00352B | 13.51 | 6.400e−09 | 240-250 | PR00352 | 3FE-4S FERREDOXIN |
| | | | | | | SIGNATURE |
| 1016 | PR00907G | 11.63 | 1.243e−09 | 400-426 | PR00907 | THROMBOMODULIN |
| | | | | | | SIGNATURE |
| 1020 | BL00222B | 11.09 | 1.878e−12 | 114-129 | BL00222 | Insulin-like growth |
| | | | | | | factor binding |
| | | | | | | proteins. |
| 1020 | BL00222B | 11.09 | 3.250e−16 | 100-115 | BL00222 | Insulin-like growth |
| | | | | | | factor binding |
| | | | | | | proteins. |
| 1020 | BL00222C | 22.97 | 7.900e−25 | 158-185 | BL00222 | Insulin-like growth |
| | | | | | | factor binding |
| | | | | | | proteins. |
| 1020 | BL01185A | 8.11 | 6.318e−16 | 100-111 | BL01185 | C-terminal cystine knot |
| | | | | | | proteins. |
| 1020 | BL01185B | 21.14 | 1.000e−40 | 151-199 | BL01185 | C-terminal cystine knot |
| | | | | | | proteins. |
| 1020 | BL01185C | 15.86 | 2.038e−37 | 247-285 | BL01185 | C-terminal cystine knot |
| | | | | | | proteins. |
| 1020 | BL01185D | 23.45 | 1.000e−40 | 321-373 | BL01185 | C-terminal cystine knot |
| | | | | | | proteins. |
| 1020 | BL01208B | 15.83 | 5.500e−12 | 247-261 | BL01208 | VWFC domain proteins. |
| 1020 | BL01208C | 14.16 | 6.400e−11 | 280-290 | BL01208 | VWFC domain proteins. |
| 1021 | BL00030A | 14.39 | 9.571e−09 | 9-27 | BL00030 | Eukaryotic RNA-binding |
| | | | | | | region RNP-1 proteins. |
| 1021 | BL00030B | 7.03 | 1.000e−12 | 40-49 | BL00030 | Eukaryotic RNA-binding |
| | | | | | | region RNP-1 proteins. |
| 1021 | BL00048 | 6.39 | 1.000e−12 | 294-320 | BL00048 | Protamine P1 proteins. |
| 1021 | BL00048 | 6.39 | 2.059e−12 | 293-319 | BL00048 | Protamine P1 proteins. |
| 1021 | BL00048 | 6.39 | 2.324e−12 | 295-321 | BL00048 | Protamine P1 proteins. |
| 1021 | BL00048 | 6.39 | 2.913e−09 | 308-334 | BL00048 | Protamine P1 proteins. |
| 1021 | BL00048 | 6.39 | 2.938e−13 | 296-322 | BL00048 | Protamine P1 proteins. |
| 1021 | BL00048 | 6.39 | 3.125e−11 | 284-310 | BL00048 | Protamine P1 proteins. |
| 1021 | BL00048 | 6.39 | 3.250e−11 | 291-317 | BL00048 | Protamine P1 proteins. |
| 1021 | BL00048 | 6.39 | 3.625e−11 | 282-308 | BL00048 | Protamine P1 proteins. |
| 1021 | BL00048 | 6.39 | 3.700e−09 | 275-301 | BL00048 | Protamine P1 proteins. |
| 1021 | BL00048 | 6.39 | 3.724e−10 | 306-332 | BL00048 | Protamine P1 proteins. |
| 1021 | BL00048 | 6.39 | 3.750e−11 | 298-324 | BL00048 | Protamine P1 proteins. |
| 1021 | BL00048 | 6.39 | 4.046e−13 | 283-309 | BL00048 | Protamine P1 proteins. |
| 1021 | BL00048 | 6.39 | 4.176e−12 | 304-330 | BL00048 | Protamine P1 proteins. |
| 1021 | BL00048 | 6.39 | 4.671e−10 | 292-318 | BL00048 | Protamine P1 proteins. |
| 1021 | BL00048 | 6.39 | 5.015e−13 | 281-307 | BL00048 | Protamine P1 proteins. |
| 1021 | BL00048 | 6.39 | 5.125e−11 | 302-328 | BL00048 | Protamine P1 proteins. |
| 1021 | BL00048 | 6.39 | 5.145e−10 | 337-363 | BL00048 | Protamine P1 proteins. |
| 1021 | BL00048 | 6.39 | 5.500e−10 | 278-304 | BL00048 | Protamine P1 proteins. |
| 1021 | BL00048 | 6.39 | 5.846e−13 | 285-311 | BL00048 | Protamine P1 proteins. |
| 1021 | BL00048 | 6.39 | 5.974e−10 | 276-302 | BL00048 | Protamine P1 proteins. |
| 1021 | BL00048 | 6.39 | 6.092e−10 | 305-331 | BL00048 | Protamine P1 proteins. |
| 1021 | BL00048 | 6.39 | 6.329e−10 | 273-299 | BL00048 | Protamine P1 proteins. |
| 1021 | BL00048 | 6.39 | 6.400e−09 | 303-329 | BL00048 | Protamine P1 proteins. |
| 1021 | BL00048 | 6.39 | 7.492e−14 | 289-315 | BL00048 | Protamine P1 proteins. |
| 1021 | BL00048 | 6.39 | 7.500e−11 | 301-327 | BL00048 | Protamine P1 proteins. |
| 1021 | BL00048 | 6.39 | 7.785e−13 | 279-305 | BL00048 | Protamine P1 proteins. |
| 1021 | BL00048 | 6.39 | 8.377e−14 | 297-323 | BL00048 | Protamine P1 proteins. |
| 1021 | BL00048 | 6.39 | 8.538e−09 | 339-365 | BL00048 | Protamine P1 proteins. |
| 1021 | BL00048 | 6.39 | 8.627e−15 | 277-303 | BL00048 | Protamine P1 proteins. |
| 1021 | BL00048 | 6.39 | 8.672e−14 | 287-313 | BL00048 | Protamine P1 proteins. |
| 1021 | BL00048 | 6.39 | 8.816e−10 | 280-306 | BL00048 | Protamine P1 proteins. |
| 1021 | BL00048 | 6.39 | 8.941e−12 | 286-312 | BL00048 | Protamine P1 proteins. |
| 1021 | BL00048 | 6.39 | 9.000e−11 | 299-325 | BL00048 | Protamine P1 proteins. |
| 1021 | BL00048 | 6.39 | 9.100e−09 | 312-338 | BL00048 | Protamine P1 proteins. |
| 1021 | BL00048 | 6.39 | 9.308e−13 | 300-326 | BL00048 | Protamine P1 proteins. |
| 1021 | BL00048 | 6.39 | 9.723e−13 | 290-316 | BL00048 | Protamine P1 proteins. |
| 1021 | BL00048 | 6.39 | 9.735e−12 | 288-314 | BL00048 | Protamine P1 proteins. |
| 1021 | DM01206B | 10.69 | 1.000e−08 | 291-310 | DM01206 | CORONAVIRUS |
| | | | | | | NUCLEOCAPSID PROTEIN. |
| 1021 | DM01206B | 10.69 | 1.134e−11 | 287-306 | DM01206 | CORONAVIRUS |
| | | | | | | NUCLEOCAPSID PROTEIN. |
| 1021 | DM01206B | 10.69 | 3.284e−11 | 285-304 | DM01206 | CORONAVIRUS |
| | | | | | | NUCLEOCAPSID PROTEIN. |
| 1021 | DM01206B | 10.69 | 3.734e−09 | 310-329 | DM01206 | CORONAVIRUS |
| | | | | | | NUCLEOCAPSID PROTEIN. |
| 1021 | DM01206B | 10.69 | 4.714e−12 | 289-308 | DM01206 | CORONAVIRUS |
| | | | | | | NUCLEOCAPSID PROTEIN. |
| 1021 | DM01206B | 10.69 | 5.433e−11 | 283-302 | DM01206 | CORONAVIRUS |
| | | | | | | NUCLEOCAPSID PROTEIN. |
| 1021 | DM01206B | 10.69 | 5.438e−10 | 281-300 | DM01206 | CORONAVIRUS |
| | | | | | | NUCLEOCAPSID PROTEIN. |
| 1021 | DM01206B | 10.69 | 5.671e−09 | 346-365 | DM01206 | CORONAVIRUS |
| | | | | | | NUCLEOCAPSID PROTEIN. |
| 1021 | DM01206B | 10.69 | 5.970e−11 | 304-323 | DM01206 | CORONAVIRUS |
| | | | | | | NUCLEOCAPSID PROTEIN. |
| 1021 | DM01206B | 10.69 | 6.918e−10 | 306-325 | DM01206 | CORONAVIRUS |
| | | | | | | NUCLEOCAPSID PROTEIN. |
| 1021 | DM01206B | 10.69 | 7.714e−12 | 279-298 | DM01206 | CORONAVIRUS |
| | | | | | | NUCLEOCAPSID PROTEIN. |
| 1021 | DM01206B | 10.69 | 7.835e−09 | 293-312 | DM01206 | CORONAVIRUS |
| | | | | | | NUCLEOCAPSID PROTEIN. |
| 1021 | DM01206B | 10.69 | 7.949e−09 | 302-321 | DM01206 | CORONAVIRUS |
| | | | | | | NUCLEOCAPSID PROTEIN. |
| 1021 | DM01206B | 10.69 | 8.105e−13 | 308-327 | DM01206 | CORONAVIRUS |
| | | | | | | NUCLEOCAPSID PROTEIN. |
| 1021 | DM01206B | 10.69 | 8.105e−13 | 312-331 | DM01206 | CORONAVIRUS |
| | | | | | | NUCLEOCAPSID PROTEIN. |
| 1021 | DM01206B | 10.69 | 8.291e−09 | 277-296 | DM01206 | CORONAVIRUS |
| | | | | | | NUCLEOCAPSID PROTEIN. |
| 1022 | BL00345A | 13.96 | 3.903e−14 | 406-424 | BL00345 | Ets-domain proteins. |
| 1022 | BL00345B | 21.28 | 1.000e−40 | 439-489 | BL00345 | Ets-domain proteins. |
| 1022 | PD01234B | 15.53 | 3.893e−09 | 507-524 | PD01234 | PROTEIN NUCLEAR |
| | | | | | | BROMODOMAIN TRANS. |
| 1022 | PR00454A | 13.64 | 6.625e−13 | 410-423 | PR00454 | ETS DOMAIN SIGNATURE |
| 1022 | PR00454B | 20.78 | 3.625e−18 | 434-452 | PR00454 | ETS DOMAIN SIGNATURE |
| 1022 | PR00454C | 11.24 | 5.065e−22 | 453-471 | PR00454 | ETS DOMAIN SIGNATURE |
| 1022 | PR00454D | 10.89 | 5.950e−19 | 472-490 | PR00454 | ETS DOMAIN SIGNATURE |
| 1023 | BL00511 | 18.40 | 1.429e−31 | 193-224 | BL00511 | Corticotropin-releasing |
| | | | | | | factor family proteins. |
| 1027 | BL00456A | 22.59 | 8.527e−09 | 87-141 | BL00456 | Sodium: solute symporter |
| | | | | | | family proteins. |
| 1027 | BL00456C | 24.55 | 4.000e−22 | 223-277 | BL00456 | Sodium: solute symporter |
| | | | | | | family proteins. |
| 1029 | BL00360A | 16.97 | 6.478e−23 | 19-45 | BL00360 | Ribosomal protein S9 |
| | | | | | | proteins. |
| 1029 | BL00360B | 20.22 | 5.286e−29 | 62-97 | BL00360 | Ribosomal protein S9 |
| | | | | | | proteins. |
| 1029 | BL00360C | 17.65 | 8.105e−27 | 125-151 | BL00360 | Ribosomal protein S9 |
| | | | | | | proteins. |
| 1031 | BL00406A | 9.95 | 1.000e−40 | 31-65 | BL00406 | Actins proteins. |
| 1031 | BL00406B | 5.47 | 1.000e−40 | 107-161 | BL00406 | Actins proteins. |
| 1031 | BL00406C | 6.75 | 1.000e−40 | 166-220 | BL00406 | Actins proteins. |
| 1031 | BL00406D | 12.58 | 1.000e−40 | 293-347 | BL00406 | Actins proteins. |
| 1031 | BL00406E | 8.44 | 1.000e−40 | 350-399 | BL00406 | Actins proteins. |
| 1031 | PR00190A | 7.24 | 1.375e−13 | 50-59 | PR00190 | ACTIN SIGNATURE |
| 1031 | PR00190B | 9.98 | 1.000e−15 | 73-84 | PR00190 | ACTIN SIGNATURE |
| 1031 | PR00190C | 11.49 | 1.474e−30 | 85-107 | PR00190 | ACTIN SIGNATURE |
| 1031 | PR00190D | 19.23 | 1.450e−26 | 108-126 | PR00190 | ACTIN SIGNATURE |
| 1031 | PR00190E | 7.16 | 1.450e−19 | 139-152 | PR00190 | ACTIN SIGNATURE |
| 1031 | PR00190F | 7.80 | 2.286e−24 | 164-183 | PR00190 | ACTIN SIGNATURE |
| 1031 | PR00190G | 12.62 | 1.600e−21 | 260-276 | PR00190 | ACTIN SIGNATURE |
| 1032 | BL00180A | 13.20 | 5.065e−14 | 199-211 | BL00180 | Glutamine synthetase |
| | | | | | | proteins. |
| 1032 | BL00180B | 18.03 | 4.971e−14 | 235-253 | BL00180 | Glutamine synthetase |
| | | | | | | proteins. |
| 1032 | BL00180C | 12.14 | 4.600e−14 | 269-278 | BL00180 | Glutamine synthetase |
| | | | | | | proteins. |
| 1032 | BL00180D | 13.26 | 2.174e−24 | 286-307 | BL00180 | Glutamine synthetase |
| | | | | | | proteins. |
| 1032 | BL00180E | 17.60 | 1.000e−40 | 321-372 | BL00180 | Glutamine synthetase |
| | | | | | | proteins. |
| 1032 | BL00180F | 10.05 | 6.211e−17 | 385-397 | BL00180 | Glutamine synthetase |
| | | | | | | proteins. |
| 1032 | BL00180G | 10.20 | 8.435e−17 | 474-488 | BL00180 | Glutamine synthetase |
| | | | | | | proteins. |
| 1034 | BL00021B | 13.33 | 8.984e−12 | 545-562 | BL00021 | Kringle domain |
| | | | | | | proteins. |
| 1034 | BL00134A | 11.96 | 5.781e−15 | 545-561 | BL00134 | Serine proteases, |
| | | | | | | trypsin family, |
| | | | | | | histidine proteins. |
| 1034 | BL00134B | 15.99 | 4.194e−14 | 727-750 | BL00134 | Serine proteases, |
| | | | | | | trypsin family, |
| | | | | | | histidine proteins. |
| 1034 | BL00495N | 11.04 | 9.735e−11 | 719-753 | BL00495 | Apple domain proteins. |
| 1034 | BL01253G | 11.34 | 5.348e−09 | 726-739 | BL01253 | Type I fibronectin |
| | | | | | | domain proteins. |
| 1034 | PR00453A | 12.79 | 5.345e−14 | 303-320 | PR00453 | VON WILLEBRAND FACTOR |
| | | | | | | TYPE A DOMAIN SIGNATURE |
| 1034 | PR00453B | 14.65 | 4.682e−10 | 342-356 | PR00453 | VON WILLEBRAND FACTOR |
| | | | | | | TYPE A DOMAIN SIGNATURE |
| 1034 | PR00722A | 12.27 | 9.129e−13 | 546-561 | PR00722 | CHYMOTRYPSIN SERINE |
| | | | | | | PROTEASE FAMILY (S1) |
| | | | | | | SIGNATURE |
| 1034 | PR00722B | 12.51 | 4.000e−09 | 606-620 | PR00722 | CHYMOTRYPSIN SERINE |
| | | | | | | PROTEASE FAMILY (S1) |
| | | | | | | SIGNATURE |
| 1034 | PR00722C | 10.87 | 4.273e−11 | 726-738 | PR00722 | CHYMOTRYPSIN SERINE |
| | | | | | | PROTEASE FAMILY (S1) |
| | | | | | | SIGNATURE |
| 1036 | BL00018 | 7.41 | 7.300e−10 | 219-231 | BL00018 | EF-hand calcium-binding |
| | | | | | | domain proteins. |
| 1037 | BL00036 | 9.02 | 6.786e−13 | 86-98 | BL00036 | bZIP transcription |
| | | | | | | factors basic domain |
| | | | | | | proteins. |
| 1037 | PR00041C | 16.23 | 8.875e−16 | 36-47 | PR00041 | CAMP RESPONSE ELEMENT |
| | | | | | | BINDING (CREB) PROTEIN |
| | | | | | | SIGNATURE |
| 1037 | PR00041D | 7.95 | 4.750e−21 | 74-90 | PR00041 | CAMP RESPONSE ELEMENT |
| | | | | | | BINDING (CREB) PROTEIN |
| | | | | | | SIGNATURE |
| 1037 | PR00041E | 7.20 | 1.243e−27 | 92-112 | PR00041 | CAMP RESPONSE ELEMENT |
| | | | | | | BINDING (CREB) PROTEIN |
| | | | | | | SIGNATURE |
| 1037 | PR00041F | 8.53 | 2.125e−22 | 112-129 | PR00041 | CAMP RESPONSE ELEMENT |
| | | | | | | BINDING (CREB) PROTEIN |
| | | | | | | SIGNATURE |
| 1038 | PD00210 | 15.25 | 7.231e−16 | 47-62 | PD00210 | PROTEIN ANTIOXIDANT |
| | | | | | | PEROXIDASE RED. |
| 1039 | BL00028 | 16.07 | 6.143e−09 | 440-456 | BL00028 | Zinc finger, C2H2 type, |
| | | | | | | domain proteins. |
| 1039 | BL00028 | 16.07 | 8.826e−12 | 382-398 | BL00028 | Zinc finger, C2H2 type, |
| | | | | | | domain proteins. |
| 1039 | PD00066 | 13.92 | 6.870e−11 | 398-410 | PD00066 | PROTEIN ZINC-FINGER |
| | | | | | | METAL-BINDI. |
| 1039 | PR00048A | 10.52 | 9.280e−09 | 379-392 | PR00048 | C2H2-TYPE ZINC FINGER |
| | | | | | | SIGNATURE |
| 1039 | PR00308C | 3.83 | 8.714e−09 | 66-75 | PR00308 | TYPE I ANTIFREEZE |
| | | | | | | PROTEIN SIGNATURE |
| 1039 | PR00558C | 6.54 | 5.846e−09 | 37-56 | PR00558 | ALPHA-2A ADRENERGIC |
| | | | | | | RECEPTOR SIGNATURE |
| 1040 | BL00142 | 8.38 | 2.688e−10 | 351-361 | BL00142 | Neutral zinc |
| | | | | | | metallopeptidases, |
| | | | | | | zinc-binding region |
| | | | | | | proteins. |
| 1040 | BL00427 | 13.93 | 8.375e−25 | 454-508 | BL00427 | Disintegrins proteins. |
| 1040 | PR00289A | 13.62 | 7.525e−18 | 468-487 | PR00289 | DISINTEGRIN SIGNATURE |
| 1040 | PR00289B | 11.79 | 5.245e−10 | 497-509 | PR00289 | DISINTEGRIN SIGNATURE |
| 1040 | PR00451A | 6.49 | 5.696e−10 | 466-474 | PR00451 | CHITIN-BINDING DOMAIN |
| | | | | | | SIGNATURE |
| 1041 | BL01271A | 8.06 | 5.333e−21 | 147-166 | BL01271 | Sodium: sulfate |
| | | | | | | symporter family |
| | | | | | | proteins. |
| 1041 | BL01271A | 8.06 | 8.986e−09 | 487-506 | BL01271 | Sodium: sulfate |
| | | | | | | symporter family |
| | | | | | | proteins. |
| 1041 | BL01271B | 12.02 | 4.375e−19 | 246-270 | BL01271 | Sodium: sulfate |
| | | | | | | symporter family |
| | | | | | | proteins. |
| 1041 | BL01271C | 13.62 | 8.714e−20 | 438-459 | BL01271 | Sodium: sulfate |
| | | | | | | symporter family |
| | | | | | | proteins. |
| 1041 | BL01271D | 25.26 | 2.532e−32 | 511-565 | BL01271 | Sodium: sulfate |
| | | | | | | symporter family |
| | | | | | | proteins. |
| 1042 | PR00371E | 14.06 | 1.000e−10 | 66-75 | PR00371 | FLAVOPROTEIN PYRIDINE |
| | | | | | | NUCLEOTIDE CYTOCHROME |
| | | | | | | REDUCTASE SIGNATURE |
| 1042 | PR00371F | 10.12 | 5.135e−09 | 79-90 | PR00371 | FLAVOPROTEIN PYRIDINE |
| | | | | | | NUCLEOTIDE CYTOCHROME |
| | | | | | | REDUCTASE SIGNATURE |
| 1043 | BL00021B | 13.33 | 1.265e−20 | 120-137 | BL00021 | Kringle domain |
| | | | | | | proteins. |
| 1043 | BL00021C | 22.21 | 9.250e−10 | 203-224 | BL00021 | Kringle domain |
| | | | | | | proteins. |
| 1043 | BL00021D | 24.56 | 9.813e−25 | 290-331 | BL00021 | Kringle domain |
| | | | | | | proteins. |
| 1043 | BL00134A | 11.96 | 5.737e−19 | 120-136 | BL00134 | Serine proteases, |
| | | | | | | trypsin family, |
| | | | | | | histidine proteins. |
| 1043 | BL00134B | 15.99 | 7.231e−16 | 282-305 | BL00134 | Serine proteases, |
| | | | | | | trypsin family, |
| | | | | | | histidine proteins. |
| 1043 | BL00134C | 13.45 | 1.692e−11 | 318-331 | BL00134 | Serine proteases, |
| | | | | | | trypsin family, |
| | | | | | | histidine proteins. |
| 1043 | BL00495K | 12.58 | 8.600e−12 | 122-154 | BL00495 | Apple domain proteins. |
| 1043 | BL00495L | 11.94 | 6.757e−10 | 155-193 | BL00495 | Apple domain proteins. |
| 1043 | BL00495M | 8.50 | 4.058e−10 | 194-228 | BL00495 | Apple domain proteins. |
| 1043 | BL00495N | 11.04 | 1.409e−27 | 274-308 | BL00495 | Apple domain proteins. |
| 1043 | BL00495O | 13.75 | 7.459e−13 | 309-337 | BL00495 | Apple domain proteins. |
| 1043 | BL01253D | 4.84 | 5.500e−12 | 120-133 | BL01253 | Type I fibronectin |
| | | | | | | domain proteins. |
| 1043 | BL01253E | 16.01 | 8.579e−15 | 192-228 | BL01253 | Type I fibronectin |
| | | | | | | domain proteins. |
| 1043 | BL01253G | 11.34 | 1.000e−15 | 281-294 | BL01253 | Type I fibronectin |
| | | | | | | domain proteins. |
| 1043 | BL01253H | 13.15 | 5.500e−20 | 300-334 | BL01253 | Type I fibronectin |
| | | | | | | domain proteins. |
| 1043 | PR00722A | 12.27 | 8.941e−18 | 121-136 | PR00722 | CHYMOTRYPSIN SERINE |
| | | | | | | PROTEASE FAMILY (S1) |
| | | | | | | SIGNATURE |
| 1043 | PR00722B | 12.51 | 4.000e−09 | 180-194 | PR00722 | CHYMOTRYPSIN SERINE |
| | | | | | | PROTEASE FAMILY (S1) |
| | | | | | | SIGNATURE |
| 1043 | PR00722C | 10.87 | 5.235e−13 | 281-293 | PR00722 | CHYMOTRYPSIN SERINE |
| | | | | | | PROTEASE FAMILY (S1) |
| | | | | | | SIGNATURE |
| 1045 | BL00022B | 7.54 | 8.200e−09 | 865-871 | BL00022 | EGF-like domain |
| | | | | | | proteins. |
| 1045 | BL00279E | 37.11 | 9.241e−10 | 66-113 | BL00279 | Membrane attack complex |
| | | | | | | components/perforin |
| | | | | | | proteins. |
| 1045 | BL01187A | 9.98 | 1.000e−08 | 715-726 | BL01187 | Calcium-binding EGF- |
| | | | | | | like domain proteins |
| | | | | | | pattern proteins. |
| 1045 | BL01187A | 9.98 | 2.875e−09 | 921-932 | BL01187 | Calcium-binding EGF- |
| | | | | | | like domain proteins |
| | | | | | | pattern proteins. |
| 1045 | BL01187A | 9.98 | 7.000e−09 | 592-603 | BL01187 | Calcium-binding EGF- |
| | | | | | | like domain proteins |
| | | | | | | pattern proteins. |
| 1045 | BL01187A | 9.98 | 7.857e−10 | 756-767 | BL01187 | Calcium-binding EGF- |
| | | | | | | like domain proteins |
| | | | | | | pattern proteins. |
| 1045 | BL01187A | 9.98 | 9.526e−11 | 675-686 | BL01187 | Calcium-binding EGF- |
| | | | | | | like domain proteins |
| | | | | | | pattern proteins. |
| 1045 | BL01187B | 12.04 | 1.257e−10 | 1161-1176 | BL01187 | Calcium-binding EGF- |
| | | | | | | like domain proteins |
| | | | | | | pattern proteins. |
| 1045 | BL01187B | 12.04 | 1.391e−13 | 321-336 | BL01187 | Calcium-binding EGF- |
| | | | | | | like domain proteins |
| | | | | | | pattern proteins. |
| 1045 | BL01187B | 12.04 | 2.350e−14 | 856-871 | BL01187 | Calcium-binding EGF- |
| | | | | | | like domain proteins |
| | | | | | | pattern proteins. |
| 1045 | BL01187B | 12.04 | 4.130e−13 | 897-912 | BL01187 | Calcium-binding EGF- |
| | | | | | | like domain proteins |
| | | | | | | pattern proteins. |
| 1045 | BL01187B | 12.04 | 4.600e−11 | 939-954 | BL01187 | Calcium-binding EGF- |
| | | | | | | like domain proteins |
| | | | | | | pattern proteins. |
| 1045 | BL01187B | 12.04 | 4.913e−13 | 773-788 | BL01187 | Calcium-binding EGF- |
| | | | | | | like domain proteins |
| | | | | | | pattern proteins. |
| 1045 | BL01187B | 12.04 | 5.500e−14 | 814-829 | BL01187 | Calcium-binding EGF- |
| | | | | | | like domain proteins |
| | | | | | | pattern proteins. |
| 1045 | BL01187B | 12.04 | 7.000e−17 | 1360-1375 | BL01187 | Calcium-binding EGF- |
| | | | | | | like domain proteins |
| | | | | | | pattern proteins. |
| 1045 | BL01187B | 12.04 | 9.229e−10 | 1315-1330 | BL01187 | Calcium-binding EGF- |
| | | | | | | like domain proteins |
| | | | | | | pattern proteins. |
| 1045 | BL01187B | 12.04 | 9.609e−13 | 610-625 | BL01187 | Calcium-binding EGF- |
| | | | | | | like domain proteins |
| | | | | | | pattern proteins. |
| 1045 | BL01187B | 12.04 | 9.667e−12 | 732-747 | BL01187 | Calcium-binding EGF- |
| | | | | | | like domain proteins |
| | | | | | | pattern proteins. |
| 1045 | PD00919B | 9.47 | 7.485e−10 | 697-711 | PD00919 | CALCIUM-BINDING |
| | | | | | | PRECURSOR SIGNAL R. |
| 1045 | PR00009C | 14.11 | 9.118e−09 | 736-747 | PR00009 | TYPE I EGF SIGNATURE |
| 1045 | PR00010C | 11.16 | 1.857e−09 | 615-625 | PR00010 | TYPE II EGF-LIKE |
| | | | | | | SIGNATURE |
| 1045 | PR00010C | 11.16 | 4.857e−09 | 1365-1375 | PR00010 | TYPE II EGF-LIKE |
| | | | | | | SIGNATURE |
| 1045 | PR00010C | 11.16 | 7.545e−10 | 1320-1330 | PR00010 | TYPE II EGF-LIKE |
| | | | | | | SIGNATURE |
| 1045 | PR00010C | 11.16 | 7.667e−11 | 861-871 | PR00010 | TYPE II EGF-LIKE |
| | | | | | | SIGNATURE |
| 1045 | PR00011D | 14.03 | 2.696e−09 | 92-110 | PR00011 | TYPE III EGF-LIKE |
| | | | | | | SIGNATURE |
| 1045 | PR00907G | 11.63 | 7.973e−09 | 568-594 | PR00907 | THROMBOMODULIN |
| | | | | | | SIGNATURE |
| 1048 | BL00352A | 12.19 | 7.000e−14 | 377-391 | BL00352 | ‘Cold-shock’ DNA- |
| | | | | | | binding domain |
| | | | | | | proteins. |
| 1048 | BL00352B | 23.66 | 2.000e−20 | 737-775 | BL00352 | ‘Cold-shock’ DNA- |
| | | | | | | binding domain |
| | | | | | | proteins. |
| 1050 | BL00326A | 14.01 | 6.128e−09 | 1284-1317 | BL00326 | Tropomyosins proteins. |
| 1050 | BL00447C | 13.79 | 9.813e−09 | 198-212 | BL00447 | DNA polymerase family A |
| | | | | | | proteins. |
| 1050 | DM00215 | 19.43 | 7.712e−09 | 1026-1058 | DM00215 | PROLINE-RICH PROTEIN 3. |
| 1050 | PD00301B | 5.49 | 6.885e−09 | 1095-1105 | PD00301 | PROTEIN REPEAT MUSCLE |
| | | | | | | CALCIUM-BI. |
| 1050 | PF00992A | 16.67 | 1.355e−09 | 1297-1331 | PF00992 | Troponin. |
| 1050 | PF00992A | 16.67 | 4.434e−09 | 1289-1323 | PF00992 | Troponin. |
| 1050 | PF00992A | 16.67 | 7.513e−09 | 1298-1332 | PF00992 | Troponin. |
| 1050 | PF01140D | 15.54 | 1.628e−09 | 1073-1107 | PF011040 | Matrix protein (MA), |
| | | | | | | p15. |
| 1050 | PF01140D | 15.54 | 4.872e−09 | 1295-1329 | PF01140 | Matrix protein (MA), |
| | | | | | | p15. |
| 1051 | BL00310A | 14.05 | 7.000e−15 | 61-75 | BL00310 | Lysosome-associated |
| | | | | | | membrane glycoproteins |
| | | | | | | duplicated domain |
| | | | | | | proteins. |
| 1051 | BL00310B | 22.33 | 5.034e−32 | 113-148 | BL00310 | Lysosome-associated |
| | | | | | | membrane glycoproteins |
| | | | | | | duplicated domain |
| | | | | | | proteins. |
| 1051 | BL00310C | 26.35 | 3.400e−39 | 166-212 | BL00310 | Lysosome-associated |
| | | | | | | membrane glycoproteins |
| | | | | | | duplicated domain |
| | | | | | | proteins. |
| 1051 | BL00310D | 14.97 | 7.818e−28 | 238-264 | BL00310 | Lysosome-associated |
| | | | | | | membrane glycoproteins |
| | | | | | | duplicated domain |
| | | | | | | proteins. |
| 1051 | BL00310E | 19.92 | 2.250e−24 | 339-363 | BL00310 | Lysosome-associated |
| | | | | | | membrane glycoproteins |
| | | | | | | duplicated domain |
| | | | | | | proteins. |
| 1051 | BL00310F | 23.26 | 1.000e−40 | 374-428 | BL00310 | Lysosome-associated |
| | | | | | | membrane glycoproteins |
| | | | | | | duplicated domain |
| | | | | | | proteins. |
| 1051 | PR00336A | 12.86 | 9.727e−24 | 241-265 | PR00336 | LYSOSOME-ASSOCIATED |
| | | | | | | MEMBRANE GLYCOPROTEIN |
| | | | | | | SIGNATURE |
| 1051 | PR00336B | 15.42 | 4.000e−16 | 351-365 | PR00336 | LYSOSOME-ASSOCIATED |
| | | | | | | MEMBRANE GLYCOPROTEIN |
| | | | | | | SIGNATURE |
| 1051 | PR00336C | 14.47 | 9.333e−12 | 388-400 | PR00336 | LYSOSOME-ASSOCIATED |
| | | | | | | MEMBRANE GLYCOPROTEIN |
| | | | | | | SIGNATURE |
| 1051 | PR00336D | 9.96 | 4.150e−24 | 402-424 | PR00336 | LYSOSOME-ASSOCIATED |
| | | | | | | MEMBRANE GLYCOPROTEIN |
| | | | | | | SIGNATURE |
| 1051 | PR00336E | 11.59 | 3.382e−13 | 425-437 | PR00336 | LYSOSOME-ASSOCIATED |
| | | | | | | MEMBRANE GLYCOPROTEIN |
| | | | | | | SIGNATURE |
| 1052 | PF00550B | 10.27 | 2.588e−10 | 129-142 | PF00550 | Phosphopantetheine |
| | | | | | | attachment site |
| | | | | | | proteins. |
| 1055 | BL00690A | 6.87 | 3.455e−12 | 424-433 | BL00690 | DEAH-box subfamily ATP- |
| | | | | | | dependent helicases |
| | | | | | | proteins. |
| 1055 | BL00690B | 13.38 | 6.571e−16 | 453-470 | BL00690 | DEAH-box subfamily ATP- |
| | | | | | | dependent helicases |
| | | | | | | proteins. |
| 1055 | BL00690C | 7.51 | 7.429e−10 | 519-528 | BL00690 | DEAH-box subfamily ATP- |
| | | | | | | dependent helicases |
| | | | | | | proteins. |
| 1056 | PR00704A | 14.68 | 7.375e−22 | 60-83 | PR00704 | CALPAIN CYSTEINE |
| | | | | | | PROTEASE (C2) FAMILY |
| | | | | | | SIGNATURE |
| 1056 | PR00704B | 17.94 | 6.276e−23 | 105-127 | PR00704 | CALPAIN CYSTEINE |
| | | | | | | PROTEASE (C2) FAMILY |
| | | | | | | SIGNATURE |
| 1056 | PR00704C | 11.88 | 6.625e−20 | 129-145 | PR00704 | CALPAIN CYSTEINE |
| | | | | | | PROTEASE (C2) FAMILY |
| | | | | | | SIGNATURE |
| 1056 | PR00704D | 11.05 | 5.065e−29 | 165-190 | PR00704 | CALPAIN CYSTEINE |
| | | | | | | PROTEASE (C2) FAMILY |
| | | | | | | SIGNATURE |
| 1056 | PR00704E | 12.55 | 8.875e−28 | 195-218 | PR00704 | CALPAIN CYSTEINE |
| | | | | | | PROTEASE (C2) FAMILY |
| | | | | | | SIGNATURE |
| 1056 | PR00704F | 13.61 | 7.632e−30 | 220-247 | PR00704 | CALPAIN CYSTEINE |
| | | | | | | PROTEASE (C2) FAMILY |
| | | | | | | SIGNATURE |
| 1056 | PR00704G | 13.87 | 1.391e−25 | 350-371 | PR00704 | CALPAIN CYSTEINE |
| | | | | | | PROTEASE (C2) FAMILY |
| | | | | | | SIGNATURE |
| 1056 | PR00704H | 13.38 | 9.217e−22 | 400-417 | PR00704 | CALPAIN CYSTEINE |
| | | | | | | PROTEASE (C2) FAMILY |
| | | | | | | SIGNATURE |
| 1056 | PR00704I | 9.52 | 1.000e−30 | 508-536 | PR00704 | CALPAIN CYSTEINE |
| | | | | | | PROTEASE (C2) FAMILY |
| | | | | | | SIGNATURE |
| 1057 | BL01108A | 20.33 | 2.241e−22 | 135-167 | BL01108 | Ribosomal protein L24 |
| | | | | | | proteins. |
| 1057 | BL01108B | 11.40 | 8.457e−10 | 182-192 | BL01108 | Ribosomal protein L24 |
| | | | | | | proteins. |
| 1058 | BL00250A | 21.24 | 4.130e−27 | 263-298 | BL00250 | TGF-beta family |
| | | | | | | proteins. |
| 1058 | BL00250B | 27.37 | 3.000e−20 | 331-366 | BL00250 | TGF-beta family |
| | | | | | | proteins. |
| 1058 | PR00669A | 12.84 | 4.414e−31 | 110-134 | PR00669 | INHIBIN ALPHA CHAIN |
| | | | | | | SIGNATURE |
| 1058 | PR00669B | 8.27 | 6.927e−20 | 188-204 | PR00669 | INHIBIN ALPHA CHAIN |
| | | | | | | SIGNATURE |
| 1058 | PR00669C | 14.90 | 1.220e−21 | 206-223 | PR00669 | INHIBIN ALPHA CHAIN |
| | | | | | | SIGNATURE |
| 1058 | PR00669D | 7.36 | 5.974e−25 | 241-260 | PR00669 | INHIBIN ALPHA CHAIN |
| | | | | | | SIGNATURE |
| 1058 | PR00669E | 16.28 | 3.152e−23 | 263-280 | PR00669 | INHIBIN ALPHA CHAIN |
| | | | | | | SIGNATURE |
| 1058 | PR00669F | 5.57 | 6.077e−25 | 280-297 | PR00669 | INHIBIN ALPHA CHAIN |
| | | | | | | SIGNATURE |
| 1058 | PR00669G | 7.46 | 8.650e−26 | 324-343 | PR00669 | INHIBIN ALPHA CHAIN |
| | | | | | | SIGNATURE |
| 1058 | PR00669H | 19.13 | 3.893e−29 | 345-366 | PR00669 | INHIBIN ALPHA CHAIN |
| | | | | | | SIGNATURE |
| 1058 | PR00712A | 6.07 | 7.722e−10 | 4-20 | PR00712 | BRAIN NATRIURETIC |
| | | | | | | PEPTIDE SIGNATURE |
| 1059 | PR00854B | 7.30 | 2.519e−10 | 5-22 | PR00854 | PROSTAGLANDIN D |
| | | | | | | RECEPTOR SIGNATURE |
| 1063 | PR00846A | 15.43 | 1.818e−13 | 49-61 | PR00846 | GLYCOSYL HYDROLASE |
| | | | | | | FAMILY 56 SIGNATURE |
| 1063 | PR00846B | 13.97 | 7.750e−17 | 109-123 | PR00846 | GLYCOSYL HYDROLASE |
| | | | | | | FAMILY 56 SIGNATURE |
| 1063 | PR00846C | 12.18 | 5.696e−23 | 141-158 | PR00846 | GLYCOSYL HYDROLASE |
| | | | | | | FAMILY 56 SIGNATURE |
| 1063 | PR00846D | 17.96 | 4.130e−29 | 199-224 | PR00846 | GLYCOSYL HYDROLASE |
| | | | | | | FAMILY 56 SIGNATURE |
| 1063 | PR00846E | 12.07 | 3.700e−17 | 248-262 | PR00846 | GLYCOSYL HYDROLASE |
| | | | | | | FAMILY 56 SIGNATURE |
| 1063 | PR00846F | 14.27 | 5.875e−13 | 353-366 | PR00846 | GLYCOSYL HYDROLASE |
| | | | | | | FAMILY 56 SIGNATURE |
| 1064 | BL00226A | 12.77 | 2.543e−12 | 97-111 | BL00226 | Intermediate filaments |
| | | | | | | proteins. |
| 1064 | BL00226B | 23.86 | 1.000e−31 | 197-244 | BL00226 | Intermediate filaments |
| | | | | | | proteins. |
| 1064 | BL00226B | 23.86 | 7.600e−11 | 148-195 | BL00226 | Intermediate filaments |
| | | | | | | proteins. |
| 1064 | BL00226C | 13.23 | 1.000e−22 | 263-293 | BL00226 | Intermediate filaments |
| | | | | | | proteins. |
| 1064 | BL00226D | 19.10 | 1.000e−40 | 364-410 | BL00226 | Intermediate filaments |
| | | | | | | proteins. |
| 1064 | PR00042D | 8.97 | 5.793e−09 | 325-346 | PR00042 | FOS TRANSFORMING |
| | | | | | | PROTEIN SIGNATURE |
| 1066 | BL00610B | 23.65 | 9.265e−09 | 38-87 | BL00610 | Sodium: neurotransmitter |
| | | | | | | symporter family |
| | | | | | | proteins. |
| 1067 | BL00965B | 17.77 | 9.735e−11 | 146-172 | BL00965 | Phosphomannose |
| | | | | | | isomerase type I |
| | | | | | | proteins. |
| 1067 | BL00965C | 23.78 | 1.225e−14 | 341-389 | BL00965 | Phosphomannose |
| | | | | | | isomerase type I |
| | | | | | | proteins. |
| 1067 | PF00801B | 23.63 | 6.344e−11 | 289-316 | PF00801 | PKD domain proteins. |
| 1067 | PR00049D | 0.00 | 5.689e−11 | 319-333 | PR00049 | WILM'S TUMOUR PROTEIN |
| | | | | | | SIGNATURE |
| 1067 | PR00049D | 0.00 | 6.643e−10 | 321-335 | PR00049 | WILM'S TUMOUR PROTEIN |
| | | | | | | SIGNATURE |
| 1067 | PR00049D | 0.00 | 9.786e−10 | 323-337 | PR00049 | WILM'S TUMOUR PROTEIN |
| | | | | | | SIGNATURE |
| 1067 | PR00910A | 2.51 | 8.393e−09 | 323-335 | PR00910 | LUTEOVIRUS ORF6 PROTEIN |
| | | | | | | SIGNATURE |
| 1069 | BL01019A | 13.20 | 9.520e−13 | 58-97 | BL01019 | ADP-ribosylation |
| | | | | | | factors family |
| | | | | | | proteins. |
| 1069 | BL01115A | 10.22 | 5.075e−11 | 24-67 | BL01115 | GTP-binding nuclear |
| | | | | | | protein ran proteins. |
| 1069 | PR00449A | 13.20 | 5.846e−21 | 24-45 | PR00449 | TRANSFORMING PROTEIN |
| | | | | | | P21 RAS SIGNATURE |
| 1069 | PR00449B | 14.34 | 5.500e−13 | 47-63 | PR00449 | TRANSFORMING PROTEIN |
| | | | | | | P21 RAS SIGNATURE |
| 1069 | PR00449C | 17.27 | 3.700e−24 | 65-87 | PR00449 | TRANSFORMING PROTEIN |
| | | | | | | P21 RAS SIGNATURE |
| 1069 | PR00449D | 10.79 | 4.273e−12 | 127-140 | PR00449 | TRANSFORMING PROTEIN |
| | | | | | | P21 RAS SIGNATURE |
| 1069 | PR00449E | 13.50 | 7.000e−19 | 162-184 | PR00449 | TRANSFORMING PROTEIN |
| | | | | | | P21 RAS SIGNATURE |
| 1070 | BL00415B | 9.91 | 9.404e−09 | 731-766 | BL00415 | Synapsins proteins. |
| 1070 | BL00415N | 4.29 | 7.832e−09 | 1057-1100 | BL00415 | Synapsins proteins. |
| 1070 | BL00904A | 8.30 | 6.489e−09 | 496-545 | BL00904 | Protein |
| | | | | | | prenyltransferases |
| | | | | | | alpha subunit repeat |
| | | | | | | proteins proteins. |
| 1070 | DM00215 | 19.43 | 3.746e−09 | 1043-1075 | DM00215 | PROLINE-RICH PROTEIN 3. |
| 1070 | PR00049D | 0.00 | 2.831e−09 | 1299-1313 | PR00049 | WILM'S TUMOUR PROTEIN |
| | | | | | | SIGNATURE |
| 1070 | PR00049D | 0.00 | 8.169e−09 | 1301-1315 | PR00049 | WILM'S TUMOUR PROTEIN |
| | | | | | | SIGNATURE |
| 1070 | PR00628A | 14.81 | 8.134e−19 | 233-252 | PR00628 | INSULIN RECEPTOR |
| | | | | | | SUBSTRATE-1 PTB DOMAIN |
| | | | | | | SIGNATURE |
| 1070 | PR00628B | 14.71 | 2.556e−15 | 254-274 | PR00628 | INSULIN RECEPTOR |
| | | | | | | SUBSTRATE-1 PTB DOMAIN |
| | | | | | | SIGNATURE |
| 1070 | PR00628C | 16.37 | 9.289e−16 | 276-292 | PR00628 | INSULIN RECEPTOR |
| | | | | | | SUBSTRATE-1 PTB DOMAIN |
| | | | | | | SIGNATURE |
| 1070 | PR00628D | 15.47 | 4.000e−15 | 293-305 | PR00628 | INSULIN RECEPTOR |
| | | | | | | SUBSTRATE-1 PTB DOMAIN |
| | | | | | | SIGNATURE |
| 1070 | PR00628F | 16.74 | 8.116e−18 | 317-341 | PR00628 | INSULIN RECEPTOR |
| | | | | | | SUBSTRATE-1 PTB DOMAIN |
| | | | | | | SIGNATURE |
| 1071 | BL00143A | 20.91 | 4.808e−22 | 116-142 | BL00143 | Insulinase family, |
| | | | | | | zinc-binding region |
| | | | | | | proteins. |
| 1071 | BL00143B | 14.41 | 3.077e−13 | 162-176 | BL00143 | Insulinase family, |
| | | | | | | zinc-binding region |
| | | | | | | proteins. |
| 1071 | BL00143C | 14.16 | 7.000e−11 | 264-276 | BL00143 | Insulinase family, |
| | | | | | | zinc-binding region |
| | | | | | | proteins. |
| 1072 | PF00686C | 12.33 | 8.740e−11 | 320-340 | PF00686 | Starch binding domain |
| | | | | | | proteins. |
| 1074 | DM00215 | 19.43 | 2.220e−09 | 41-73 | DM00215 | PROLINE-RICH PROTEIN 3. |
| 1074 | DM00215 | 19.43 | 3.593e−09 | 77-109 | DM00215 | PROLINE-RICH PROTEIN 3. |
| 1074 | DM00215 | 19.43 | 8.780e−09 | 84-116 | DM00215 | PROLINE-RICH PROTEIN 3. |
| 1074 | DM00215 | 19.43 | 9.847e−09 | 81-113 | DM00215 | PROLINE-RICH PROTEIN 3. |
| 1074 | PR00049D | 0.00 | 4.966e−09 | 77-91 | PR00049 | WILM'S TUMOUR PROTEIN |
| | | | | | | SIGNATURE |
| 1074 | PR00049D | 0.00 | 9.237e−09 | 101-115 | PR00049 | WILM'S TUMOUR PROTEIN |
| | | | | | | SIGNATURE |
| 1076 | BL00022B | 7.54 | 6.400e−09 | 672-678 | BL00022 | EGF-like domain |
| | | | | | | proteins. |
| 1076 | BL00243H | 17.53 | 9.526e−09 | 570-595 | BL00243 | Integrins beta chain |
| | | | | | | cysteine-rich domain |
| | | | | | | proteins. |
| 1076 | BL00243I | 31.77 | 4.549e−09 | 2113-2155 | BL00243 | Integrins beta chain |
| | | | | | | cysteine-rich domain |
| | | | | | | proteins. |
| 1076 | BL00790E | 29.58 | 7.964e−11 | 548-595 | BL00790 | Receptor tyrosine |
| | | | | | | kinase class V |
| | | | | | | proteins. |
| 1076 | BL01248 | 11.02 | 1.000e−11 | 346-358 | BL01248 | Laminin-type EGF-like |
| | | | | | | (LE) domain proteins. |
| 1076 | BL01248 | 11.02 | 2.895e−16 | 1905-1917 | BL01248 | Laminin-type EGF-like |
| | | | | | | (LE) domain proteins. |
| 1076 | BL01248 | 11.02 | 3.377e−09 | 539-551 | BL01248 | Laminin-type EGF-like |
| | | | | | | (LE) domain proteins. |
| 1076 | BL01248 | 11.02 | 5.415e−09 | 629-641 | BL01248 | Laminin-type EGF-like |
| | | | | | | (LE) domain proteins. |
| 1076 | BL01248 | 11.02 | 6.625e−10 | 2016-2028 | BL01248 | Laminin-type EGF-like |
| | | | | | | (LE) domain proteins. |
| 1076 | BL01248 | 11.02 | 7.000e−14 | 418-430 | BL01248 | Laminin-type EGF-like |
| | | | | | | (LE) domain proteins. |
| 1076 | BL01248 | 11.02 | 8.132e−09 | 2112-2124 | BL01248 | Laminin-type EGF-like |
| | | | | | | (LE) domain proteins. |
| 1076 | BL01248 | 11.02 | 8.302e−09 | 2146-2158 | BL01248 | Laminin-type EGF-like |
| | | | | | | (LE) domain proteins. |
| 1076 | BL01248 | 11.02 | 8.302e−09 | 575-587 | BL01248 | Laminin-type EGF-like |
| | | | | | | (LE) domain proteins. |
| 1076 | BL01248 | 11.02 | 9.491e−09 | 1574-1586 | BL01248 | Laminin-type EGF-like |
| | | | | | | (LE) domain proteins. |
| 1076 | PD00320A | 14.49 | 7.750e−09 | 352-365 | PD00320 | LAMININ CHAIN EGF-LIKE |
| | | | | | | DOMAIN P. |
| 1076 | PD00320A | 14.49 | 9.357e−09 | 827-840 | PD00320 | LAMININ CHAIN EGF-LIKE |
| | | | | | | DOMAIN P. |
| 1076 | PR00011A | 14.06 | 1.196e−17 | 1611-1629 | PR00011 | TYPE III EGF-LIKE |
| | | | | | | SIGNATURE |
| 1076 | PR00011A | 14.06 | 1.391e−10 | 575-593 | PR00011 | TYPE III EGF-LIKE |
| | | | | | | SIGNATURE |
| 1076 | PR00011A | 14.06 | 2.452e−12 | 462-480 | PR00011 | TYPE III EGF-LIKE |
| | | | | | | SIGNATURE |
| 1076 | PR00011A | 14.06 | 2.875e−16 | 711-729 | PR00011 | TYPE III EGF-LIKE |
| | | | | | | SIGNATURE |
| 1076 | PR00011A | 14.06 | 3.625e−16 | 1565-1583 | PR00011 | TYPE III EGF-LIKE |
| | | | | | | SIGNATURE |
| 1076 | PR00011A | 14.06 | 5.271e−13 | 863-881 | PR00011 | TYPE III EGF-LIKE |
| | | | | | | SIGNATURE |
| 1076 | PR00011A | 14.06 | 5.313e−16 | 812-830 | PR00011 | TYPE III EGF-LIKE |
| | | | | | | SIGNATURE |
| 1076 | PR00011A | 14.06 | 6.081e−12 | 2103-2121 | PR00011 | TYPE III EGF-LIKE |
| | | | | | | SIGNATURE |
| 1076 | PR00011A | 14.06 | 7.873e−14 | 1513-1531 | PR00011 | TYPE III EGF-LIKE |
| | | | | | | SIGNATURE |
| 1076 | PR00011A | 14.06 | 9.660e−15 | 1472-1490 | PR00011 | TYPE III EGF-LIKE |
| | | | | | | SIGNATURE |
| 1076 | PR00011A | 14.06 | 9.673e−14 | 2055-2073 | PR00011 | TYPE III EGF-LIKE |
| | | | | | | SIGNATURE |
| 1076 | PR00011A | 14.06 | 9.710e−12 | 530-548 | PR00011 | TYPE III EGF-LIKE |
| | | | | | | SIGNATURE |
| 1076 | PR00011A | 14.06 | 9.830e−15 | 2146-2164 | PR00011 | TYPE III EGF-LIKE |
| | | | | | | SIGNATURE |
| 1076 | PR00011B | 13.08 | 1.458e−13 | 1611-1629 | PR00011 | TYPE III EGF-LIKE |
| | | | | | | SIGNATURE |
| 1076 | PR00011B | 13.08 | 1.610e−13 | 812-830 | PR00011 | TYPE III EGF-LIKE |
| | | | | | | SIGNATURE |
| 1076 | PR00011B | 13.08 | 1.614e−17 | 2055-2073 | PR00011 | TYPE III EGF-LIKE |
| | | | | | | SIGNATURE |
| 1076 | PR00011B | 13.08 | 1.692e−15 | 575-593 | PR00011 | TYPE III EGF-LIKE |
| | | | | | | SIGNATURE |
| 1076 | PR00011B | 13.08 | 1.740e−09 | 530-548 | PR00011 | TYPE III EGF-LIKE |
| | | | | | | SIGNATURE |
| 1076 | PR00011B | 13.08 | 1.833e−14 | 2103-2121 | PR00011 | TYPE III EGF-LIKE |
| | | | | | | SIGNATURE |
| 1076 | PR00011B | 13.08 | 3.177e−12 | 462-480 | PR00011 | TYPE III EGF-LIKE |
| | | | | | | SIGNATURE |
| 1076 | PR00011B | 13.08 | 3.942e−15 | 1565-1583 | PR00011 | TYPE III EGF-LIKE |
| | | | | | | SIGNATURE |
| 1076 | PR00011B | 13.08 | 4.500e−14 | 2146-2164 | PR00011 | TYPE III EGF-LIKE |
| | | | | | | SIGNATURE |
| 1076 | PR00011B | 13.08 | 5.875e−16 | 711-729 | PR00011 | TYPE III EGF-LIKE |
| | | | | | | SIGNATURE |
| 1076 | PR00011B | 13.08 | 8.017e−13 | 1472-1490 | PR00011 | TYPE III EGF-LIKE |
| | | | | | | SIGNATURE |
| 1076 | PR00011B | 13.08 | 9.217e−10 | 1513-1531 | PR00011 | TYPE III EGF-LIKE |
| | | | | | | SIGNATURE |
| 1076 | PR00011B | 13.08 | 9.862e−11 | 863-881 | PR00011 | TYPE III EGF-LIKE |
| | | | | | | SIGNATURE |
| 1076 | PR00011C | 24.25 | 1.450e−10 | 1618-1646 | PR00011 | TYPE III EGF-LIKE |
| | | | | | | SIGNATURE |
| 1076 | PR00011C | 24.25 | 4.571e−09 | 766-794 | PR00011 | TYPE III EGF-LIKE |
| | | | | | | SIGNATURE |
| 1076 | PR00011C | 24.25 | 5.143e−09 | 2122-2150 | PR00011 | TYPE III EGF-LIKE |
| | | | | | | SIGNATURE |
| 1076 | PR00011C | 24.25 | 8.714e−09 | 546-574 | PR00011 | TYPE III EGF-LIKE |
| | | | | | | SIGNATURE |
| 1076 | PR00011D | 14.03 | 1.551e−14 | 462-480 | PR00011 | TYPE III EGF-LIKE |
| | | | | | | SIGNATURE |
| 1076 | PR00011D | 14.03 | 2.328e−11 | 1472-1490 | PR00011 | TYPE III EGF-LIKE |
| | | | | | | SIGNATURE |
| 1076 | PR00011D | 14.03 | 2.653e−14 | 2103-2121 | PR00011 | TYPE III EGF-LIKE |
| | | | | | | SIGNATURE |
| 1076 | PR00011D | 14.03 | 3.361e−11 | 530-548 | PR00011 | TYPE III EGF-LIKE |
| | | | | | | SIGNATURE |
| 1076 | PR00011D | 14.03 | 3.800e−15 | 1611-1629 | PR00011 | TYPE III EGF-LIKE |
| | | | | | | SIGNATURE |
| 1076 | PR00011D | 14.03 | 3.803e−11 | 863-881 | PR00011 | TYPE III EGF-LIKE |
| | | | | | | SIGNATURE |
| 1076 | PR00011D | 14.03 | 4.375e−16 | 2055-2073 | PR00011 | TYPE III EGF-LIKE |
| | | | | | | SIGNATURE |
| 1076 | PR00011D | 14.03 | 4.836e−11 | 812-830 | PR00011 | TYPE III EGF-LIKE |
| | | | | | | SIGNATURE |
| 1076 | PR00011D | 14.03 | 5.224e−14 | 575-593 | PR00011 | TYPE III EGF-LIKE |
| | | | | | | SIGNATURE |
| 1076 | PR00011D | 14.03 | 5.500e−17 | 1565-1583 | PR00011 | TYPE III EGF-LIKE |
| | | | | | | SIGNATURE |
| 1076 | PR00011D | 14.03 | 5.826e−09 | 1513-1531 | PR00011 | TYPE III EGF-LIKE |
| | | | | | | SIGNATURE |
| 1076 | PR00011D | 14.03 | 6.815e−10 | 665-683 | PR00011 | TYPE III EGF-LIKE |
| | | | | | | SIGNATURE |
| 1076 | PR00011D | 14.03 | 7.344e−11 | 620-638 | PR00011 | TYPE III EGF-LIKE |
| | | | | | | SIGNATURE |
| 1076 | PR00011D | 14.03 | 7.975e−16 | 711-729 | PR00011 | TYPE III EGF-LIKE |
| | | | | | | SIGNATURE |
| 1076 | PR00011D | 14.03 | 9.000e−15 | 2146-2164 | PR00011 | TYPE III EGF-LIKE |
| | | | | | | SIGNATURE |
| 1077 | BL01107A | 12.03 | 1.000e−40 | 10-52 | BL01107 | Ribosomal protein L27e |
| | | | | | | proteins. |
| 1077 | BL01107B | 16.28 | 1.000e−40 | 53-96 | BL01107 | Ribosomal protein L27e |
| | | | | | | proteins. |
| 1077 | BL01107C | 9.88 | 6.344e−26 | 122-143 | BL01107 | Ribosomal protein L27e |
| | | | | | | proteins. |
| 1077 | BL01170A | 12.34 | 9.124e−10 | 7-42 | BL01170 | Ribosomal protein L6e |
| | | | | | | proteins. |
| 1078 | BL01019A | 13.20 | 8.694e−18 | 107-146 | BL01019 | ADP-ribosylation |
| | | | | | | factors family |
| | | | | | | proteins. |
| 1078 | BL01019B | 19.49 | 8.603e−21 | 151-205 | BL01019 | ADP-ribosylation |
| | | | | | | factors family |
| | | | | | | proteins. |
| 1078 | BL01020C | 15.35 | 7.722e−20 | 135-185 | BL01020 | SAR1 family proteins. |
| 1078 | BL01115A | 10.22 | 9.151e−11 | 77-120 | BL01115 | GTP-binding nuclear |
| | | | | | | protein ran proteins. |
| 1078 | PR00328C | 13.16 | 2.111e−12 | 134-159 | PR00328 | GTP-BINDING SAR1 |
| | | | | | | PROTEIN SIGNATURE |
| 1078 | PR00328D | 12.56 | 8.071e−11 | 179-200 | PR00328 | GTP-BINDING SAR1 |
| | | | | | | PROTEIN SIGNATURE |
| 1080 | BL01243C | 14.19 | 5.111e−13 | 165-199 | BL01243 | Uncharacterized protein |
| | | | | | | family UPF0005 |
| | | | | | | proteins. |
| 1080 | BL01243D | 21.15 | 9.581e−11 | 247-281 | BL01243 | Uncharacterized protein |
| | | | | | | family UPF0005 |
| | | | | | | proteins. |
| 1081 | BL00292A | 22.87 | 6.786e−24 | 111-144 | BL00292 | Cyclins proteins. |
| 1081 | BL00292B | 20.31 | 3.739e−19 | 154-184 | BL00292 | Cyclins proteins. |
| 1082 | BL01013A | 25.14 | 1.000e−34 | 489-524 | BL01013 | Oxysterol-binding |
| | | | | | | protein family |
| | | | | | | proteins. |
| 1082 | BL01013B | 11.33 | 3.813e−14 | 554-564 | BL01013 | Oxysterol-binding |
| | | | | | | protein family |
| | | | | | | proteins. |
| 1082 | BL01013C | 9.97 | 6.211e−14 | 577-586 | BL01013 | Oxysterol-binding |
| | | | | | | protein family |
| | | | | | | proteins. |
| 1082 | BL01013D | 26.81 | 1.000e−37 | 775-818 | BL01013 | Oxysterol-binding |
| | | | | | | protein family |
| | | | | | | proteins. |
| 1083 | PF00075D | 10.71 | 8.929e−10 | 305-315 | PF00075 | RNase H. |
| 1085 | PR00237B | 13.50 | 6.000e−09 | 68-89 | PR00237 | RHODOPSIN-LIKE GPCR |
| | | | | | | SUPERFAMILY SIGNATURE |
| 1090 | BL00218B | 21.44 | 1.621e−10 | 103-134 | BL00218 | Amino acid permeases |
| | | | | | | proteins. |
| 1090 | BL00218D | 21.49 | 3.797e−11 | 271-315 | BL00218 | Amino acid permeases |
| | | | | | | proteins. |
| 1090 | BL00218E | 23.30 | 3.520e−10 | 352-391 | BL00218 | Amino acid permeases |
| | | | | | | proteins. |
| 1092 | BL00061A | 9.41 | 8.435e−09 | 107-117 | BL00061 | Short-chain |
| | | | | | | dehydrogenases/reductases |
| | | | | | | family proteins. |
| 1092 | BL00061B | 25.79 | 5.605e−09 | 171-208 | BL00061 | Short-chain |
| | | | | | | dehydrogenases/reductases |
| | | | | | | family proteins. |
| 1092 | BL00061C | 7.86 | 8.941e−09 | 213-222 | BL00061 | Short-chain |
| | | | | | | dehydrogenases/reductases |
| | | | | | | family proteins. |
| 1092 | PF00426W | 7.96 | 2.765e−09 | 25-51 | PF00426 | Outer Capsid protein |
| | | | | | | VP4 (Hemagglutinin). |
| 1092 | PR00080A | 9.32 | 6.226e−10 | 107-118 | PR00080 | ALCOHOL DEHYDROGENASE |
| | | | | | | SUPERFAMILY SIGNATURE |
| 1092 | PR00081A | 10.53 | 3.106e−10 | 31-48 | PR00081 | GLUCOSE/RIBITOL |
| | | | | | | DEHYDROGENASE FAMILY |
| | | | | | | SIGNATURE |
| 1092 | PR00081B | 10.38 | 6.727e−11 | 107-118 | PR00081 | GLUCOSE/RIBITOL |
| | | | | | | DEHYDROGENASE FAMILY |
| | | | | | | SIGNATURE |
| 1092 | PR00081E | 17.54 | 3.935e−10 | 212-229 | PR00081 | GLUCOSE/RIBITOL |
| | | | | | | DEHYDROGENASE FAMILY |
| | | | | | | SIGNATURE |
| 1093 | BL00115Z | 3.12 | 9.074e−09 | 157-205 | BL00115 | Eukaryotic RNA |
| | | | | | | polymerase II |
| | | | | | | heptapeptide repeat |
| | | | | | | proteins. |
| 1093 | PR00910A | 2.51 | 8.889e−10 | 203-215 | PR00910 | LUTEOVIRUS ORF6 PROTEIN |
| | | | | | | SIGNATURE |
| 1094 | BL00492A | 11.53 | 4.724e−18 | 16-32 | BL00492 | Clusterin proteins. |
| 1094 | BL00492B | 10.36 | 9.053e−28 | 40-62 | BL00492 | Clusterin proteins. |
| 1094 | BL00492C | 8.35 | 1.000e−38 | 66-99 | BL00492 | Clusterin proteins. |
| 1094 | BL00492D | 13.23 | 1.000e−40 | 100-136 | BL00492 | Clusterin proteins. |
| 1094 | BL00492E | 12.52 | 1.000e−40 | 142-190 | BL00492 | Clusterin proteins. |
| 1094 | BL00492F | 16.61 | 1.000e−40 | 232-273 | BL00492 | Clusterin proteins. |
| 1094 | BL00492G | 13.20 | 1.000e−40 | 299-348 | BL00492 | Clusterin proteins. |
| 1094 | BL00492H | 16.50 | 6.870e−40 | 427-463 | BL00492 | Clusterin proteins. |
| 1096 | BL00420A | 20.42 | 1.000e−08 | 248-276 | BL00420 | Speract receptor repeat |
| | | | | | | proteins domain |
| | | | | | | proteins. |
| 1096 | BL00420A | 20.42 | 1.000e−09 | 779-807 | BL00420 | Speract receptor repeat |
| | | | | | | proteins domain |
| | | | | | | proteins. |
| 1096 | BL00420A | 20.42 | 1.000e−10 | 1043-1071 | BL00420 | Speract receptor repeat |
| | | | | | | proteins domain |
| | | | | | | proteins. |
| 1096 | BL00420A | 20.42 | 1.138e−10 | 824-852 | BL00420 | Speract receptor repeat |
| | | | | | | proteins domain |
| | | | | | | proteins. |
| 1096 | BL00420A | 20.42 | 1.148e−10 | 377-405 | BL00420 | Speract receptor repeat |
| | | | | | | proteins domain |
| | | | | | | proteins. |
| 1096 | BL00420A | 20.42 | 1.164e−11 | 329-357 | BL00420 | Speract receptor repeat |
| | | | | | | proteins domain |
| | | | | | | proteins. |
| 1096 | BL00420A | 20.42 | 1.295e−10 | 608-636 | BL00420 | Speract receptor repeat |
| | | | | | | proteins domain |
| | | | | | | proteins. |
| 1096 | BL00420A | 20.42 | 1.491e−11 | 1145-1173 | BL00420 | Speract receptor repeat |
| | | | | | | proteins domain |
| | | | | | | proteins. |
| 1096 | BL00420A | 20.42 | 1.738e−10 | 887-915 | BL00420 | Speract receptor repeat |
| | | | | | | proteins domain |
| | | | | | | proteins. |
| 1096 | BL00420A | 20.42 | 1.831e−09 | 1040-1068 | BL00420 | Speract receptor repeat |
| | | | | | | proteins domain |
| | | | | | | proteins. |
| 1096 | BL00420A | 20.42 | 1.969e−09 | 530-558 | BL00420 | Speract receptor repeat |
| | | | | | | proteins domain |
| | | | | | | proteins. |
| 1096 | BL00420A | 20.42 | 2.108e−09 | 461-489 | BL00420 | Speract receptor repeat |
| | | | | | | proteins domain |
| | | | | | | proteins. |
| 1096 | BL00420A | 20.42 | 2.108e−09 | 842-870 | BL00420 | Speract receptor repeat |
| | | | | | | proteins domain |
| | | | | | | proteins. |
| 1096 | BL00420A | 20.42 | 2.108e−09 | 932-960 | BL00420 | Speract receptor repeat |
| | | | | | | proteins domain |
| | | | | | | proteins. |
| 1096 | BL00420A | 20.42 | 2.108e−09 | 956-984 | BL00420 | Speract receptor repeat |
| | | | | | | proteins domain |
| | | | | | | proteins. |
| 1096 | BL00420A | 20.42 | 2.246e−09 | 401-429 | BL00420 | Speract receptor repeat |
| | | | | | | proteins domain |
| | | | | | | proteins. |
| 1096 | BL00420A | 20.42 | 2.309e−11 | 347-375 | BL00420 | Speract receptor repeat |
| | | | | | | proteins domain |
| | | | | | | proteins. |
| 1096 | BL00420A | 20.42 | 2.309e−11 | 803-831 | BL00420 | Speract receptor repeat |
| | | | | | | proteins domain |
| | | | | | | proteins. |
| 1096 | BL00420A | 20.42 | 2.385e−09 | 833-861 | BL00420 | Speract receptor repeat |
| | | | | | | proteins domain |
| | | | | | | proteins. |
| 1096 | BL00420A | 20.42 | 2.473e−11 | 500-528 | BL00420 | Speract receptor repeat |
| | | | | | | proteins domain |
| | | | | | | proteins. |
| 1096 | BL00420A | 20.42 | 2.523e−09 | 1142-1170 | BL00420 | Speract receptor repeat |
| | | | | | | proteins domain |
| | | | | | | proteins. |
| 1096 | BL00420A | 20.42 | 2.662e−09 | 130-158 | BL00420 | Speract receptor repeat |
| | | | | | | proteins domain |
| | | | | | | proteins. |
| 1096 | BL00420A | 20.42 | 2.770e−10 | 674-702 | BL00420 | Speract receptor repeat |
| | | | | | | proteins domain |
| | | | | | | proteins. |
| 1096 | BL00420A | 20.42 | 3.077e−09 | 395-423 | BL00420 | Speract receptor repeat |
| | | | | | | proteins domain |
| | | | | | | proteins. |
| 1096 | BL00420A | 20.42 | 3.215e−09 | 133-161 | BL00420 | Speract receptor repeat |
| | | | | | | proteins domain |
| | | | | | | proteins. |
| 1096 | BL00420A | 20.42 | 3.215e−09 | 467-495 | BL00420 | Speract receptor repeat |
| | | | | | | proteins domain |
| | | | | | | proteins. |
| 1096 | BL00420A | 20.42 | 3.455e−11 | 551-579 | BL00420 | Speract receptor repeat |
| | | | | | | proteins domain |
| | | | | | | proteins. |
| 1096 | BL00420A | 20.42 | 3.618e−11 | 908-936 | BL00420 | Speract receptor repeat |
| | | | | | | proteins domain |
| | | | | | | proteins. |
| 1096 | BL00420A | 20.42 | 3.631e−09 | 1073-1101 | BL00420 | Speract receptor repeat |
| | | | | | | proteins domain |
| | | | | | | proteins. |
| 1096 | BL00420A | 20.42 | 3.631e−09 | 497-525 | BL00420 | Speract receptor repeat |
| | | | | | | proteins domain |
| | | | | | | proteins. |
| 1096 | BL00420A | 20.42 | 3.656e−10 | 539-567 | BL00420 | Speract receptor repeat |
| | | | | | | proteins domain |
| | | | | | | proteins. |
| 1096 | BL00420A | 20.42 | 3.803e−10 | 209-237 | BL00420 | Speract receptor repeat |
| | | | | | | proteins domain |
| | | | | | | proteins. |
| 1096 | BL00420A | 20.42 | 3.908e−09 | 515-543 | BL00420 | Speract receptor repeat |
| | | | | | | proteins domain |
| | | | | | | proteins. |
| 1096 | BL00420A | 20.42 | 3.908e−09 | 584-612 | BL00420 | Speract receptor repeat |
| | | | | | | proteins domain |
| | | | | | | proteins. |
| 1096 | BL00420A | 20.42 | 3.951e−10 | 881-909 | BL00420 | Speract receptor repeat |
| | | | | | | proteins domain |
| | | | | | | proteins. |
| 1096 | BL00420A | 20.42 | 4.046e−09 | 191-219 | BL00420 | Speract receptor repeat |
| | | | | | | proteins domain |
| | | | | | | proteins. |
| 1096 | BL00420A | 20.42 | 4.046e−09 | 341-369 | BL00420 | Speract receptor repeat |
| | | | | | | proteins domain |
| | | | | | | proteins. |
| 1096 | BL00420A | 20.42 | 4.246e−10 | 1013-1041 | BL00420 | Speract receptor repeat |
| | | | | | | proteins domain |
| | | | | | | proteins. |
| 1096 | BL00420A | 20.42 | 4.273e−11 | 299-327 | BL00420 | Speract receptor repeat |
| | | | | | | proteins domain |
| | | | | | | proteins. |
| 1096 | BL00420A | 20.42 | 4.323e−09 | 1046-1074 | BL00420 | Speract receptor repeat |
| | | | | | | proteins domain |
| | | | | | | proteins. |
| 1096 | BL00420A | 20.42 | 4.323e−09 | 242-270 | BL00420 | Speract receptor repeat |
| | | | | | | proteins domain |
| | | | | | | proteins. |
| 1096 | BL00420A | 20.42 | 4.490e−13 | 566-594 | BL00420 | Speract receptor repeat |
| | | | | | | proteins domain |
| | | | | | | proteins. |
| 1096 | BL00420A | 20.42 | 4.738e−09 | 440-468 | BL00420 | Speract receptor repeat |
| | | | | | | proteins domain |
| | | | | | | proteins. |
| 1096 | BL00420A | 20.42 | 4.738e−09 | 641-669 | BL00420 | Speract receptor repeat |
| | | | | | | proteins domain |
| | | | | | | proteins. |
| 1096 | BL00420A | 20.42 | 4.927e−11 | 1103-1131 | BL00420 | Speract receptor repeat |
| | | | | | | proteins domain |
| | | | | | | proteins. |
| 1096 | BL00420A | 20.42 | 4.984e−10 | 707-735 | BL00420 | Speract receptor repeat |
| | | | | | | proteins domain |
| | | | | | | proteins. |
| 1096 | BL00420A | 20.42 | 4.984e−10 | 878-906 | BL00420 | Speract receptor repeat |
| | | | | | | proteins domain |
| | | | | | | proteins. |
| 1096 | BL00420A | 20.42 | 5.154e−09 | 1166-1194 | BL00420 | Speract receptor repeat |
| | | | | | | proteins domain |
| | | | | | | proteins. |
| 1096 | BL00420A | 20.42 | 5.154e−09 | 443-471 | BL00420 | Speract receptor repeat |
| | | | | | | proteins domain |
| | | | | | | proteins. |
| 1096 | BL00420A | 20.42 | 5.154e−09 | 647-675 | BL00420 | Speract receptor repeat |
| | | | | | | proteins domain |
| | | | | | | proteins. |
| 1096 | BL00420A | 20.42 | 5.292e−09 | 710-738 | BL00420 | Speract receptor repeat |
| | | | | | | proteins domain |
| | | | | | | proteins. |
| 1096 | BL00420A | 20.42 | 5.292e−09 | 935-963 | BL00420 | Speract receptor repeat |
| | | | | | | proteins domain |
| | | | | | | proteins. |
| 1096 | BL00420A | 20.42 | 5.426e−10 | 869-897 | BL00420 | Speract receptor repeat |
| | | | | | | proteins domain |
| | | | | | | proteins. |
| 1096 | BL00420A | 20.42 | 5.569e−09 | 127-155 | BL00420 | Speract receptor repeat |
| | | | | | | proteins domain |
| | | | | | | proteins. |
| 1096 | BL00420A | 20.42 | 5.869e−10 | 872-900 | BL00420 | Speract receptor repeat |
| | | | | | | proteins domain |
| | | | | | | proteins. |
| 1096 | BL00420A | 20.42 | 5.909e−11 | 968-996 | BL00420 | Speract receptor repeat |
| | | | | | | proteins domain |
| | | | | | | proteins. |
| 1096 | BL00420A | 20.42 | 6.123e−09 | 1124-1152 | BL00420 | Speract receptor repeat |
| | | | | | | proteins domain |
| | | | | | | proteins. |
| 1096 | BL00420A | 20.42 | 6.123e−09 | 488-516 | BL00420 | Speract receptor repeat |
| | | | | | | proteins domain |
| | | | | | | proteins. |
| 1096 | BL00420A | 20.42 | 6.123e−09 | 590-618 | BL00420 | Speract receptor repeat |
| | | | | | | proteins domain |
| | | | | | | proteins. |
| 1096 | BL00420A | 20.42 | 6.143e−13 | 653-681 | BL00420 | Speract receptor repeat |
| | | | | | | proteins domain |
| | | | | | | proteins. |
| 1096 | BL00420A | 20.42 | 6.262e−09 | 791-819 | BL00420 | Speract receptor repeat |
| | | | | | | proteins domain |
| | | | | | | proteins. |
| 1096 | BL00420A | 20.42 | 6.400e−09 | 371-399 | BL00420 | Speract receptor repeat |
| | | | | | | proteins domain |
| | | | | | | proteins. |
| 1096 | BL00420A | 20.42 | 6.400e−11 | 572-600 | BL00420 | Speract receptor repeat |
| | | | | | | proteins domain |
| | | | | | | proteins. |
| 1096 | BL00420A | 20.42 | 6.459e−10 | 263-291 | BL00420 | Speract receptor repeat |
| | | | | | | proteins domain |
| | | | | | | proteins. |
| 1096 | BL00420A | 20.42 | 6.538e−09 | 359-387 | BL00420 | Speract receptor repeat |
| | | | | | | proteins domain |
| | | | | | | proteins. |
| 1096 | BL00420A | 20.42 | 6.815e−09 | 521-549 | BL00420 | Speract receptor repeat |
| | | | | | | proteins domain |
| | | | | | | proteins. |
| 1096 | BL00420A | 20.42 | 7.092e−09 | 1160-1188 | BL00420 | Speract receptor repeat |
| | | | | | | proteins domain |
| | | | | | | proteins. |
| 1096 | BL00420A | 20.42 | 7.092e−09 | 731-759 | BL00420 | Speract receptor repeat |
| | | | | | | proteins domain |
| | | | | | | proteins. |
| 1096 | BL00420A | 20.42 | 7.092e−09 | 890-918 | BL00420 | Speract receptor repeat |
| | | | | | | proteins domain |
| | | | | | | proteins. |
| 1096 | BL00420A | 20.42 | 7.197e−10 | 317-345 | BL00420 | Speract receptor repeat |
| | | | | | | proteins domain |
| | | | | | | proteins. |
| 1096 | BL00420A | 20.42 | 7.197e−10 | 425-453 | BL00420 | Speract receptor repeat |
| | | | | | | proteins domain |
| | | | | | | proteins. |
| 1096 | BL00420A | 20.42 | 7.231e−09 | 836-864 | BL00420 | Speract receptor repeat |
| | | | | | | proteins domain |
| | | | | | | proteins. |
| 1096 | BL00420A | 20.42 | 7.369e−09 | 218-246 | BL00420 | Speract receptor repeat |
| | | | | | | proteins domain |
| | | | | | | proteins. |
| 1096 | BL00420A | 20.42 | 7.508e−09 | 1148-1176 | BL00420 | Speract receptor repeat |
| | | | | | | proteins domain |
| | | | | | | proteins. |
| 1096 | BL00420A | 20.42 | 7.508e−09 | 992-1020 | BL00420 | Speract receptor repeat |
| | | | | | | proteins domain |
| | | | | | | proteins. |
| 1096 | BL00420A | 20.42 | 7.646e−09 | 227-255 | BL00420 | Speract receptor repeat |
| | | | | | | proteins domain |
| | | | | | | proteins. |
| 1096 | BL00420A | 20.42 | 7.646e−09 | 491-519 | BL00420 | Speract receptor repeat |
| | | | | | | proteins domain |
| | | | | | | proteins. |
| 1096 | BL00420A | 20.42 | 7.787e−10 | 185-213 | BL00420 | Speract receptor repeat |
| | | | | | | proteins domain |
| | | | | | | proteins. |
| 1096 | BL00420A | 20.42 | 8.036e−11 | 722-750 | BL00420 | Speract receptor repeat |
| | | | | | | proteins domain |
| | | | | | | proteins. |
| 1096 | BL00420A | 20.42 | 8.071e−15 | 410-438 | BL00420 | Speract receptor repeat |
| | | | | | | proteins domain |
| | | | | | | proteins. |
| 1096 | BL00420A | 20.42 | 8.082e−10 | 206-234 | BL00420 | Speract receptor repeat |
| | | | | | | proteins domain |
| | | | | | | proteins. |
| 1096 | BL00420A | 20.42 | 8.230e−10 | 518-546 | BL00420 | Speract receptor repeat |
| | | | | | | proteins domain |
| | | | | | | proteins. |
| 1096 | BL00420A | 20.42 | 8.338e−09 | 812-840 | BL00420 | Speract receptor repeat |
| | | | | | | proteins domain |
| | | | | | | proteins. |
| 1096 | BL00420A | 20.42 | 8.347e−13 | 944-972 | BL00420 | Speract receptor repeat |
| | | | | | | proteins domain |
| | | | | | | proteins. |
| 1096 | BL00420A | 20.42 | 8.377e−10 | 284-312 | BL00420 | Speract receptor repeat |
| | | | | | | proteins domain |
| | | | | | | proteins. |
| 1096 | BL00420A | 20.42 | 8.377e−10 | 587-615 | BL00420 | Speract receptor repeat |
| | | | | | | proteins domain |
| | | | | | | proteins. |
| 1096 | BL00420A | 20.42 | 8.477e−09 | 542-570 | BL00420 | Speract receptor repeat |
| | | | | | | proteins domain |
| | | | | | | proteins. |
| 1096 | BL00420A | 20.42 | 8.477e−09 | 635-663 | BL00420 | Speract receptor repeat |
| | | | | | | proteins domain |
| | | | | | | proteins. |
| 1096 | BL00420A | 20.42 | 8.525e−10 | 773-801 | BL00420 | Speract receptor repeat |
| | | | | | | proteins domain |
| | | | | | | proteins. |
| 1096 | BL00420A | 20.42 | 8.531e−13 | 485-513 | BL00420 | Speract receptor repeat |
| | | | | | | proteins domain |
| | | | | | | proteins. |
| 1096 | BL00420A | 20.42 | 8.615e−12 | 605-633 | BL00420 | Speract receptor repeat |
| | | | | | | proteins domain |
| | | | | | | proteins. |
| 1096 | BL00420A | 20.42 | 8.754e−09 | 758-786 | BL00420 | Speract receptor repeat |
| | | | | | | proteins domain |
| | | | | | | proteins. |
| 1096 | BL00420A | 20.42 | 8.892e−09 | 230-258 | BL00420 | Speract receptor repeat |
| | | | | | | proteins domain |
| | | | | | | proteins. |
| 1096 | BL00420A | 20.42 | 8.892e−09 | 506-534 | BL00420 | Speract receptor repeat |
| | | | | | | proteins domain |
| | | | | | | proteins. |
| 1096 | BL00420A | 20.42 | 8.892e−09 | 911-939 | BL00420 | Speract receptor repeat |
| | | | | | | proteins domain |
| | | | | | | proteins. |
| 1096 | BL00420A | 20.42 | 9.031e−09 | 398-426 | BL00420 | Speract receptor repeat |
| | | | | | | proteins domain |
| | | | | | | proteins. |
| 1096 | BL00420A | 20.42 | 9.031e−09 | 677-705 | BL00420 | Speract receptor repeat |
| | | | | | | proteins domain |
| | | | | | | proteins. |
| 1096 | BL00420A | 20.42 | 9.031e−09 | 860-888 | BL00420 | Speract receptor repeat |
| | | | | | | proteins domain |
| | | | | | | proteins. |
| 1096 | BL00420A | 20.42 | 9.115e−10 | 947-975 | BL00420 | Speract receptor repeat |
| | | | | | | proteins domain |
| | | | | | | proteins. |
| 1096 | BL00420A | 20.42 | 9.135e−12 | 800-828 | BL00420 | Speract receptor repeat |
| | | | | | | proteins domain |
| | | | | | | proteins. |
| 1096 | BL00420A | 20.42 | 9.169e−09 | 1121-1149 | BL00420 | Speract receptor repeat |
| | | | | | | proteins domain |
| | | | | | | proteins. |
| 1096 | BL00420A | 20.42 | 9.182e−11 | 629-657 | BL00420 | Speract receptor repeat |
| | | | | | | proteins domain |
| | | | | | | proteins. |
| 1096 | BL00420A | 20.42 | 9.262e−10 | 136-164 | BL00420 | Speract receptor repeat |
| | | | | | | proteins domain |
| | | | | | | proteins. |
| 1096 | BL00420A | 20.42 | 9.345e−11 | 197-225 | BL00420 | Speract receptor repeat |
| | | | | | | proteins domain |
| | | | | | | proteins. |
| 1096 | BL00420A | 20.42 | 9.585e−09 | 407-435 | BL00420 | Speract receptor repeat |
| | | | | | | proteins domain |
| | | | | | | proteins. |
| 1096 | BL00420A | 20.42 | 9.585e−09 | 971-999 | BL00420 | Speract receptor repeat |
| | | | | | | proteins domain |
| | | | | | | proteins. |
| 1096 | BL00420A | 20.42 | 9.852e−10 | 719-747 | BL00420 | Speract receptor repeat |
| | | | | | | proteins domain |
| | | | | | | proteins. |
| 1096 | BL01113A | 17.99 | 1.000e−08 | 1022-1048 | BL01113 | C1q domain proteins. |
| 1096 | BL01113A | 17.99 | 1.000e−09 | 593-619 | BL01113 | C1q domain proteins. |
| 1096 | BL01113A | 17.99 | 1.173e−09 | 1145-1171 | BL01113 | C1q domain proteins. |
| 1096 | BL01113A | 17.99 | 1.346e−09 | 461-487 | BL01113 | C1q domain proteins. |
| 1096 | BL01113A | 17.99 | 1.519e−09 | 524-550 | BL01113 | C1q domain proteins. |
| 1096 | BL01113A | 17.99 | 1.614e−11 | 139-165 | BL01113 | C1q domain proteins. |
| 1096 | BL01113A | 17.99 | 1.614e−11 | 584-610 | BL01113 | C1q domain proteins. |
| 1096 | BL01113A | 17.99 | 1.692e−09 | 209-235 | BL01113 | C1q domain proteins. |
| 1096 | BL01113A | 17.99 | 1.692e−09 | 410-436 | BL01113 | C1q domain proteins. |
| 1096 | BL01113A | 17.99 | 1.692e−09 | 644-670 | BL01113 | C1q domain proteins. |
| 1096 | BL01113A | 17.99 | 1.818e−11 | 896-922 | BL01113 | C1q domain proteins. |
| 1096 | BL01113A | 17.99 | 1.957e−10 | 815-841 | BL01113 | C1q domain proteins. |
| 1096 | BL01113A | 17.99 | 2.038e−09 | 233-259 | BL01113 | C1q domain proteins. |
| 1096 | BL01113A | 17.99 | 2.154e−12 | 515-541 | BL01113 | C1q domain proteins. |
| 1096 | BL01113A | 17.99 | 2.227e−11 | 191-217 | BL01113 | C1q domain proteins. |
| 1096 | BL01113A | 17.99 | 2.241e−16 | 130-156 | BL01113 | C1q domain proteins. |
| 1096 | BL01113A | 17.99 | 2.532e−10 | 419-445 | BL01113 | C1q domain proteins. |
| 1096 | BL01113A | 17.99 | 2.558e−09 | 566-592 | BL01113 | C1q domain proteins. |
| 1096 | BL01113A | 17.99 | 2.731e−09 | 1040-1066 | BL01113 | C1q domain proteins. |
| 1096 | BL01113A | 17.99 | 2.731e−09 | 365-391 | BL01113 | C1q domain proteins. |
| 1096 | BL01113A | 17.99 | 2.846e−12 | 716-742 | BL01113 | C1q domain proteins. |
| 1096 | BL01113A | 17.99 | 2.846e−12 | 806-832 | BL01113 | C1q domain proteins. |
| 1096 | BL01113A | 17.99 | 2.904e−09 | 521-547 | BL01113 | C1q domain proteins. |
| 1096 | BL01113A | 17.99 | 2.915e−10 | 965-991 | BL01113 | C1q domain proteins. |
| 1096 | BL01113A | 17.99 | 3.045e−11 | 218-244 | BL01113 | C1q domain proteins. |
| 1096 | BL01113A | 17.99 | 3.077e−09 | 995-1021 | BL01113 | C1q domain proteins. |
| 1096 | BL01113A | 17.99 | 3.106e−10 | 491-517 | BL01113 | C1q domain proteins. |
| 1096 | BL01113A | 17.99 | 3.250e−09 | 338-364 | BL01113 | C1q domain proteins. |
| 1096 | BL01113A | 17.99 | 3.250e−11 | 482-508 | BL01113 | C1q domain proteins. |
| 1096 | BL01113A | 17.99 | 3.298e−10 | 473-499 | BL01113 | C1q domain proteins. |
| 1096 | BL01113A | 17.99 | 3.298e−10 | 560-586 | BL01113 | C1q domain proteins. |
| 1096 | BL01113A | 17.99 | 3.298e−10 | 929-955 | BL01113 | C1q domain proteins. |
| 1096 | BL01113A | 17.99 | 3.489e−10 | 284-310 | BL01113 | C1q domain proteins. |
| 1096 | BL01113A | 17.99 | 3.489e−10 | 377-403 | BL01113 | C1q domain proteins. |
| 1096 | BL01113A | 17.99 | 3.489e−10 | 638-664 | BL01113 | C1q domain proteins. |
| 1096 | BL01113A | 17.99 | 3.596e−09 | 989-1015 | BL01113 | C1q domain proteins. |
| 1096 | BL01113A | 17.99 | 3.659e−11 | 911-937 | BL01113 | C1q domain proteins. |
| 1096 | BL01113A | 17.99 | 3.681e−10 | 242-268 | BL01113 | C1q domain proteins. |
| 1096 | BL01113A | 17.99 | 3.769e−09 | 124-150 | BL01113 | C1q domain proteins. |
| 1096 | BL01113A | 17.99 | 3.769e−09 | 467-493 | BL01113 | C1q domain proteins. |
| 1096 | BL01113A | 17.99 | 3.769e−09 | 917-943 | BL01113 | C1q domain proteins. |
| 1096 | BL01113A | 17.99 | 3.769e−12 | 197-223 | BL01113 | C1q domain proteins. |
| 1096 | BL01113A | 17.99 | 4.064e−10 | 773-799 | BL01113 | C1q domain proteins. |
| 1096 | BL01113A | 17.99 | 4.068e−11 | 569-595 | BL01113 | C1q domain proteins. |
| 1096 | BL01113A | 17.99 | 4.115e−09 | 878-904 | BL01113 | C1q domain proteins. |
| 1096 | BL01113A | 17.99 | 4.162e−13 | 548-574 | BL01113 | C1q domain proteins. |
| 1096 | BL01113A | 17.99 | 4.288e−09 | 1031-1057 | BL01113 | C1q domain proteins. |
| 1096 | BL01113A | 17.99 | 4.447e−10 | 653-679 | BL01113 | C1q domain proteins. |
| 1096 | BL01113A | 17.99 | 4.447e−10 | 710-736 | BL01113 | C1q domain proteins. |
| 1096 | BL01113A | 17.99 | 4.462e−09 | 662-688 | BL01113 | C1q domain proteins. |
| 1096 | BL01113A | 17.99 | 4.477e−11 | 926-952 | BL01113 | C1q domain proteins. |
| 1096 | BL01113A | 17.99 | 4.635e−09 | 422-448 | BL01113 | C1q domain proteins. |
| 1096 | BL01113A | 17.99 | 4.638e−10 | 452-478 | BL01113 | C1q domain proteins. |
| 1096 | BL01113A | 17.99 | 4.682e−11 | 133-159 | BL01113 | C1q domain proteins. |
| 1096 | BL01113A | 17.99 | 4.682e−11 | 920-946 | BL01113 | C1q domain proteins. |
| 1096 | BL01113A | 17.99 | 4.692e−12 | 809-835 | BL01113 | C1q domain proteins. |
| 1096 | BL01113A | 17.99 | 4.774e−15 | 428-454 | BL01113 | C1q domain proteins. |
| 1096 | BL01113A | 17.99 | 4.808e−09 | 374-400 | BL01113 | C1q domain proteins. |
| 1096 | BL01113A | 17.99 | 4.808e−09 | 890-916 | BL01113 | C1q domain proteins. |
| 1096 | BL01113A | 17.99 | 4.808e−17 | 136-162 | BL01113 | C1q domain proteins. |
| 1096 | BL01113A | 17.99 | 4.892e−13 | 887-913 | BL01113 | C1q domain proteins. |
| 1096 | BL01113A | 17.99 | 5.154e−12 | 404-430 | BL01113 | C1q domain proteins. |
| 1096 | BL01113A | 17.99 | 5.295e−11 | 1181-1207 | BL01113 | C1q domain proteins. |
| 1096 | BL01113A | 17.99 | 5.327e−09 | 497-523 | BL01113 | C1q domain proteins. |
| 1096 | BL01113A | 17.99 | 5.327e−09 | 674-700 | BL01113 | C1q domain proteins. |
| 1096 | BL01113A | 17.99 | 5.500e−09 | 821-847 | BL01113 | C1q domain proteins. |
| 1096 | BL01113A | 17.99 | 5.500e−09 | 944-970 | BL01113 | C1q domain proteins. |
| 1096 | BL01113A | 17.99 | 5.500e−11 | 1166-1192 | BL01113 | C1q domain proteins. |
| 1096 | BL01113A | 17.99 | 5.596e−10 | 386-412 | BL01113 | C1q domain proteins. |
| 1096 | BL01113A | 17.99 | 5.787e−10 | 335-361 | BL01113 | C1q domain proteins. |
| 1096 | BL01113A | 17.99 | 6.019e−09 | 263-289 | BL01113 | C1q domain proteins. |
| 1096 | BL01113A | 17.99 | 6.019e−09 | 914-940 | BL01113 | C1q domain proteins. |
| 1096 | BL01113A | 17.99 | 6.077e−12 | 188-214 | BL01113 | C1q domain proteins. |
| 1096 | BL01113A | 17.99 | 6.077e−12 | 290-316 | BL01113 | C1q domain proteins. |
| 1096 | BL01113A | 17.99 | 6.114e−11 | 224-250 | BL01113 | C1q domain proteins. |
| 1096 | BL01113A | 17.99 | 6.170e−10 | 791-817 | BL01113 | C1q domain proteins. |
| 1096 | BL01113A | 17.99 | 6.192e−09 | 380-406 | BL01113 | C1q domain proteins. |
| 1096 | BL01113A | 17.99 | 6.308e−12 | 557-583 | BL01113 | C1q domain proteins. |
| 1096 | BL01113A | 17.99 | 6.308e−12 | 731-757 | BL01113 | C1q domain proteins. |
| 1096 | BL01113A | 17.99 | 6.362e−10 | 221-247 | BL01113 | C1q domain proteins. |
| 1096 | BL01113A | 17.99 | 6.362e−10 | 872-898 | BL01113 | C1q domain proteins. |
| 1096 | BL01113A | 17.99 | 6.455e−14 | 842-868 | BL01113 | C1q domain proteins. |
| 1096 | BL01113A | 17.99 | 6.538e−09 | 293-319 | BL01113 | C1q domain proteins. |
| 1096 | BL01113A | 17.99 | 6.553e−10 | 1142-1168 | BL01113 | C1q domain proteins. |
| 1096 | BL01113A | 17.99 | 6.745e−10 | 575-601 | BL01113 | C1q domain proteins. |
| 1096 | BL01113A | 17.99 | 6.769e−12 | 1046-1072 | BL01113 | C1q domain proteins. |
| 1096 | BL01113A | 17.99 | 6.936e−10 | 947-973 | BL01113 | C1q domain proteins. |
| 1096 | BL01113A | 17.99 | 7.058e−09 | 608-634 | BL01113 | C1q domain proteins. |
| 1096 | BL01113A | 17.99 | 7.128e−10 | 248-274 | BL01113 | C1q domain proteins. |
| 1096 | BL01113A | 17.99 | 7.128e−10 | 938-964 | BL01113 | C1q domain proteins. |
| 1096 | BL01113A | 17.99 | 7.231e−12 | 121-147 | BL01113 | C1q domain proteins. |
| 1096 | BL01113A | 17.99 | 7.319e−10 | 182-208 | BL01113 | C1q domain proteins. |
| 1096 | BL01113A | 17.99 | 7.319e−10 | 563-589 | BL01113 | C1q domain proteins. |
| 1096 | BL01113A | 17.99 | 7.341e−11 | 974-1000 | BL01113 | C1q domain proteins. |
| 1096 | BL01113A | 17.99 | 7.404e−09 | 539-565 | BL01113 | C1q domain proteins. |
| 1096 | BL01113A | 17.99 | 7.511e−10 | 1001-1027 | BL01113 | C1q domain proteins. |
| 1096 | BL01113A | 17.99 | 7.511e−10 | 206-232 | BL01113 | C1q domain proteins. |
| 1096 | BL01113A | 17.99 | 7.511e−10 | 851-877 | BL01113 | C1q domain proteins. |
| 1096 | BL01113A | 17.99 | 7.545e−14 | 239-265 | BL01113 | C1q domain proteins. |
| 1096 | BL01113A | 17.99 | 7.545e−14 | 299-325 | BL01113 | C1q domain proteins. |
| 1096 | BL01113A | 17.99 | 7.577e−09 | 1175-1201 | BL01113 | C1q domain proteins. |
| 1096 | BL01113A | 17.99 | 7.702e−10 | 656-682 | BL01113 | C1q domain proteins. |
| 1096 | BL01113A | 17.99 | 7.750e−09 | 1127-1153 | BL01113 | C1q domain proteins. |
| 1096 | BL01113A | 17.99 | 7.750e−09 | 203-229 | BL01113 | C1q domain proteins. |
| 1096 | BL01113A | 17.99 | 7.750e−09 | 332-358 | BL01113 | C1q domain proteins. |
| 1096 | BL01113A | 17.99 | 7.923e−09 | 485-511 | BL01113 | C1q domain proteins. |
| 1096 | BL01113A | 17.99 | 7.955e−11 | 1010-1036 | BL01113 | C1q domain proteins. |
| 1096 | BL01113A | 17.99 | 8.085e−10 | 551-577 | BL01113 | C1q domain proteins. |
| 1096 | BL01113A | 17.99 | 8.096e−09 | 998-1024 | BL01113 | C1q domain proteins. |
| 1096 | BL01113A | 17.99 | 8.159e−11 | 1151-1177 | BL01113 | C1q domain proteins. |
| 1096 | BL01113A | 17.99 | 8.277e−10 | 506-532 | BL01113 | C1q domain proteins. |
| 1096 | BL01113A | 17.99 | 8.385e−12 | 1118-1144 | BL01113 | C1q domain proteins. |
| 1096 | BL01113A | 17.99 | 8.442e−09 | 145-171 | BL01113 | C1q domain proteins. |
| 1096 | BL01113A | 17.99 | 8.442e−09 | 254-280 | BL01113 | C1q domain proteins. |
| 1096 | BL01113A | 17.99 | 8.442e−09 | 941-967 | BL01113 | C1q domain proteins. |
| 1096 | BL01113A | 17.99 | 8.468e−10 | 1160-1186 | BL01113 | C1q domain proteins. |
| 1096 | BL01113A | 17.99 | 8.568e−11 | 695-721 | BL01113 | C1q domain proteins. |
| 1096 | BL01113A | 17.99 | 8.615e−09 | 215-241 | BL01113 | C1q domain proteins. |
| 1096 | BL01113A | 17.99 | 8.615e−09 | 650-676 | BL01113 | C1q domain proteins. |
| 1096 | BL01113A | 17.99 | 8.615e−12 | 647-673 | BL01113 | C1q domain proteins. |
| 1096 | BL01113A | 17.99 | 8.660e−10 | 683-709 | BL01113 | C1q domain proteins. |
| 1096 | BL01113A | 17.99 | 8.660e−10 | 758-784 | BL01113 | C1q domain proteins. |
| 1096 | BL01113A | 17.99 | 8.773e−11 | 1121-1147 | BL01113 | C1q domain proteins. |
| 1096 | BL01113A | 17.99 | 8.788e−09 | 281-307 | BL01113 | C1q domain proteins. |
| 1096 | BL01113A | 17.99 | 8.851e−10 | 413-439 | BL01113 | C1q domain proteins. |
| 1096 | BL01113A | 17.99 | 8.962e−09 | 641-667 | BL01113 | C1q domain proteins. |
| 1096 | BL01113A | 17.99 | 8.962e−09 | 818-844 | BL01113 | C1q domain proteins. |
| 1096 | BL01113A | 17.99 | 8.962e−09 | 956-982 | BL01113 | C1q domain proteins. |
| 1096 | BL01113A | 17.99 | 9.043e−10 | 1157-1183 | BL01113 | C1q domain proteins. |
| 1096 | BL01113A | 17.99 | 9.043e−10 | 308-334 | BL01113 | C1q domain proteins. |
| 1096 | BL01113A | 17.99 | 9.043e−10 | 623-649 | BL01113 | C1q domain proteins. |
| 1096 | BL01113A | 17.99 | 9.077e−12 | 185-211 | BL01113 | C1q domain proteins. |
| 1096 | BL01113A | 17.99 | 9.135e−09 | 389-415 | BL01113 | C1q domain proteins. |
| 1096 | BL01113A | 17.99 | 9.135e−09 | 488-514 | BL01113 | C1q domain proteins. |
| 1096 | BL01113A | 17.99 | 9.182e−11 | 740-766 | BL01113 | C1q domain proteins. |
| 1096 | BL01113A | 17.99 | 9.308e−09 | 443-469 | BL01113 | C1q domain proteins. |
| 1096 | BL01113A | 17.99 | 9.426e−10 | 1025-1051 | BL01113 | C1q domain proteins. |
| 1096 | BL01113A | 17.99 | 9.426e−10 | 536-562 | BL01113 | C1q domain proteins. |
| 1096 | BL01113A | 17.99 | 9.455e−14 | 800-826 | BL01113 | C1q domain proteins. |
| 1096 | BL01113A | 17.99 | 9.481e−09 | 704-730 | BL01113 | C1q domain proteins. |
| 1096 | BL01113A | 17.99 | 9.514e−13 | 1043-1069 | BL01113 | C1q domain proteins. |
| 1096 | BL01113A | 17.99 | 9.591e−11 | 476-502 | BL01113 | C1q domain proteins. |
| 1096 | BL01113A | 17.99 | 9.617e−10 | 194-220 | BL01113 | C1q domain proteins. |
| 1096 | BL01113A | 17.99 | 9.617e−10 | 395-421 | BL01113 | C1q domain proteins. |
| 1096 | BL01113A | 17.99 | 9.617e−10 | 770-796 | BL01113 | C1q domain proteins. |
| 1096 | BL01113A | 17.99 | 9.654e−09 | 200-226 | BL01113 | C1q domain proteins. |
| 1096 | BL01113A | 17.99 | 9.654e−09 | 230-256 | BL01113 | C1q domain proteins. |
| 1096 | BL01113A | 17.99 | 9.757e−13 | 127-153 | BL01113 | C1q domain proteins. |
| 1096 | BL01113A | 17.99 | 9.757e−13 | 142-168 | BL01113 | C1q domain proteins. |
| 1096 | BL01113A | 17.99 | 9.809e−10 | 722-748 | BL01113 | C1q domain proteins. |
| 1096 | BL01113A | 17.99 | 9.827e−09 | 545-571 | BL01113 | C1q domain proteins. |
| 1096 | BL01113A | 17.99 | 9.827e−09 | 692-718 | BL01113 | C1q domain proteins. |
| 1096 | BL01208B | 15.83 | 5.950e−13 | 84-98 | BL01208 | VWFC domain proteins. |
| 1096 | DM01418A | 20.83 | 1.000e−40 | 1255-1302 | DM01418 | 352 FIBRILLAR COLLAGEN |
| | | | | | | CARBOXYL-TERMINAL. |
| 1096 | DM01418B | 22.51 | 1.000e−40 | 1354-1395 | DM01418 | 352 FIBRILLAR COLLAGEN |
| | | | | | | CARBOXYL-TERMINAL. |
| 1096 | DM01418C | 20.48 | 5.500e−40 | 1425-1466 | DM01418 | 352 FIBRILLAR COLLAGEN |
| | | | | | | CARBOXYL-TERMINAL. |
| 1096 | PR00049D | 0.00 | 5.271e−09 | 1181-1195 | PR00049 | WILM'S TUMOUR PROTEIN |
| | | | | | | SIGNATURE |
| 1096 | PR00049D | 0.00 | 5.424e−09 | 1180-1194 | PR00049 | WILM'S TUMOUR PROTEIN |
| | | | | | | SIGNATURE |
| 1096 | PR00049D | 0.00 | 6.186e−09 | 142-156 | PR00049 | WILM'S TUMOUR PROTEIN |
| | | | | | | SIGNATURE |
| 1096 | PR00049D | 0.00 | 8.571e−10 | 1177-1191 | PR00049 | WILM'S TUMOUR PROTEIN |
| | | | | | | SIGNATURE |
| 1100 | BL01019A | 13.20 | 4.156e−12 | 234-273 | BL01019 | ADP-ribosylation |
| | | | | | | factors family |
| | | | | | | proteins. |
| 1100 | PR00318A | 7.84 | 1.600e−19 | 88-103 | PR00318 | ALPHA G-PROTEIN |
| | | | | | | (TRANSDUCIN) SIGNATURE |
| 1100 | PR00318B | 14.79 | 9.000e−28 | 221-243 | PR00318 | ALPHA G-PROTEIN |
| | | | | | | (TRANSDUCIN) SIGNATURE |
| 1100 | PR000318C | 12.09 | 3.571e−24 | 250-267 | PR00318 | ALPHA G-PROTEIN |
| | | | | | | (TRANSDUCIN) SIGNATURE |
| 1100 | PR00318D | 16.28 | 1.563e−30 | 272-300 | PR00318 | ALPHA G-PROTEIN |
| | | | | | | (TRANSDUCIN) SIGNATURE |
| 1100 | PR00318E | 7.23 | 2.125e−13 | 318-327 | PR00318 | ALPHA G-PROTEIN |
| | | | | | | (TRANSDUCIN) SIGNATURE |
| 1100 | PR00440A | 9.18 | 5.645e−15 | 88-103 | PR00440 | G-PROTEIN ALPHA SUBUNIT |
| | | | | | | GROUP 12 SIGNATURE |
| 1100 | PR00440B | 13.27 | 6.260e−13 | 221-243 | PR00440 | G-PROTEIN ALPHA SUBUNIT |
| | | | | | | GROUP 12 SIGNATURE |
| 1100 | PR00440C | 9.54 | 6.885e−18 | 250-267 | PR00440 | G-PROTEIN ALPHA SUBUNIT |
| | | | | | | GROUP 12 SIGNATURE |
| 1100 | PR00440D | 8.15 | 1.303e−15 | 272-300 | PR00440 | G-PROTEIN ALPHA SUBUNIT |
| | | | | | | GROUP 12 SIGNATURE |
| 1100 | PR00440E | 11.16 | 3.880e−10 | 319-327 | PR00440 | G-PROTEIN ALPHA SUBUNIT |
| | | | | | | GROUP 12 SIGNATURE |
| 1100 | PR00441A | 10.69 | 1.375e−19 | 88-103 | PR00441 | G-PROTEIN ALPHA SUBUNIT |
| | | | | | | GROUP I SIGNATURE |
| 1100 | PR00441B | 16.16 | 4.000e−29 | 221-243 | PR00441 | G-PROTEIN ALPHA SUBUNIT |
| | | | | | | GROUP I SIGNATURE |
| 1100 | PR00441C | 14.17 | 1.409e−24 | 250-267 | PR00441 | G-PROTEIN ALPHA SUBUNIT |
| | | | | | | GROUP I SIGNATURE |
| 1100 | PR00441D | 14.44 | 9.250e−36 | 272-300 | PR00441 | G-PROTEIN ALPHA SUBUNIT |
| | | | | | | GROUP I SIGNATURE |
| 1100 | PR00441E | 8.35 | 1.214e−11 | 319-327 | PR00441 | G-PROTEIN ALPHA SUBUNIT |
| | | | | | | GROUP I SIGNATURE |
| 1100 | PR00441F | 11.65 | 6.850e−14 | 331-341 | PR00441 | G-PROTEIN ALPHA SUBUNIT |
| | | | | | | GROUP I SIGNATURE |
| 1100 | PR00441G | 11.67 | 2.543e−13 | 347-361 | PR00441 | G-PROTEIN ALPHA SUBUNIT |
| | | | | | | GROUP I SIGNATURE |
| 1100 | PR00442A | 6.46 | 2.385e−14 | 88-103 | PR00442 | G-PROTEIN ALPHA SUBUNIT |
| | | | | | | GROUP Q SIGNATURE |
| 1100 | PR00442B | 7.17 | 1.794e−18 | 221-244 | PR00442 | G-PROTEIN ALPHA SUBUNIT |
| | | | | | | GROUP Q SIGNATURE |
| 1100 | PR00442C | 17.61 | 9.654e−20 | 250-267 | PR00442 | G-PROTEIN ALPHA SUBUNIT |
| | | | | | | GROUP Q SIGNATURE |
| 1100 | PR00442D | 9.29 | 8.071e−18 | 272-300 | PR00442 | G-PROTEIN ALPHA SUBUNIT |
| | | | | | | GROUP Q SIGNATURE |
| 1100 | PR00442E | 7.23 | 1.106e−11 | 319-327 | PR00442 | G-PROTEIN ALPHA SUBUNIT |
| | | | | | | GROUP Q SIGNATURE |
| 1100 | PR00443A | 15.16 | 8.313e−18 | 88-103 | PR00443 | G-PROTEIN ALPHA SUBUNIT |
| | | | | | | GROUP S SIGNATURE |
| 1100 | PR00443C | 14.35 | 7.446e−16 | 221-243 | PR00443 | G-PROTEIN ALPHA SUBUNIT |
| | | | | | | GROUP S SIGNATURE |
| 1100 | PR00443D | 13.15 | 3.361e−17 | 250-267 | PR00443 | G-PROTEIN ALPHA SUBUNIT |
| | | | | | | GROUP S SIGNATURE |
| 1100 | PR00443E | 11.98 | 7.513e−17 | 272-300 | PR00443 | G-PROTEIN ALPHA SUBUNIT |
| | | | | | | GROUP S SIGNATURE |
| 1100 | PR00443F | 12.68 | 5.909e−10 | 319-327 | PR00443 | G-PROTEIN ALPHA SUBUNIT |
| | | | | | | GROUP S SIGNATURE |
| 1100 | PR00449A | 13.20 | 1.000e−08 | 87-108 | PR00449 | TRANSFORMING PROTEIN |
| | | | | | | P21 RAS SIGNATURE |
| 1101 | BL00166C | 18.93 | 4.600e−13 | 453-479 | BL00166 | Enoyl-CoA |
| | | | | | | hydratase/isomerase |
| | | | | | | proteins. |
| 1101 | BL00166D | 22.87 | 5.600e−16 | 504-539 | BL00166 | Enoyl-CoA |
| | | | | | | hydratase/isomerase |
| | | | | | | proteins. |
| 1101 | BL00598 | 14.45 | 6.625e−16 | 92-113 | BL00598 | Chromo domain proteins. |
| 1101 | PR00504B | 9.12 | 4.600e−13 | 86-100 | PR00504 | CHROMODOMAIN SIGNATURE |
| 1101 | PR00504C | 11.19 | 5.592e−09 | 101-113 | PR00504 | CHROMODOMAIN SIGNATURE |
| 1101 | PR00584E | 4.20 | 8.000e−09 | 126-133 | PR00584 | PROSTANOID EP3 RECEPTOR |
| | | | | | | TYPE 2 SIGNATURE |
| 1102 | BL00383A | 13.34 | 4.150e−14 | 926-940 | BL00383 | Tyrosine specific |
| | | | | | | protein phosphatases |
| | | | | | | proteins. |
| 1102 | BL00383B | 7.61 | 5.000e−09 | 951-959 | BL00383 | Tyrosine specific |
| | | | | | | protein phosphatases |
| | | | | | | proteins. |
| 1102 | BL00383C | 10.10 | 5.091e−12 | 981-991 | BL00383 | Tyrosine specific |
| | | | | | | protein phosphatases |
| | | | | | | proteins. |
| 1102 | BL00383D | 11.92 | 1.000e−14 | 1055-1067 | BL00383 | Tyrosine specific |
| | | | | | | protein phosphatases |
| | | | | | | proteins. |
| 1102 | BL00383D | 11.92 | 5.500e−09 | 1293-1305 | BL00383 | Tyrosine specific |
| | | | | | | protein phosphatases |
| | | | | | | proteins. |
| 1102 | BL00383E | 10.35 | 1.789e−09 | 1387-1397 | BL00383 | Tyrosine specific |
| | | | | | | protein phosphatases |
| | | | | | | proteins. |
| 1102 | BL00383E | 10.35 | 7.300e−14 | 1093-1103 | BL00383 | Tyrosine specific |
| | | | | | | protein phosphatases |
| | | | | | | proteins. |
| 1102 | BL00383F | 15.51 | 1.439e−09 | 1425-1440 | BL00383 | Tyrosine specific |
| | | | | | | protein phosphatases |
| | | | | | | proteins. |
| 1102 | BL00383F | 15.51 | 4.913e−14 | 1131-1146 | BL00383 | Tyrosine specific |
| | | | | | | protein phosphatases |
| | | | | | | proteins. |
| 1102 | BL00740A | 13.87 | 8.667e−13 | 36-48 | BL00740 | MAM domain proteins. |
| 1102 | BL00740B | 19.76 | 5.500e−16 | 167-187 | BL00740 | MAM domain proteins. |
| 1102 | BL00740C | 15.93 | 9.000e−11 | 681-691 | BL00740 | MAM domain proteins. |
| 1102 | BL00790H | 13.42 | 3.769e−09 | 498-523 | BL00790 | Receptor tyrosine |
| | | | | | | kinase class V |
| | | | | | | proteins. |
| 1102 | BL00790I | 20.01 | 2.607e−09 | 552-582 | BL00790 | Receptor tyrosine |
| | | | | | | kinase class V |
| | | | | | | proteins. |
| 1102 | PR00014C | 15.44 | 4.913e−09 | 331-349 | PR00014 | FIBRONECTIN TYPE III |
| | | | | | | REPEAT SIGNATURE |
| 1102 | PR00014C | 15.44 | 9.000e−11 | 541-559 | PR00014 | FIBRONECTIN TYPE III |
| | | | | | | REPEAT SIGNATURE |
| 1102 | PR00014D | 12.04 | 9.400e−11 | 559-573 | PR00014 | FIBRONECTIN TYPE III |
| | | | | | | REPEAT SIGNATURE |
| 1102 | PR00020A | 18.17 | 1.000e−17 | 34-52 | PR00020 | MAM DOMAIN SIGNATURE |
| 1102 | PR00020B | 15.52 | 4.971e−14 | 68-84 | PR00020 | MAM DOMAIN SIGNATURE |
| 1102 | PR00020C | 13.66 | 3.483e−13 | 95-106 | PR00020 | MAM DOMAIN SIGNATURE |
| 1102 | PR00020D | 12.70 | 2.543e−15 | 147-161 | PR00020 | MAM DOMAIN SIGNATURE |
| 1102 | PR00020E | 8.64 | 6.586e−13 | 165-178 | PR00020 | MAM DOMAIN SIGNATURE |
| 1102 | PR00700B | 16.80 | 4.162e−16 | 1257-1277 | PR00700 | PROTEIN TYROSINE |
| | | | | | | PHOSPHATASE SIGNATURE |
| 1102 | PR00700B | 16.80 | 6.400e−23 | 968-988 | PR00700 | PROTEIN TYROSINE |
| | | | | | | PHOSPHATASE SIGNATURE |
| 1102 | PR00700C | 13.17 | 3.077e−19 | 1051-1068 | PR00700 | PROTEIN TYROSINE |
| | | | | | | PHOSPHATASE SIGNATURE |
| 1102 | PR00700D | 12.47 | 7.136e−13 | 1384-1402 | PR00700 | PROTEIN TYROSINE |
| | | | | | | PHOSPHATASE SIGNATURE |
| 1102 | PR00700D | 12.47 | 7.158e−20 | 1090-1108 | PR00700 | PROTEIN TYROSINE |
| | | | | | | PHOSPHATASE SIGNATURE |
| 1102 | PR00700E | 17.57 | 9.550e−13 | 1121-1136 | PR00700 | PROTEIN TYROSINE |
| | | | | | | PHOSPHATASE SIGNATURE |
| 1102 | PR00700F | 11.18 | 6.824e−13 | 1137-1147 | PR00700 | PROTEIN TYROSINE |
| | | | | | | PHOSPHATASE SIGNATURE |
| 1104 | PF00855 | 13.75 | 1.000e−20 | 119-135 | PF00855 | PWWP domain proteins. |
| 1105 | BL50062B | 12.92 | 1.290e−12 | 280-290 | BL50062 | BCL2-like apoptosis |
| | | | | | | inhibitors (spans part |
| | | | | | | of BH3, BH1 and BH. |
| 1105 | BL50062C | 6.66 | 8.676e−09 | 325-333 | BL50062 | BCL2-like apoptosis |
| | | | | | | inhibitors (spans part |
| | | | | | | of BH3, BH1 and BH. |
| 1106 | BL00216B | 27.64 | 5.765e−35 | 123-172 | BL00216 | Sugar transport |
| | | | | | | proteins. |
| 1106 | PR00171A | 10.00 | 8.615e−13 | 24-34 | PR00171 | SUGAR TRANSPORTER |
| | | | | | | SIGNATURE |
| 1106 | PR00171B | 14.73 | 4.789e−17 | 124-143 | PR00171 | SUGAR TRANSPORTER |
| | | | | | | SIGNATURE |
| 1106 | PR00171C | 10.97 | 3.143e−13 | 283-293 | PR00171 | SUGAR TRANSPORTER |
| | | | | | | SIGNATURE |
| 1106 | PR00171D | 12.76 | 5.500e−19 | 370-391 | PR00171 | SUGAR TRANSPORTER |
| | | | | | | SIGNATURE |
| 1106 | PR00171E | 14.87 | 8.500e−13 | 393-405 | PR00171 | SUGAR TRANSPORTER |
| | | | | | | SIGNATURE |
| 1106 | PR00172A | 9.82 | 9.182e−26 | 273-294 | PR00172 | GLUCOSE TRANSPORTER |
| | | | | | | SIGNATURE |
| 1106 | PR00172B | 8.42 | 1.000e−23 | 308-329 | PR00172 | GLUCOSE TRANSPORTER |
| | | | | | | SIGNATURE |
| 1106 | PR00172C | 9.51 | 7.828e−19 | 339-359 | PR00172 | GLUCOSE TRANSPORTER |
| | | | | | | SIGNATURE |
| 1106 | PR00172D | 9.13 | 1.000e−25 | 370-393 | PR00172 | GLUCOSE TRANSPORTER |
| | | | | | | SIGNATURE |
| 1106 | PR00172E | 8.29 | 2.895e−21 | 403-421 | PR00172 | GLUCOSE TRANSPORTER |
| | | | | | | SIGNATURE |
| 1106 | PR00172F | 8.47 | 7.188e−20 | 433-453 | PR00172 | GLUCOSE TRANSPORTER |
| | | | | | | SIGNATURE |
| 1107 | PR00704A | 14.68 | 9.069e−20 | 14-37 | PR00704 | CALPAIN CYSTEINE |
| | | | | | | PROTEASE (C2) FAMILY |
| | | | | | | SIGNATURE |
| 1107 | PR00704B | 17.94 | 2.636e−22 | 54-76 | PR00704 | CALPAIN CYSTEINE |
| | | | | | | PROTEASE (C2) FAMILY |
| | | | | | | SIGNATURE |
| 1107 | PR00704C | 11.88 | 4.000e−16 | 78-94 | PR00704 | CALPAIN CYSTEINE |
| | | | | | | PROTEASE (C2) FAMILY |
| | | | | | | SIGNATURE |
| 1107 | PR00704D | 11.05 | 2.000e−30 | 120-145 | PR00704 | CALPAIN CYSTEINE |
| | | | | | | PROTEASE (C2) FAMILY |
| | | | | | | SIGNATURE |
| 1107 | PR00704E | 12.55 | 5.886e−25 | 150-173 | PR00704 | CALPAIN CYSTEINE |
| | | | | | | PROTEASE (C2) FAMILY |
| | | | | | | SIGNATURE |
| 1107 | PR00704F | 13.61 | 8.364e−25 | 175-202 | PR00704 | CALPAIN CYSTEINE |
| | | | | | | PROTEASE (C2) FAMILY |
| | | | | | | SIGNATURE |
| 1107 | PR00704G | 13.87 | 7.667e−24 | 322-343 | PR00704 | CALPAIN CYSTEINE |
| | | | | | | PROTEASE (C2) FAMILY |
| | | | | | | SIGNATURE |
| 1107 | PR00704H | 13.38 | 3.676e−19 | 373-390 | PR00704 | CALPAIN CYSTEINE |
| | | | | | | PROTEASE (C2) FAMILY |
| | | | | | | SIGNATURE |
| 1107 | PR00704I | 9.52 | 8.941e−26 | 464-492 | PR00704 | CALPAIN CYSTEINE |
| | | | | | | PROTEASE (C2) FAMILY |
| | | | | | | SIGNATURE |
| 1108 | BL00383E | 10.35 | 9.780e−12 | 402-412 | BL00383 | Tyrosine specific |
| | | | | | | protein phosphatases |
| | | | | | | proteins. |
| 1108 | BL00383F | 15.51 | 9.341e−09 | 239-254 | BL00383 | Tyrosine specific |
| | | | | | | protein phosphatases |
| | | | | | | proteins. |
| 1108 | PR00716C | 17.65 | 5.011e−09 | 147-167 | PR00716 | M-PHASE INDUCER |
| | | | | | | PHOSPHATASE SIGNATURE |
| 1112 | BL00657A | 19.39 | 8.091e−30 | 109-150 | BL00657 | Fork head domain |
| | | | | | | proteins. |
| 1112 | BL00657B | 22.27 | 7.750e−26 | 157-199 | BL00657 | Fork head domain |
| | | | | | | proteins. |
| 1112 | PR00053A | 8.86 | 8.050e−09 | 109-122 | PR00053 | FORK HEAD DOMAIN |
| | | | | | | SIGNATURE |
| 1112 | PR00053B | 13.70 | 7.698e−13 | 130-147 | PR00053 | FORK HEAD DOMAIN |
| | | | | | | SIGNATURE |
| 1112 | PR00053C | 12.80 | 2.125e−19 | 158-175 | PR00053 | FORK HEAD DOMAIN |
| | | | | | | SIGNATURE |
| 1113 | BL00484B | 9.04 | 3.400e−12 | 189-202 | BL00484 | Thyroglobulin type-1 |
| | | | | | | repeat proteins |
| | | | | | | proteins. |
| 1113 | BL00484C | 17.01 | 9.206e−12 | 208-222 | BL00484 | Thyroglobulin type-1 |
| | | | | | | repeat proteins |
| | | | | | | proteins. |
| 1117 | BL00222A | 11.34 | 5.125e−09 | 92-102 | BL00222 | Insulin-like growth |
| | | | | | | factor binding |
| | | | | | | proteins. |
| 1117 | BL00222B | 11.09 | 1.375e−16 | 111-126 | BL00222 | Insulin-like growth |
| | | | | | | factor binding |
| | | | | | | proteins. |
| 1117 | BL00222C | 22.97 | 1.667e−26 | 261-288 | BL00222 | Insulin-like growth |
| | | | | | | factor binding |
| | | | | | | proteins. |
| 1117 | BL00484B | 9.04 | 3.118e−17 | 262-275 | BL00484 | Thyroglobulin type-1 |
| | | | | | | repeat proteins |
| | | | | | | proteins. |
| 1117 | BL00484C | 17.01 | 4.536e−13 | 286-300 | BL00484 | Thyroglobulin type-1 |
| | | | | | | repeat proteins |
| | | | | | | proteins. |
| 1119 | BL00022B | 7.54 | 7.750e−10 | 203-209 | BL00022 | EGF-like domain |
| | | | | | | proteins. |
| 1119 | BL01187A | 9.98 | 2.714e−10 | 175-186 | BL01187 | Calcium-binding EGF- |
| | | | | | | like domain proteins |
| | | | | | | pattern proteins. |
| 1119 | BL01187A | 9.98 | 4.750e−09 | 216-227 | BL01187 | Calcium-binding EGF- |
| | | | | | | like domain proteins |
| | | | | | | pattern proteins. |
| 1119 | BL01187A | 9.98 | 4.750e−09 | 46-57 | BL01187 | Calcium-binding EGF- |
| | | | | | | like domain proteins |
| | | | | | | pattern proteins. |
| 1119 | BL01187B | 12.04 | 3.000e−12 | 272-287 | BL01187 | Calcium-binding EGF- |
| | | | | | | like domain proteins |
| | | | | | | pattern proteins. |
| 1119 | BL01187B | 12.04 | 5.304e−13 | 194-209 | BL01187 | Calcium-binding EGF- |
| | | | | | | like domain proteins |
| | | | | | | pattern proteins. |
| 1119 | BL01187B | 12.04 | 5.500e−14 | 232-247 | BL01187 | Calcium-binding EGF- |
| | | | | | | like domain proteins |
| | | | | | | pattern proteins. |
| 1119 | BL01187B | 12.04 | 9.400e−11 | 313-328 | BL01187 | Calcium-binding EGF- |
| | | | | | | like domain proteins |
| | | | | | | pattern proteins. |
| 1119 | PD02283C | 17.54 | 8.988e−09 | 58-85 | PD02283 | PROTEIN SPORULATION |
| | | | | | | REPEAT PRECU. |
| 1119 | PR00010C | 11.16 | 1.273e−10 | 237-247 | PR00010 | TYPE II EGF-LIKE |
| | | | | | | SIGNATURE |
| 1119 | PR00010C | 11.16 | 4.667e−11 | 199-209 | PR00010 | TYPE II EGF-LIKE |
| | | | | | | SIGNATURE |
| 1119 | PR00907B | 11.29 | 6.260e−10 | 309-325 | PR00907 | THROMBOMODULIN |
| | | | | | | SIGNATURE |
| 1119 | PR00907G | 11.63 | 3.676e−09 | 194-220 | PR00907 | THROMBOMODULIN |
| | | | | | | SIGNATURE |
| 1119 | PR00907G | 11.63 | 7.368e−10 | 232-258 | PR00907 | THROMBOMODULIN |
| | | | | | | SIGNATURE |
| 1120 | BL50017B | 17.60 | 5.263e−11 | 4112-4127 | BL50017 | Death domain proteins |
| | | | | | | profile. |
| 1120 | DM00784B | 17.87 | 6.311e−09 | 3961-3985 | DM00784 | APILLOMAVIRUS E4 |
| | | | | | | PROTEIN. |
| 1120 | DM00784B | 17.87 | 7.197e−09 | 3964-3988 | DM00784 | APILLOMAVIRUS E4 |
| | | | | | | PROTEIN. |
| 1120 | DM00784B | 17.87 | 9.705e−09 | 3968-3992 | DM00784 | APILLOMAVIRUS E4 |
| | | | | | | PROTEIN. |
| 1120 | PD00078B | 13.14 | 6.478e−09 | 701-713 | PD00078 | REPEAT PROTEIN ANK |
| | | | | | | NUCLEAR ANKYR. |
| 1120 | PD01364B | 13.94 | 2.421e−09 | 3974-3989 | PD01364 | MUCIN GLYCOPROTEIN |
| | | | | | | PRECURSOR MEM. |
| 1120 | PD01364B | 13.94 | 3.368e−09 | 3969-3984 | PD01364 | MUCIN GLYCOPROTEIN |
| | | | | | | PRECURSOR MEM. |
| 1120 | PD01364B | 13.94 | 6.684e−09 | 3967-3982 | PD01364 | MUCIN GLYCOPROTEIN |
| | | | | | | PRECURSOR MEM. |
| 1120 | PD01364B | 13.94 | 8.364e−10 | 3970-3985 | PD01364 | MUCIN GLYCOPROTEIN |
| | | | | | | PRECURSOR MEM. |
| 1120 | PF00023A | 16.03 | 1.000e−09 | 118-133 | PF00023 | Ank repeat proteins. |
| 1120 | PF00023A | 16.03 | 2.875e−10 | 85-100 | PF00023 | Ank repeat proteins. |
| 1120 | PF00023A | 16.03 | 3.000e−12 | 477-492 | PF00023 | Ank repeat proteins. |
| 1120 | PF00023A | 16.03 | 4.214e−09 | 576-591 | PF00023 | Ank repeat proteins. |
| 1120 | PF00023A | 16.03 | 4.375e−10 | 444-459 | PF00023 | Ank repeat proteins. |
| 1120 | PF00023A | 16.03 | 6.143e−09 | 279-294 | PF00023 | Ank repeat proteins. |
| 1120 | PF00023A | 16.03 | 7.000e−10 | 378-393 | PF00023 | Ank repeat proteins. |
| 1120 | PF00023A | 16.03 | 7.000e−11 | 675-690 | PF00023 | Ank repeat proteins. |
| 1120 | PF00023A | 16.03 | 9.679e−09 | 312-327 | PF00023 | Ank repeat proteins. |
| 1120 | PF00023B | 14.20 | 5.000e−10 | 704-713 | PF00023 | Ank repeat proteins. |
| 1120 | PF00023B | 14.20 | 5.500e−09 | 572-581 | PF00023 | Ank repeat proteins. |
| 1120 | PF00023B | 14.20 | 8.500e−10 | 407-416 | PF00023 | Ank repeat proteins. |
| 1120 | PF00023B | 14.20 | 8.773e−09 | 605-614 | PF00023 | Ank repeat proteins. |
| 1120 | PF00023B | 14.20 | 9.000e−10 | 242-251 | PF00023 | Ank repeat proteins. |
| 1120 | PF00023B | 14.20 | 9.182e−09 | 770-779 | PF00023 | Ank repeat proteins. |
| 1120 | PF00791A | 27.85 | 1.000e−40 | 168-222 | PF00791 | Domain present in ZO-1 |
| | | | | | | and Unc5-like netrin |
| | | | | | | receptors. |
| 1120 | PF00791B | 28.49 | 1.000e−40 | 279-333 | PF00791 | Domain present in ZO-1 |
| | | | | | | and Unc5-like netrin |
| | | | | | | receptors. |
| 1120 | PF00791B | 28.49 | 1.205e−14 | 118-172 | PF00791 | Domain present in ZO-1 |
| | | | | | | and Unc5-like netrin |
| | | | | | | receptors. |
| 1120 | PF00791B | 28.49 | 1.692e−13 | 151-205 | PF00791 | Domain present in ZO-1 |
| | | | | | | and Unc5-like netrin |
| | | | | | | receptors. |
| 1120 | PF00791B | 28.49 | 2.367e−17 | 411-465 | PF00791 | Domain present in ZO-1 |
| | | | | | | and Unc5-like netrin |
| | | | | | | receptors. |
| 1120 | PF00791B | 28.49 | 3.368e−12 | 85-139 | PF00791 | Domain present in ZO-1 |
| | | | | | | and Unc5-like netrin |
| | | | | | | receptors. |
| 1120 | PF00791B | 28.49 | 4.221e−12 | 213-267 | PF00791 | Domain present in ZO-1 |
| | | | | | | and Unc5-like netrin |
| | | | | | | receptors. |
| 1120 | PF00791B | 28.49 | 4.462e−13 | 609-663 | PF00791 | Domain present in ZO-1 |
| | | | | | | and Unc5-like netrin |
| | | | | | | receptors. |
| 1120 | PF00791B | 28.49 | 4.987e−17 | 477-531 | PF00791 | Domain present in ZO-1 |
| | | | | | | and Unc5-like netrin |
| | | | | | | receptors. |
| 1120 | PF00791B | 28.49 | 5.500e−14 | 543-597 | PF00791 | Domain present in ZO-1 |
| | | | | | | and Unc5-like netrin |
| | | | | | | receptors. |
| 1120 | PF00791B | 28.49 | 5.500e−16 | 246-300 | PF00791 | Domain present in ZO-1 |
| | | | | | | and Unc5-like netrin |
| | | | | | | receptors. |
| 1120 | PF00791B | 28.49 | 6.637e−13 | 345-399 | PF00791 | Domain present in ZO-1 |
| | | | | | | and Unc5-like netrin |
| | | | | | | receptors. |
| 1120 | PF00791B | 28.49 | 6.874e−12 | 708-762 | PF00791 | Domain present in ZO-1 |
| | | | | | | and Unc5-like netrin |
| | | | | | | receptors. |
| 1120 | PF00791B | 28.49 | 6.927e−16 | 741-795 | PF00791 | Domain present in ZO-1 |
| | | | | | | and Unc5-like netrin |
| | | | | | | receptors. |
| 1120 | PF00791B | 28.49 | 6.932e−14 | 642-696 | PF00791 | Domain present in ZO-1 |
| | | | | | | and Unc5-like netrin |
| | | | | | | receptors. |
| 1120 | PF00791B | 28.49 | 7.136e−14 | 378-432 | PF00791 | Domain present in ZO-1 |
| | | | | | | and Unc5-like netrin |
| | | | | | | receptors. |
| 1120 | PF00791B | 28.49 | 7.442e−12 | 444-498 | PF00791 | Domain present in ZO-1 |
| | | | | | | and Unc5-like netrin |
| | | | | | | receptors. |
| 1120 | PF00791B | 28.49 | 7.459e−15 | 312-366 | PF00791 | Domain present in ZO-1 |
| | | | | | | and Unc5-like netrin |
| | | | | | | receptors. |
| 1120 | PF00791B | 28.49 | 7.835e−17 | 510-564 | PF00791 | Domain present in ZO-1 |
| | | | | | | and Unc5-like netrin |
| | | | | | | receptors. |
| 1120 | PF00791B | 28.49 | 8.354e−16 | 675-729 | PF00791 | Domain present in ZO-1 |
| | | | | | | and Unc5-like netrin |
| | | | | | | receptors. |
| 1120 | PF00791B | 28.49 | 8.364e−14 | 576-630 | PF00791 | Domain present in ZO-1 |
| | | | | | | and Unc5-like netrin |
| | | | | | | receptors. |
| 1120 | PF00791C | 20.98 | 1.000e−10 | 132-170 | PF00791 | Domain present in ZO-1 |
| | | | | | | and Unc5-like netrin |
| | | | | | | receptors. |
| 1120 | PF00791C | 20.98 | 1.000e−10 | 326-364 | PF00791 | Domain present in ZO-1 |
| | | | | | | and Unc5-like netrin |
| | | | | | | receptors. |
| 1120 | PF00791C | 20.98 | 1.818e−12 | 557-595 | PF00791 | Domain present in ZO-1 |
| | | | | | | and Unc5-like netrin |
| | | | | | | receptors. |
| 1120 | PF00791C | 20.98 | 1.882e−09 | 99-137 | PF00791 | Domain present in ZO-1 |
| | | | | | | and Unc5-like netrin |
| | | | | | | receptors. |
| 1120 | PF00791C | 20.98 | 2.432e−12 | 392-430 | PF00791 | Domain present in ZO-1 |
| | | | | | | and Unc5-like netrin |
| | | | | | | receptors. |
| 1120 | PF00791C | 20.98 | 3.311e−16 | 623-661 | PF00791 | Domain present in ZO-1 |
| | | | | | | and Unc5-like netrin |
| | | | | | | receptors. |
| 1120 | PF00791C | 20.98 | 3.961e−15 | 227-265 | PF00791 | Domain present in ZO-1 |
| | | | | | | and Unc5-like netrin |
| | | | | | | receptors. |
| 1120 | PF00791C | 20.98 | 5.147e−09 | 491-529 | PF00791 | Domain present in ZO-1 |
| | | | | | | and Unc5-like netrin |
| | | | | | | receptors. |
| 1120 | PF00791C | 20.98 | 6.318e−12 | 689-727 | PF00791 | Domain present in ZO-1 |
| | | | | | | and Unc5-like netrin |
| | | | | | | receptors. |
| 1120 | PF00791C | 20.98 | 6.747e−13 | 260-298 | PF00791 | Domain present in ZO-1 |
| | | | | | | and Unc5-like netrin |
| | | | | | | receptors. |
| 1120 | PF00791C | 20.98 | 6.778e−14 | 722-760 | PF00791 | Domain present in ZO-1 |
| | | | | | | and Unc5-like netrin |
| | | | | | | receptors. |
| 1120 | PF00791C | 20.98 | 7.163e−11 | 293-331 | PF00791 | Domain present in ZO-1 |
| | | | | | | and Unc5-like netrin |
| | | | | | | receptors. |
| 1120 | PF00791C | 20.98 | 7.216e−10 | 359-397 | PF00791 | Domain present in ZO-1 |
| | | | | | | and Unc5-like netrin |
| | | | | | | receptors. |
| 1120 | PF00791C | 20.98 | 7.239e−12 | 755-793 | PF00791 | Domain present in ZO-1 |
| | | | | | | and Unc5-like netrin |
| | | | | | | receptors. |
| 1120 | PF00791C | 20.98 | 7.265e−09 | 165-203 | PF00791 | Domain present in ZO-1 |
| | | | | | | and Unc5-like netrin |
| | | | | | | receptors. |
| 1120 | PF00791C | 20.98 | 7.706e−26 | 590-628 | PF00791 | Domain present in ZO-1 |
| | | | | | | and Unc5-like netrin |
| | | | | | | receptors. |
| 1120 | PF00791C | 20.98 | 8.826e−11 | 524-562 | PF00791 | Domain present in ZO-1 |
| | | | | | | and Unc5-like netrin |
| | | | | | | receptors. |
| 1120 | PF00791C | 20.98 | 9.536e−10 | 425-463 | PF00791 | Domain present in ZO-1 |
| | | | | | | and Unc5-like netrin |
| | | | | | | receptors. |
| 1120 | PF00791D | 20.37 | 1.675e−36 | 1110-1152 | PF00791 | Domain present in ZO-1 |
| | | | | | | and Unc5-like netrin |
| | | | | | | receptors. |
| 1120 | PF00791E | 25.76 | 1.000e−40 | 1178-1230 | PF00791 | Domain present in ZO-1 |
| | | | | | | and Unc5-like netrin |
| | | | | | | receptors. |
| 1120 | PF00791F | 18.25 | 2.313e−19 | 1399-1423 | PF00791 | Domain present in ZO-1 |
| | | | | | | and Unc5-like netrin |
| | | | | | | receptors. |
| 1120 | PF00791G | 12.16 | 2.887e−11 | 1436-1451 | PF00791 | Domain present in ZO-1 |
| | | | | | | and Unc5-like netrin |
| | | | | | | receptors. |
| 1121 | BL00107A | 18.39 | 4.938e−21 | 459-489 | BL00107 | Protein kinases ATP- |
| | | | | | | binding region |
| | | | | | | proteins. |
| 1121 | BL00239B | 25.15 | 8.967e−19 | 394-441 | BL00239 | Receptor tyrosine |
| | | | | | | kinase class II |
| | | | | | | proteins. |
| 1121 | BL00239C | 18.75 | 9.169e−11 | 446-468 | BL00239 | Receptor tyrosine |
| | | | | | | kinase class II |
| | | | | | | proteins. |
| 1121 | BL00239E | 17.14 | 1.802e−10 | 516-565 | BL00239 | Receptor tyrosine |
| | | | | | | kinase class II |
| | | | | | | proteins. |
| 1121 | BL00239F | 28.15 | 6.082e−09 | 571-615 | BL00239 | Receptor tyrosine |
| | | | | | | kinase class II |
| | | | | | | proteins. |
| 1121 | BL00240E | 11.56 | 3.813e−11 | 445-482 | BL00240 | Receptor tyrosine |
| | | | | | | kinase class III |
| | | | | | | proteins. |
| 1121 | BL00240F | 17.74 | 3.172e−09 | 515-562 | BL00240 | Receptor tyrosine |
| | | | | | | kinase class III |
| | | | | | | proteins. |
| 1121 | BL00478B | 14.79 | 1.643e−13 | 51-65 | BL00478 | LIM domain proteins. |
| 1121 | BL00478B | 14.79 | 7.800e−11 | 109-123 | BL00478 | LIM domain proteins. |
| 1121 | BL00790M | 8.74 | 5.382e−13 | 450-471 | BL00790 | Receptor tyrosine |
| | | | | | | kinase class V |
| | | | | | | proteins. |
| 1121 | BL50001B | 17.40 | 1.000e−08 | 456-476 | BL50001 | Src homology 2 (SH2) |
| | | | | | | domain proteins |
| | | | | | | profile. |
| 1121 | PD00289 | 9.97 | 8.200e−11 | 219-232 | PD00289 | PROTEIN SH3 DOMAIN |
| | | | | | | REPEAT PRESYNA. |
| 1121 | PF00595 | 13.40 | 3.000e−11 | 216-226 | PF00595 | PDZ domain proteins |
| | | | | | | (Also known as DHR or |
| | | | | | | GLGF). |
| 1121 | PR00109A | 15.00 | 8.839e−10 | 423-436 | PR00109 | TYROSINE KINASE |
| | | | | | | CATALYTIC DOMAIN |
| | | | | | | SIGNATURE |
| 1121 | PR00109B | 12.27 | 7.511e−13 | 459-477 | PR00109 | TYROSINE KINASE |
| | | | | | | CATALYTIC DOMAIN |
| | | | | | | SIGNATURE |
| 1121 | PR00109E | 14.41 | 7.894e−10 | 590-612 | PR00109 | TYROSINE KINASE |
| | | | | | | CATALYTIC DOMAIN |
| | | | | | | SIGNATURE |
| 1123 | BL00280 | 24.61 | 3.172e−33 | 36-79 | BL00280 | Pancreatic trypsin |
| | | | | | | inhibitor (Kunitz) |
| | | | | | | family proteins. |
| 1123 | PR00759A | 14.51 | 3.880e−10 | 26-40 | PR00759 | BASIC PROTEASE (KUNITZ- |
| | | | | | | TYPE) INHIBITOR FAMILY |
| | | | | | | SIGNATURE |
| 1123 | PR00759B | 11.26 | 6.400e−13 | 54-64 | PR00759 | BASIC PROTEASE (KUNITZ- |
| | | | | | | TYPE) INHIBITOR FAMILY |
| | | | | | | SIGNATURE |
| 1123 | PR00759C | 14.15 | 2.364e−12 | 64-79 | PR00759 | BASIC PROTEASE (KUNITZ- |
| | | | | | | TYPE) INHIBITOR FAMILY |
| | | | | | | SIGNATURE |
| 1125 | PR00790I | 14.97 | 1.818e−32 | 77-100 | PR00790 | PEPTIDYL-GLYCINE ALPHA- |
| | | | | | | AMIDATING MONOOXYGENASE |
| | | | | | | SIGNATURE |
| 1126 | DM00406 | 7.73 | 2.000e−09 | 637-649 | DM00406 | GLIADIN. |
| 1126 | PD01234A | 11.06 | 1.450e−09 | 638-648 | PD01234 | PROTEIN NUCLEAR |
| | | | | | | BROMODOMAIN TRANS. |
| 1126 | PF00806B | 11.32 | 4.176e−12 | 980-989 | PF00806 | Pumilio-family RNA |
| | | | | | | binding domain proteins |
| | | | | | | (aka PUM-HD, Pumilio |
| | | | | | | homol. |
| 1126 | PF00806C | 7.81 | 2.452e−10 | 1131-1139 | PF00806 | Pumilio-family RNA |
| | | | | | | binding domain proteins |
| | | | | | | (aka PUM-HD, Pumilio |
| 1126 | PF00806C | 7.81 | 5.263e−11 | 1052-1060 | PF00806 | Pumilio-family RNA |
| | | | | | | binding domain proteins |
| | | | | | | (aka PUM-HD, Pumilio |
| | | | | | | homol. |
| 1126 | PF00806C | 7.81 | 7.632e−09 | 908-916 | PF00806 | Pumilio-family RNA |
| | | | | | | binding domain proteins |
| | | | | | | (aka PUM-HD, Pumilio |
| | | | | | | homol. |
| 1126 | PR00308C | 3.83 | 9.649e−09 | 490-499 | PR00308 | TYPE I ANTIFREEZE |
| | | | | | | PROTEIN SIGNATURE |
| 1130 | PD00301B | 5.49 | 5.154e−09 | 137-147 | PD00301 | PROTEIN REPEAT MUSCLE |
| | | | | | | CALCIUM-BI. |
| 1130 | PR00796I | 8.96 | 1.517e−09 | 98-123 | PR00796 | VIRAL SPIKE |
| | | | | | | GLYCOPROTEIN PRECURSOR |
| | | | | | | SIGNATURE |
| 1132 | BL00018 | 7.41 | 8.435e−09 | 28-40 | BL00018 | EF-hand calcium-binding |
| | | | | | | domain proteins. |
| 1133 | BL00203 | 13.94 | 7.415e−10 | 2460-2505 | BL00203 | Vertebrate |
| | | | | | | metallothioneins |
| | | | | | | proteins. |
| 1133 | BL01185C | 15.86 | 4.506e−10 | 2043-2081 | BL01185 | C-terminal cystine knot |
| | | | | | | proteins. |
| 1133 | BL01185C | 15.86 | 9.065e−10 | 960-998 | BL01185 | C-terminal cystine knot |
| | | | | | | proteins. |
| 1133 | BL01185D | 23.45 | 8.800e−16 | 2860-2912 | BL01185 | C-terminal cystine knot |
| | | | | | | proteins. |
| 1133 | BL01208B | 15.83 | 4.938e−10 | 775-789 | BL01208 | VWFC domain proteins. |
| 1133 | PD02576A | 27.60 | 1.000e−40 | 932-980 | PD02576 | PRECURSOR GLYCOPROTEIN |
| | | | | | | SIGNAL CELL. |
| 1133 | PD02576A | 27.60 | 4.857e−27 | 453-501 | PD02576 | PRECURSOR GLYCOPROTEIN |
| | | | | | | SIGNAL CELL. |
| 1133 | PD02576A | 27.60 | 7.882e−10 | 2534-2582 | PD02576 | PRECURSOR GLYCOPROTEIN |
| | | | | | | SIGNAL CELL. |
| 1133 | PD02576B | 25.43 | 1.667e−22 | 1495-1522 | PD02576 | PRECURSOR GLYCOPROTEIN |
| | | | | | | SIGNAL CELL. |
| 1133 | PF00094A | 11.09 | 4.333e−13 | 476-485 | PF00094 | von Willebrand factor |
| | | | | | | type D domain proteins. |
| 1133 | PF00094B | 10.43 | 3.647e−23 | 624-641 | PF00094 | von Willebrand factor |
| | | | | | | type D domain proteins. |
| 1133 | PF00094B | 10.43 | 8.440e−11 | 1096-1113 | PF00094 | von Willebrand factor |
| | | | | | | type D domain proteins. |
| 1133 | PF00094B | 10.43 | 9.571e−14 | 262-279 | PF00094 | von Willebrand factor |
| | | | | | | type D domain proteins. |
| 1133 | PF00094C | 12.88 | 5.500e−15 | 835-844 | PF00094 | von Willebrand factor |
| | | | | | | type D domain proteins. |
| 1133 | PR00453A | 12.79 | 4.656e−13 | 1382-1399 | PR00453 | VON WILLEBRAND FACTOR |
| | | | | | | TYPE A DOMAIN SIGNATURE |
| 1133 | PR00453A | 12.79 | 5.696e−10 | 1603-1620 | PR00453 | VON WILLEBRAND FACTOR |
| | | | | | | TYPE A DOMAIN SIGNATURE |
| 1133 | PR00453B | 14.65 | 5.135e−11 | 1642-1656 | PR00453 | VON WILLEBRAND FACTOR |
| | | | | | | TYPE A DOMAIN SIGNATURE |
| 1134 | PR00421B | 11.40 | 7.600e−09 | 94-103 | PR00421 | THIOREDOXIN FAMILY |
| | | | | | | SIGNATURE |
| 1135 | DM00215 | 19.43 | 5.729e−09 | 37-69 | DM00215 | PROLINE-RICH PROTEIN 3. |
| 1137 | BL00107A | 18.39 | 1.000e−20 | 197-227 | BL00107 | Protein kinases ATP- |
| | | | | | | binding region |
| | | | | | | proteins. |
| 1137 | BL00107B | 13.31 | 2.286e−10 | 268-283 | BL00107 | Protein kinases ATP- |
| | | | | | | binding region |
| | | | | | | proteins. |
| 1137 | BL00239B | 25.15 | 4.097e−09 | 124-171 | BL00239 | Receptor tyrosine |
| | | | | | | kinase class II |
| | | | | | | proteins. |
| 1137 | BL00240E | 11.56 | 5.371e−09 | 183-220 | BL00240 | Receptor tyrosine |
| | | | | | | kinase class III |
| | | | | | | proteins. |
| 1137 | BL00479C | 12.01 | 3.500e−09 | 246-258 | BL00479 | Phorbol esters/ |
| | | | | | | diacylglycerol binding |
| | | | | | | domain proteins. |
| 1137 | PR00109B | 12.27 | 3.471e−12 | 197-215 | PR00109 | TYROSINE KINASE |
| | | | | | | CATALYTIC DOMAIN |
| | | | | | | SIGNATURE |
| 1137 | PR00109D | 17.04 | 3.441e−10 | 269-291 | PR00109 | TYROSINE KINASE |
| | | | | | | CATALYTIC DOMAIN |
| | | | | | | SIGNATURE |
| 1138 | BL00297A | 17.58 | 2.895e−35 | 86-122 | BL00297 | Heat shock hsp70 |
| | | | | | | proteins family |
| | | | | | | proteins. |
| 1138 | BL00297B | 22.91 | 1.000e−40 | 126-174 | BL00297 | Heat shock hsp70 |
| | | | | | | proteins family |
| | | | | | | proteins. |
| 1138 | BL00297C | 9.51 | 1.000e−40 | 211-262 | BL00297 | Heat shock hsp70 |
| | | | | | | proteins family |
| | | | | | | proteins. |
| 1138 | BL00297D | 11.95 | 3.813e−40 | 270-309 | BL00297 | Heat shock hsp70 |
| | | | | | | proteins family |
| | | | | | | proteins. |
| 1138 | BL00297E | 18.56 | 6.478e−32 | 371-414 | BL00297 | Heat shock hsp70 |
| | | | | | | proteins family |
| | | | | | | proteins. |
| 1138 | BL00297F | 11.84 | 4.750e−25 | 434-461 | BL00297 | Heat shock hsp70 |
| | | | | | | proteins family |
| | | | | | | proteins. |
| 1138 | BL00297G | 21.87 | 1.000e−40 | 464-518 | BL00297 | Heat shock hsp70 |
| | | | | | | proteins family |
| | | | | | | proteins. |
| 1138 | BL00297H | 15.46 | 1.000e−40 | 527-580 | BL00297 | Heat shock hsp70 |
| | | | | | | proteins family |
| | | | | | | proteins. |
| 1138 | BL00933A | 17.50 | 7.857e−09 | 84-107 | BL00933 | FGGY family of |
| | | | | | | carbohydrate kinases |
| | | | | | | proteins. |
| 1138 | PR00301A | 14.84 | 3.455e−15 | 84-97 | PR00301 | 70 KD HEAT SHOCK |
| | | | | | | PROTEIN SIGNATURE |
| 1138 | PR00301B | 15.36 | 7.000e−15 | 112-124 | PR00301 | 70 KD HEAT SHOCK |
| | | | | | | PROTEIN SIGNATURE |
| 1138 | PR00301C | 8.62 | 3.903e−09 | 135-143 | PR00301 | 70 KD HEAT SHOCK |
| | | | | | | PROTEIN SIGNATURE |
| 1138 | PR00301D | 15.51 | 5.500e−27 | 219-239 | PR00301 | 70 KD HEAT SHOCK |
| | | | | | | PROTEIN SIGNATURE |
| 1138 | PR00301E | 8.11 | 1.900e−11 | 278-288 | PR00301 | 70 KD HEAT SHOCK |
| | | | | | | PROTEIN SIGNATURE |
| 1138 | PR00301F | 13.98 | 4.240e−18 | 410-426 | PR00301 | 70 KD HEAT SHOCK |
| | | | | | | PROTEIN SIGNATURE |
| 1138 | PR00301G | 13.78 | 9.609e−22 | 441-461 | PR00301 | 70 KD HEAT SHOCK |
| | | | | | | PROTEIN SIGNATURE |
| 1138 | PR00301H | 8.81 | 2.688e−22 | 464-483 | PR00301 | 70 KD HEAT SHOCK |
| | | | | | | PROTEIN SIGNATURE |
| 1138 | PR00301I | 12.76 | 7.500e−21 | 545-561 | PR00301 | 70 KD HEAT SHOCK |
| | | | | | | PROTEIN SIGNATURE |
| 1139 | BL00960A | 10.98 | 5.304e−12 | 64-75 | BL00960 | BTG1 family proteins. |
| 1139 | BL00960B | 24.47 | 1.000e−40 | 84-128 | BL00960 | BTG1 family proteins. |
| 1139 | BL00960C | 12.68 | 3.647e−26 | 148-169 | BL00960 | BTG1 family proteins. |
| 1139 | PD01234B | 15.53 | 9.679e−09 | 36-53 | PD01234 | PROTEIN NUCLEAR |
| | | | | | | BROMODOMAIN TRANS. |
| 1139 | PR00310A | 11.17 | 7.000e−27 | 66-90 | PR00310 | ANTI-PROLIFERATIVE |
| | | | | | | PROTEIN BTG1 FAMILY |
| | | | | | | SIGNATURE |
| 1139 | PR00310B | 10.59 | 4.000e−39 | 91-120 | PR00310 | ANTI-PROLIFERATIVE |
| | | | | | | PROTEIN BTG1 FAMILY |
| | | | | | | SIGNATURE |
| 1139 | PR00310C | 12.74 | 5.286e−35 | 121-150 | PR00310 | ANTI-PROLIFERATIVE |
| | | | | | | PROTEIN BTG1 FAMILY |
| | | | | | | SIGNATURE |
| 1139 | PR00310D | 9.10 | 1.540e−37 | 151-180 | PR00310 | ANTI-PROLIFERATIVE |
| | | | | | | PROTEIN BTG1 FAMILY |
| | | | | | | SIGNATURE |
| 1139 | PR00310E | 13.58 | 6.914e−24 | 197-216 | PR00310 | ANTI-PROLIFERATIVE |
| | | | | | | PROTIN BTG1 FAMILY |
| | | | | | | SIGNATURE |
| 1141 | BL00547A | 19.15 | 7.900e−22 | 89-115 | BL00547 | Transglutaminases |
| | | | | | | proteins. |
| 1141 | BL00547B | 29.05 | 1.000e−40 | 209-259 | BL00547 | Transglutaminases |
| | | | | | | proteins. |
| 1141 | BL00547C | 20.72 | 2.029e−29 | 281-318 | BL00547 | Transglutaminases |
| | | | | | | proteins. |
| 1141 | BL00547D | 20.72 | 1.000e−40 | 338-382 | BL00547 | Transglutaminases |
| | | | | | | proteins. |
| 1141 | BL00547E | 17.36 | 4.667e−37 | 396-430 | BL00547 | Transglutaminases |
| | | | | | | proteins. |
| 1141 | BL00547F | 20.84 | 9.700e−28 | 440-471 | BL00547 | Transglutaminases |
| | | | | | | proteins. |
| 1141 | BL00547G | 17.29 | 4.971e−31 | 489-526 | BL00547 | Transglutaminases |
| | | | | | | proteins. |
| 1141 | BL00547H | 14.36 | 9.471e−16 | 681-701 | BL00547 | Transglutaminases |
| | | | | | | proteins. |
| 1141 | PR00445A | 9.20 | 6.824e−09 | 356-363 | PR00445 | HUPF/HYPC HYDROGENASE |
| | | | | | | EXPRESSION/SYNTHESIS |
| | | | | | | FAMILY SIGNATURE |
| 1143 | BL00224B | 16.94 | 9.673e−09 | 589-641 | BL00224 | Clathrin light chain |
| | | | | | | proteins. |
| 1143 | BL00686 | 13.91 | 6.581e−09 | 820-868 | BL00686 | CBF-B/NF-YA subunit |
| | | | | | | proteins. |
| 1143 | PF00992A | 16.67 | 1.474e−09 | 819-853 | PF00992 | Troponin. |
| 1143 | PF00992A | 16.67 | 2.184e−09 | 798-832 | PF00992 | Troponin. |
| 1143 | PF00992A | 16.67 | 9.463e−11 | 812-846 | PF00992 | Troponin. |
| 1143 | PF00992A | 16.67 | 9.463e−11 | 853-887 | PF00992 | Troponin. |
| 1143 | PF01140D | 15.54 | 4.035e−09 | 797-831 | PF01140 | Matrix protein (MA), |
| | | | | | | p15. |
| 1143 | PF01140D | 15.54 | 6.850e−10 | 811-845 | PF01140 | Matrix protein (MA), |
| | | | | | | p15. |
| 1145 | BL00211A | 12.23 | 2.350e−09 | 122-133 | BL00211 | ABC transporters family |
| | | | | | | proteins. |
| 1145 | BL00617A | 25.53 | 7.000e−10 | 105-147 | BL00617 | RecF protein. |
| 1146 | BL00710 | 12.98 | 3.880e−16 | 182-196 | BL00710 | Phosphoglucomutase and |
| | | | | | | phosphomannomutase |
| | | | | | | phosphoserine signa. |
| 1146 | PR00509A | 14.01 | 1.964e−17 | 181-195 | PR00509 | PHOSPHOGLUCOMUTASE/ |
| | | | | | | PHOSPHOMANNOMUTASE FAMILY |
| | | | | | | SIGNATURE |
| 1146 | PR00509B | 15.05 | 7.353e−19 | 288-307 | PR00509 | PHOSPHOGLUCOMUTASE/ |
| | | | | | | PHOSPHOMANNOMUTASE FAMILY |
| | | | | | | SIGNATURE |
| 1146 | PR00509C | 9.78 | 8.875e−16 | 324-337 | PR00509 | PHOSPHOGLUCOMUTASE/ |
| | | | | | | PHOSPHOMANNOMUTASE FAMILY |
| | | | | | | SIGNATURE |
| 1146 | PR00509D | 9.21 | 3.000e−19 | 352-367 | PR00509 | PHOSPHOGLUCOMUTASE/ |
| | | | | | | PHOSPHOMANNOMUTASE FAMILY |
| | | | | | | SIGNATURE |
| 1147 | BL00415B | 9.91 | 9.206e−09 | 5-40 | BL00415 | Synapsins proteins. |
| 1150 | PR00676D | 10.15 | 9.536e−09 | 47-62 | PR00676 | MASPIN SIGNATURE |
| 1152 | BL01123D | 9.68 | 6.651e−11 | 217-232 | BL01123 | Thermonuclease family |
| | | | | | | proteins. |
| 1154 | BL00226A | 12.77 | 6.500e−16 | 133-147 | BL00226 | Intermediate filaments |
| | | | | | | proteins. |
| 1154 | BL00226B | 23.86 | 1.000e−40 | 229-276 | BL00226 | Intermediate filaments |
| | | | | | | proteins. |
| 1154 | BL00226B | 23.86 | 3.160e−11 | 180-227 | BL00226 | Intermediate filaments |
| | | | | | | proteins. |
| 1154 | BL00226C | 13.23 | 3.700e−25 | 294-324 | BL00226 | Intermediate filaments |
| | | | | | | proteins. |
| 1154 | BL00226D | 19.10 | 1.000e−40 | 395-441 | BL00226 | Intermediate filaments |
| | | | | | | proteins. |
| 1154 | BL01160B | 19.54 | 1.763e−09 | 180-233 | BL01160 | Kinesin light chain |
| | | | | | | repeat proteins. |
| 1154 | BL01312I | 22.76 | 1.758e−09 | 162-210 | BL01312 | Protein secA proteins. |
| 1155 | BL00022B | 7.54 | 1.000e−09 | 1154-1160 | BL00022 | EGF-like domain |
| | | | | | | proteins. |
| 1155 | BL00022B | 7.54 | 3.250e−10 | 1558-1564 | BL00022 | EGF-like domain |
| | | | | | | proteins. |
| 1155 | BL00240B | 24.70 | 8.660e−09 | 3622-3645 | BL00240 | Receptor tyrosine |
| | | | | | | kinase class III |
| | | | | | | proteins. |
| 1155 | BL00243H | 17.53 | 9.645e−09 | 4180-4205 | BL00243 | Integrins beta chain |
| | | | | | | cysteine-rich domain |
| | | | | | | proteins. |
| 1155 | BL00562 | 16.21 | 5.814e−09 | 4127-4157 | BL00562 | Cellulose-binding |
| | | | | | | domain proteins fungal |
| | | | | | | type. |
| 1155 | BL01209 | 9.31 | 2.174e−11 | 370-382 | BL01209 | LDL-receptor class A |
| | | | | | | (LDLRA) domain |
| | | | | | | proteins. |
| 1155 | BL01209 | 9.31 | 4.808e−10 | 414-426 | BL01209 | LDL-receptor class A |
| | | | | | | (LDLRA) domain |
| | | | | | | proteins. |
| 1155 | BL01209 | 9.31 | 6.304e−09 | 245-257 | BL01209 | LDL-receptor class A |
| | | | | | | (LDLRA) domain |
| | | | | | | proteins. |
| 1155 | BL01209 | 9.31 | 9.053e−15 | 330-342 | BL01209 | LDL-receptor class A |
| | | | | | | (LDLRA) domain |
| | | | | | | proteins. |
| 1155 | BL01248 | 11.02 | 3.829e−12 | 1206-1218 | BL01248 | Laminin-type EGF-like |
| | | | | | | (LE) domain proteins. |
| 1155 | BL01248 | 11.02 | 4.724e−13 | 811-823 | BL01248 | Laminin-type EGF-like |
| | | | | | | (LE) domain proteins. |
| 1155 | BL01248 | 11.02 | 8.650e−11 | 1610-1622 | BL01248 | Laminin-type EGF-like |
| | | | | | | (LE) domain proteins. |
| 1155 | DM00060 | 6.92 | 3.700e−10 | 1687-1696 | DM00060 | 338 kw NEUREXIN ALPHA |
| | | | | | | III CYSTEINE. |
| 1155 | DM00060 | 6.92 | 7.000e−11 | 888-897 | DM00060 | 338 kw NEUREXIN ALPHA |
| | | | | | | III CYSTEINE. |
| 1155 | DM00179 | 13.97 | 2.421e−10 | 3386-3395 | DM00179 | w KINASE ALPHA ADHESION |
| | | | | | | T-CELL. |
| 1155 | PD00320A | 14.49 | 3.455e−11 | 1586-1599 | PD00320 | LAMININ CHAIN EGF-LIKE |
| | | | | | | DOMAIN P. |
| 1155 | PD00919B | 9.47 | 8.015e−10 | 1662-1676 | PD00919 | CALCIUM-BINDING |
| | | | | | | PRECURSOR SIGNAL R. |
| 1155 | PD01270A | 17.22 | 3.903e−09 | 431-470 | PD01270 | RECEPTOR FC |
| | | | | | | IMMUNOGLOBULIN AFFIN. |
| 1155 | PD02870B | 18.83 | 3.968e−09 | 2516-2548 | PD02870 | RECEPTOR INTERLEUKIN-1 |
| | | | | | | PRECURSOR. |
| 1155 | PD02870B | 18.83 | 6.300e−10 | 1853-1885 | PD02870 | RECEPTOR INTERLEUKIN-1 |
| | | | | | | PRECURSOR. |
| 1155 | PD02870B | 18.83 | 6.400e−10 | 3198-3230 | PD02870 | RECEPTOR INTERLEUKIN-1 |
| | | | | | | PRECURSOR. |
| 1155 | PD02870B | 18.83 | 6.553e−09 | 2130-2162 | PD02870 | RECEPTOR INTERLEUKIN-1 |
| | | | | | | PRECURSOR. |
| 1155 | PD02870B | 18.83 | 6.649e−09 | 2420-2452 | PD02870 | RECEPTOR INTERLEUKIN-1 |
| | | | | | | PRECURSOR. |
| 1155 | PD02870B | 18.83 | 7.798e−09 | 1759-1791 | PD02870 | RECEPTOR INTERLEUKIN-1 |
| | | | | | | PRECURSOR. |
| 1155 | PD02870B | 18.83 | 9.000e−10 | 2613-2645 | PD02870 | RECEPTOR INTERLEUKIN-1 |
| | | | | | | PRECURSOR. |
| 1155 | PD02870B | 18.83 | 9.809e−09 | 2709-2741 | PD02870 | RECEPTOR INTERLEUKIN-1 |
| | | | | | | PRECURSOR. |
| 1155 | PD02870D | 15.74 | 1.383e−09 | 1853-1887 | PD02870 | RECEPTOR INTERLEUKIN-1 |
| | | | | | | PRECURSOR. |
| 1155 | PR00010A | 11.79 | 1.000e−08 | 4132-4143 | PR00010 | TYPE II EGF-LIKE |
| | | | | | | SIGNATURE |
| 1155 | PR00010C | 11.16 | 9.333e−11 | 3893-3903 | PR00010 | TYPE II EGF-LIKE |
| | | | | | | SIGNATURE |
| 1155 | PR00011A | 14.06 | 9.384e−09 | 1314-1332 | PR00011 | TYPE III EGF-LIKE |
| | | | | | | SIGNATURE |
| 1155 | PR00011B | 13.08 | 6.055e−09 | 1314-1332 | PR00011 | TYPE III EGF-LIKE |
| | | | | | | SIGNATURE |
| 1155 | PR00011C | 24.25 | 8.000e−09 | 920-948 | PR00011 | TYPE III EGF-LIKE |
| | | | | | | SIGNATURE |
| 1155 | PR00011C | 24.25 | 9.518e−11 | 1321-1349 | PR00011 | TYPE III EGF-LIKE |
| | | | | | | SIGNATURE |
| 1155 | PR00011D | 14.03 | 1.000e−11 | 1314-1332 | PR00011 | TYPE III EGF-LIKE |
| | | | | | | SIGNATURE |
| 1155 | PR00011D | 14.03 | 9.169e−10 | 4185-4203 | PR00011 | TYPE III EGF-LIKE |
| | | | | | | SIGNATURE |
| 1155 | PR00261A | 11.02 | 4.296e−12 | 405-426 | PR00261 | LOW DENSITY LIPOPROTEIN |
| | | | | | | (LDL) RECEPTOR |
| | | | | | | SIGNATURE |
| 1155 | PR00261A | 11.02 | 5.895e−17 | 321-342 | PR00261 | LOW DENSITY LIPOPROTEIN |
| | | | | | | (LDL) RECEPTOR |
| | | | | | | SIGNATURE |
| 1155 | PR00261A | 11.02 | 8.676e−13 | 236-257 | PR00261 | LOW DENSITY LIPOPROTEIN |
| | | | | | | (LDL) RECEPTOR |
| | | | | | | SIGNATURE |
| 1155 | PR00261A | 11.02 | 8.984e−15 | 361-382 | PR00261 | LOW DENSITY LIPOPROTEIN |
| | | | | | | (LDL) RECEPTOR |
| | | | | | | SIGNATURE |
| 1155 | PR00261B | 14.12 | 2.356e−12 | 361-382 | PR00261 | LOW DENSITY LIPOPROTEIN |
| | | | | | | (LDL) RECEPTOR |
| | | | | | | SIGNATURE |
| 1155 | PR00261B | 14.12 | 2.588e−14 | 405-426 | PR00261 | LOW DENSITY LIPOPROTEIN |
| | | | | | | (LDL) RECEPTOR |
| | | | | | | SIGNATURE |
| 1155 | PR00261B | 14.12 | 5.500e−17 | 321-342 | PR00261 | LOW DENSITY LIPOPROTEIN |
| | | | | | | (LDL) RECEPTOR |
| | | | | | | SIGNATURE |
| 1155 | PR00261B | 14.12 | 7.662e−11 | 236-257 | PR00261 | LOW DENSITY LIPOPROTEIN |
| | | | | | | (LDL) RECEPTOR |
| | | | | | | SIGNATURE |
| 1155 | PR00261C | 11.37 | 2.826e−13 | 361-382 | PR00261 | LOW DENSITY LIPOPROTEIN |
| | | | | | | (LDL) RECEPTOR |
| | | | | | | SIGNATURE |
| 1155 | PR00261C | 11.37 | 6.373e−14 | 405-426 | PR00261 | LOW DENSITY LIPOPROTEIN |
| | | | | | | (LDL) RECEPTOR |
| | | | | | | SIGNATURE |
| 1155 | PR00261C | 11.37 | 8.500e−20 | 321-342 | PR00261 | LOW DENSITY LIPOPROTEIN |
| | | | | | | (LDL) RECEPTOR |
| | | | | | | SIGNATURE |
| 1155 | PR00261C | 11.37 | 9.014e−12 | 236-257 | PR00261 | LOW DENSITY LIPOPROTEIN |
| | | | | | | (LDL) RECEPTOR |
| | | | | | | SIGNATURE |
| 1155 | PR00261D | 12.47 | 1.305e−16 | 321-342 | PR00261 | LOW DENSITY LIPOPROTEIN |
| | | | | | | (LDL) RECEPTOR |
| | | | | | | SIGNATURE |
| 1155 | PR00261D | 12.47 | 5.000e−15 | 361-382 | PR00261 | LOW DENSITY LIPOPROTEIN |
| | | | | | | (LDL) RECEPTOR |
| | | | | | | SIGNATURE |
| 1155 | PR00261D | 12.47 | 8.734e−14 | 236-257 | PR00261 | LOW DENSITY LIPOPROTEIN |
| | | | | | | (LDL) RECEPTOR |
| | | | | | | SIGNATURE |
| 1155 | PR00261D | 12.47 | 9.859e−14 | 405-426 | PR00261 | LOW DENSITY LIPOPROTEIN |
| | | | | | | (LDL) RECEPTOR |
| | | | | | | SIGNATURE |
| 1155 | PR00261E | 11.08 | 3.727e−12 | 361-382 | PR00261 | LOW DENSITY LIPOPROTEIN |
| | | | | | | (LDL) RECEPTOR |
| | | | | | | SIGNATURE |
| 1155 | PR00261E | 11.08 | 6.906e−13 | 321-342 | PR00261 | LOW DENSITY LIPOPROTEIN |
| | | | | | | (LDL) RECEPTOR |
| | | | | | | SIGNATURE |
| 1155 | PR00261E | 11.08 | 7.171e−11 | 236-257 | PR00261 | LOW DENSITY LIPOPROTEIN |
| | | | | | | (LDL) RECEPTOR |
| | | | | | | SIGNATURE |
| 1155 | PR00261E | 11.08 | 7.545e−12 | 405-426 | PR00261 | LOW DENSITY LIPOPROTEIN |
| | | | | | | (LDL) RECEPTOR |
| | | | | | | SIGNATURE |
| 1155 | PR00261F | 11.57 | 5.355e−14 | 236-257 | PR00261 | LOW DENSITY LIPOPROTEIN |
| | | | | | | (LDL) RECEPTOR |
| | | | | | | SIGNATURE |
| 1155 | PR00261F | 11.57 | 6.280e−10 | 361-382 | PR00261 | LOW DENSITY LIPOPROTEIN |
| | | | | | | (LDL) RECEPTOR |
| | | | | | | SIGNATURE |
| 1155 | PR00261F | 11.57 | 7.589e−16 | 321-342 | PR00261 | LOW DENSITY LIPOPROTEIN |
| | | | | | | (LDL) RECEPTOR |
| | | | | | | SIGNATURE |
| 1155 | PR00261F | 11.57 | 9.603e−12 | 405-426 | PR00261 | LOW DENSITY LIPOPROTEIN |
| | | | | | | (LDL) RECEPTOR |
| | | | | | | SIGNATURE |
| 1155 | PR00764B | 13.56 | 5.091e−10 | 356-376 | PR00764 | COMPLEMENT C9 SIGNATURE |
| 1155 | PR00764B | 13.56 | 5.388e−09 | 316-336 | PR00764 | COMPLEMENT C9 SIGNATURE |
| 1158 | BL00107A | 18.39 | 1.750e−26 | 324-354 | BL00107 | Protein kinases ATP- |
| | | | | | | binding region |
| | | | | | | proteins. |
| 1158 | BL00107B | 13.31 | 5.500e−11 | 389-404 | BL00107 | Protein kinases ATP- |
| | | | | | | binding region |
| | | | | | | proteins. |
| 1158 | BL00479C | 12.01 | 3.571e−11 | 368-380 | BL00479 | Phorbol esters/ |
| | | | | | | diacylglycerol binding |
| | | | | | | domain proteins. |
| 1158 | PF00564B | 24.74 | 8.329e−13 | 275-325 | PF00564 | Octicosapeptide repeat |
| | | | | | | proteins. |
| 1158 | PR00109B | 12.27 | 1.882e−12 | 324-342 | PR00109 | TYROSINE KINASE |
| | | | | | | CATALYTIC DOMAIN |
| | | | | | | SIGNATURE |
| 1163 | PD00247C | 22.11 | 2.125e−09 | 70-97 | PD00247 | POLYPROTEIN COAT |
| | | | | | | PROTEIN TRANSMEMBRANE |
| | | | | | | PRECURSOR. |
| 1163 | PR00049D | 0.00 | 2.786e−10 | 41-55 | PR00049 | WILM'S TUMOUR PROTEIN |
| | | | | | | SIGNATURE |
| 1163 | PR00049D | 0.00 | 4.356e−09 | 42-56 | PR00049 | WILM'S TUMOUR PROTEIN |
| | | | | | | SIGNATURE |
| 1163 | PR00221H | 12.82 | 7.614e−09 | 372-385 | PR00221 | CAULIMOVIRUS COAT |
| | | | | | | PROTEIN SIGNATURE |
| 1164 | BL00649B | 20.68 | 2.966e−10 | 484-529 | BL00649 | G-protein coupled |
| | | | | | | receptors family 2 |
| | | | | | | proteins. |
| 1164 | BL00649C | 17.82 | 5.255e−13 | 542-567 | BL00649 | G-protein coupled |
| | | | | | | receptors family 2 |
| | | | | | | proteins. |
| 1164 | BL00649E | 15.34 | 1.000e−08 | 624-653 | BL00649 | G-protein coupled |
| | | | | | | receptors family 2 |
| | | | | | | proteins. |
| 1164 | BL00649G | 13.52 | 5.208e−09 | 706-731 | BL00649 | G-protein coupled |
| | | | | | | receptors family 2 |
| | | | | | | proteins. |
| 1164 | BL01187A | 9.98 | 1.000e−10 | 137-148 | BL01187 | Calcium-binding EGF- |
| | | | | | | like domain proteins |
| | | | | | | pattern proteins. |
| 1164 | BL01187B | 12.04 | 1.529e−15 | 105-120 | BL01187 | Calcium-binding EGF- |
| | | | | | | like domain proteins |
| | | | | | | pattern proteins. |
| 1164 | BL01187B | 12.04 | 6.250e−17 | 156-171 | BL01187 | Calcium-binding EGF- |
| | | | | | | like domain proteins |
| | | | | | | pattern proteins. |
| 1164 | PR00010C | 11.16 | 7.214e−09 | 110-120 | PR00010 | TYPE II EGF-LIKE |
| | | | | | | SIGNATURE |
| 1164 | PR00249C | 17.08 | 5.708e−10 | 544-567 | PR00249 | SECRETIN-LIKE GPCR |
| | | | | | | SUPERFAMILY SIGNATURE |
| 1164 | PR00249D | 13.09 | 7.429e−09 | 582-607 | PR00249 | SECRETIN-LIKE GPCR |
| | | | | | | SUPERFAMILY SIGNATURE |
| 1165 | BL00216B | 27.64 | 5.000e−34 | 147-196 | BL00216 | Sugar transport |
| | | | | | | proteins. |
| 1165 | PR00171A | 10.00 | 1.429e−11 | 48-58 | PR00171 | SUGAR TRANSPORTER |
| | | | | | | SIGNATURE |
| 1165 | PR00171B | 14.73 | 3.813e−18 | 148-167 | PR00171 | SUGAR TRANSPORTER |
| | | | | | | SIGNATURE |
| 1165 | PR00171C | 10.97 | 3.143e−13 | 307-317 | PR00171 | SUGAR TRANSPORTER |
| | | | | | | SIGNATURE |
| 1165 | PR00171D | 12.76 | 7.750e−20 | 394-415 | PR00171 | SUGAR TRANSPORTER |
| | | | | | | SIGNATURE |
| 1165 | PR00171E | 14.87 | 2.800e−11 | 417-429 | PR00171 | SUGAR TRANSPORTER |
| | | | | | | SIGNATURE |
| 1165 | PR00172A | 9.82 | 5.091e−26 | 297-318 | PR00172 | GLUCOSE TRANSPORTER |
| | | | | | | SIGNATURE |
| 1165 | PR00172B | 8.42 | 9.500e−24 | 332-353 | PR00172 | GLUCOSE TRANSPORTER |
| | | | | | | SIGNATURE |
| 1165 | PR00172C | 9.51 | 5.000e−22 | 363-383 | PR00172 | GLUCOSE TRANSPORTER |
| | | | | | | SIGNATURE |
| 1165 | PR00172D | 9.13 | 6.824e−28 | 394-417 | PR00172 | GLUCOSE TRANSPORTER |
| | | | | | | SIGNATURE |
| 1165 | PR00172E | 8.29 | 2.500e−23 | 427-445 | PR00172 | GLUCOSE TRANSPORTER |
| | | | | | | SIGNATURE |
| 1165 | PR00172F | 8.47 | 7.750e−24 | 457-477 | PR00172 | GLUCOSE TRANSPORTER |
| | | | | | | SIGNATURE |
| 1167 | PD00301A | 10.24 | 1.000e−08 | 277-287 | PD00301 | PROTEIN REPEAT MUSCLE |
| | | | | | | CALCIUM-BI. |
| 1168 | BL00218D | 21.49 | 7.324e−11 | 274-318 | BL00218 | Amino acid permeases |
| | | | | | | proteins. |
| 1168 | BL00218E | 23.30 | 3.475e−09 | 355-394 | BL00218 | Amino acid permeases |
| | | | | | | proteins. |
| 1170 | PD00301A | 10.24 | 6.400e−09 | 73-83 | PD00301 | PROTEIN REPEAT MUSCLE |
| | | | | | | CALCIUM-BI. |
| 1170 | PR00049D | 0.00 | 8.627e−09 | 175-189 | PR00049 | WILM'S TUMOUR PROTEIN |
| | | | | | | SIGNATURE |
| 1172 | BL00453A | 15.57 | 1.000e−16 | 56-70 | BL00453 | FKBP-type peptidyl- |
| | | | | | | prolyl cis-trans |
| | | | | | | isomerase proteins. |
| 1172 | BL00453B | 23.86 | 7.231e−26 | 81-114 | BL00453 | FKBP-type peptidyl- |
| | | | | | | prolyl cis-trans |
| | | | | | | isomerase proteins. |
| 1172 | BL00453C | 9.72 | 4.214e−13 | 122-134 | BL00453 | FKBP-type peptidyl- |
| | | | | | | prolyl cis-trans |
| | | | | | | isomerase proteins. |
| 1176 | BL00136A | 14.35 | 1.720e−11 | 177-189 | BL00136 | Serine proteases, |
| | | | | | | subtilase family, |
| | | | | | | aspartic acid proteins. |
| 1176 | BL00136B | 9.63 | 2.500e−12 | 218-230 | BL00136 | Serine proteases, |
| | | | | | | subtilase family, |
| | | | | | | aspartic acid proteins. |
| 1176 | BL00136C | 8.52 | 9.609e−11 | 392-402 | BL00136 | Serine proteases, |
| | | | | | | subtilase family, |
| | | | | | | aspartic acid proteins. |
| 1176 | PR00723A | 13.37 | 5.200e−17 | 170-189 | PR00723 | SUBTILISIN SERINE |
| | | | | | | PROTEASE FAMILY (S8) |
| | | | | | | SIGNATURE |
| 1176 | PR00723B | 11.22 | 5.050e−13 | 216-229 | PR00723 | SUBTILISIN SERINE |
| | | | | | | PROTEASE FAMILY (S8) |
| | | | | | | SIGNATURE |
| 1176 | PR00723C | 10.64 | 2.929e−13 | 391-407 | PR00723 | SUBTILISIN SERINE |
| | | | | | | PROTEASE FAMILY (S8) |
| | | | | | | SIGNATURE |
| 1182 | BL00420A | 20.42 | 1.138e−09 | 505-533 | BL00420 | Speract receptor repeat |
| | | | | | | proteins domain |
| | | | | | | proteins. |
| 1182 | BL00420A | 20.42 | 1.148e−10 | 1129-1157 | BL00420 | Speract receptor repeat |
| | | | | | | proteins domain |
| | | | | | | proteins. |
| 1182 | BL00420A | 20.42 | 1.173e−12 | 1564-1592 | BL00420 | Speract receptor repeat |
| | | | | | | proteins domain |
| | | | | | | proteins. |
| 1182 | BL00420A | 20.42 | 1.554e−09 | 1069-1097 | BL00420 | Speract receptor repeat |
| | | | | | | proteins domain |
| | | | | | | proteins. |
| 1182 | BL00420A | 20.42 | 1.554e−09 | 928-956 | BL00420 | Speract receptor repeat |
| | | | | | | proteins domain |
| | | | | | | proteins. |
| 1182 | BL00420A | 20.42 | 1.692e−09 | 1507-1535 | BL00420 | Speract receptor repeat |
| | | | | | | proteins domain |
| | | | | | | proteins. |
| 1182 | BL00420A | 20.42 | 1.692e−09 | 1558-1586 | BL00420 | Speract receptor repeat |
| | | | | | | proteins domain |
| | | | | | | proteins. |
| 1182 | BL00420A | 20.42 | 1.738e−10 | 1087-1115 | BL00420 | Speract receptor repeat |
| | | | | | | proteins domain |
| | | | | | | proteins. |
| 1182 | BL00420A | 20.42 | 1.918e−13 | 1378-1406 | BL00420 | Speract receptor repeat |
| | | | | | | proteins domain |
| | | | | | | proteins. |
| 1182 | BL00420A | 20.42 | 1.969e−09 | 1423-1451 | BL00420 | Speract receptor repeat |
| | | | | | | proteins domain |
| | | | | | | proteins. |
| 1182 | BL00420A | 20.42 | 2.328e−10 | 1252-1280 | BL00420 | Speract receptor repeat |
| | | | | | | proteins domain |
| | | | | | | proteins. |
| 1182 | BL00420A | 20.42 | 2.328e−10 | 1297-1325 | BL00420 | Speract receptor repeat |
| | | | | | | proteins domain |
| | | | | | | proteins. |
| 1182 | BL00420A | 20.42 | 2.385e−09 | 655-683 | BL00420 | Speract receptor repeat |
| | | | | | | proteins domain |
| | | | | | | proteins. |
| 1182 | BL00420A | 20.42 | 2.385e−12 | 1294-1322 | BL00420 | Speract receptor repeat |
| | | | | | | proteins domain |
| | | | | | | proteins. |
| 1182 | BL00420A | 20.42 | 2.475e−10 | 1486-1514 | BL00420 | Speract receptor repeat |
| | | | | | | proteins domain |
| | | | | | | proteins. |
| 1182 | BL00420A | 20.42 | 2.523e−09 | 1126-1154 | BL00420 | Speract receptor repeat |
| | | | | | | proteins domain |
| | | | | | | proteins. |
| 1182 | BL00420A | 20.42 | 2.623e−10 | 1057-1085 | BL00420 | Speract receptor repeat |
| | | | | | | proteins domain |
| | | | | | | proteins. |
| 1182 | BL00420A | 20.42 | 2.662e−09 | 673-701 | BL00420 | Speract receptor repeat |
| | | | | | | proteins domain |
| | | | | | | proteins. |
| 1182 | BL00420A | 20.42 | 2.918e−10 | 754-782 | BL00420 | Speract receptor repeat |
| | | | | | | proteins domain |
| | | | | | | proteins. |
| 1182 | BL00420A | 20.42 | 3.213e−10 | 1420-1448 | BL00420 | Speract receptor repeat |
| | | | | | | proteins domain |
| | | | | | | proteins. |
| 1182 | BL00420A | 20.42 | 3.492e−09 | 1009-1037 | BL00420 | Speract receptor repeat |
| | | | | | | proteins domain |
| | | | | | | proteins. |
| 1182 | BL00420A | 20.42 | 3.631e−09 | 670-698 | BL00420 | Speract receptor repeat |
| | | | | | | proteins domain |
| | | | | | | proteins. |
| 1182 | BL00420A | 20.42 | 3.769e−09 | 1459-1487 | BL00420 | Speract receptor repeat |
| | | | | | | proteins domain |
| | | | | | | proteins. |
| 1182 | BL00420A | 20.42 | 3.945e−11 | 922-950 | BL00420 | Speract receptor repeat |
| | | | | | | proteins domain |
| | | | | | | proteins. |
| 1182 | BL00420A | 20.42 | 3.951e−10 | 1579-1607 | BL00420 | Speract receptor repeat |
| | | | | | | proteins domain |
| | | | | | | proteins. |
| 1182 | BL00420A | 20.42 | 4.046e−09 | 1339-1367 | BL00420 | Speract receptor repeat |
| | | | | | | proteins domain |
| | | | | | | proteins. |
| 1182 | BL00420A | 20.42 | 4.246e−10 | 1555-1583 | BL00420 | Speract receptor repeat |
| | | | | | | proteins domain |
| | | | | | | proteins. |
| 1182 | BL00420A | 20.42 | 4.635e−12 | 787-815 | BL00420 | Speract receptor repeat |
| | | | | | | proteins domain |
| | | | | | | proteins. |
| 1182 | BL00420A | 20.42 | 4.689e−10 | 871-899 | BL00420 | Speract receptor repeat |
| | | | | | | proteins domain |
| | | | | | | proteins. |
| 1182 | BL00420A | 20.42 | 4.836e−10 | 820-848 | BL00420 | Speract receptor repeat |
| | | | | | | proteins domain |
| | | | | | | proteins. |
| 1182 | BL00420A | 20.42 | 4.984e−10 | 1489-1517 | BL00420 | Speract receptor repeat |
| | | | | | | proteins domain |
| | | | | | | proteins. |
| 1182 | BL00420A | 20.42 | 4.984e−10 | 796-824 | BL00420 | Speract receptor repeat |
| | | | | | | proteins domain |
| | | | | | | proteins. |
| 1182 | BL00420A | 20.42 | 5.154e−12 | 817-845 | BL00420 | Speract receptor repeat |
| | | | | | | proteins domain |
| | | | | | | proteins. |
| 1182 | BL00420A | 20.42 | 5.292e−09 | 838-866 | BL00420 | Speract receptor repeat |
| | | | | | | proteins domain |
| | | | | | | proteins. |
| 1182 | BL00420A | 20.42 | 5.431e−09 | 1183-1211 | BL00420 | Speract receptor repeat |
| | | | | | | proteins domain |
| | | | | | | proteins. |
| 1182 | BL00420A | 20.42 | 5.569e−09 | 1093-1121 | BL00420 | Speract receptor repeat |
| | | | | | | proteins domain |
| | | | | | | proteins. |
| 1182 | BL00420A | 20.42 | 5.574e−10 | 724-752 | BL00420 | Speract receptor repeat |
| | | | | | | proteins domain |
| | | | | | | proteins. |
| 1182 | BL00420A | 20.42 | 5.574e−10 | 751-779 | BL00420 | Speract receptor repeat |
| | | | | | | proteins domain |
| | | | | | | proteins. |
| 1182 | BL00420A | 20.42 | 5.721e−10 | 1567-1595 | BL00420 | Speract receptor repeat |
| | | | | | | proteins domain |
| | | | | | | proteins. |
| 1182 | BL00420A | 20.42 | 5.745e−11 | 994-1022 | BL00420 | Speract receptor repeat |
| | | | | | | proteins domain |
| | | | | | | proteins. |
| 1182 | BL00420A | 20.42 | 5.846e−12 | 991-1019 | BL00420 | Speract receptor repeat |
| | | | | | | proteins domain |
| | | | | | | proteins. |
| 1182 | BL00420A | 20.42 | 5.869e−10 | 1372-1400 | BL00420 | Speract receptor repeat |
| | | | | | | proteins domain |
| | | | | | | proteins. |
| 1182 | BL00420A | 20.42 | 5.985e−09 | 1012-1040 | BL00420 | Speract receptor repeat |
| | | | | | | proteins domain |
| | | | | | | proteins. |
| 1182 | BL00420A | 20.42 | 6.459e−10 | 1045-1073 | BL00420 | Speract receptor repeat |
| | | | | | | proteins domain |
| | | | | | | proteins. |
| 1182 | BL00420A | 20.42 | 6.607e−10 | 805-833 | BL00420 | Speract receptor repeat |
| | | | | | | proteins domain |
| | | | | | | proteins. |
| 1182 | BL00420A | 20.42 | 6.677e−09 | 958-986 | BL00420 | Speract receptor repeat |
| | | | | | | proteins domain |
| | | | | | | proteins. |
| 1182 | BL00420A | 20.42 | 6.815e−09 | 1369-1397 | BL00420 | Speract receptor repeat |
| | | | | | | proteins domain |
| | | | | | | proteins. |
| 1182 | BL00420A | 20.42 | 6.815e−09 | 1471-1499 | BL00420 | Speract receptor repeat |
| | | | | | | proteins domain |
| | | | | | | proteins. |
| 1182 | BL00420A | 20.42 | 6.815e−09 | 895-923 | BL00420 | Speract receptor repeat |
| | | | | | | proteins domain |
| | | | | | | proteins. |
| 1182 | BL00420A | 20.42 | 6.885e−12 | 1321-1349 | BL00420 | Speract receptor repeat |
| | | | | | | proteins domain |
| | | | | | | proteins. |
| 1182 | BL00420A | 20.42 | 6.954e−09 | 1483-1511 | BL00420 | Speract receptor repeat |
| | | | | | | proteins domain |
| | | | | | | proteins. |
| 1182 | BL00420A | 20.42 | 7.049e−10 | 1180-1208 | BL00420 | Speract receptor repeat |
| | | | | | | proteins domain |
| | | | | | | proteins. |
| 1182 | BL00420A | 20.42 | 7.049e−10 | 847-875 | BL00420 | Speract receptor repeat |
| | | | | | | proteins domain |
| | | | | | | proteins. |
| 1182 | BL00420A | 20.42 | 7.055e−11 | 1504-1532 | BL00420 | Speract receptor repeat |
| | | | | | | proteins domain |
| | | | | | | proteins. |
| 1182 | BL00420A | 20.42 | 7.218e−11 | 1315-1343 | BL00420 | Speract receptor repeat |
| | | | | | | proteins domain |
| | | | | | | proteins. |
| 1182 | BL00420A | 20.42 | 7.231e−09 | 1285-1313 | BL00420 | Speract receptor repeat |
| | | | | | | proteins domain |
| | | | | | | proteins. |
| 1182 | BL00420A | 20.42 | 7.231e−09 | 850-878 | BL00420 | Speract receptor repeat |
| | | | | | | proteins domain |
| | | | | | | proteins. |
| 1182 | BL00420A | 20.42 | 7.245e−13 | 1099-1127 | BL00420 | Speract receptor repeat |
| | | | | | | proteins domain |
| | | | | | | proteins. |
| 1182 | BL00420A | 20.42 | 7.369e−09 | 1162-1190 | BL00420 | Speract receptor repeat |
| | | | | | | proteins domain |
| | | | | | | proteins. |
| 1182 | BL00420A | 20.42 | 7.369e−09 | 634-662 | BL00420 | Speract receptor repeat |
| | | | | | | proteins domain |
| | | | | | | proteins. |
| 1182 | BL00420A | 20.42 | 7.429e−13 | 1249-1277 | BL00420 | Speract receptor repeat |
| | | | | | | proteins domain |
| | | | | | | proteins. |
| 1182 | BL00420A | 20.42 | 7.492e−10 | 721-749 | BL00420 | Speract receptor repeat |
| | | | | | | proteins domain |
| | | | | | | proteins. |
| 1182 | BL00420A | 20.42 | 7.785e−09 | 1048-1076 | BL00420 | Speract receptor repeat |
| | | | | | | proteins domain |
| | | | | | | proteins. |
| 1182 | BL00420A | 20.42 | 7.785e−09 | 748-776 | BL00420 | Speract receptor repeat |
| | | | | | | proteins domain |
| | | | | | | proteins. |
| 1182 | BL00420A | 20.42 | 7.934e−10 | 904-932 | BL00420 | Speract receptor repeat |
| | | | | | | proteins domain |
| | | | | | | proteins. |
| 1182 | BL00420A | 20.42 | 8.062e−09 | 1171-1199 | BL00420 | Speract receptor repeat |
| | | | | | | proteins domain |
| | | | | | | proteins. |
| 1182 | BL00420A | 20.42 | 8.338e−09 | 1522-1550 | BL00420 | Speract receptor repeat |
| | | | | | | proteins domain |
| | | | | | | proteins. |
| 1182 | BL00420A | 20.42 | 8.377e−10 | 1132-1160 | BL00420 | Speract receptor repeat |
| | | | | | | proteins domain |
| | | | | | | proteins. |
| 1182 | BL00420A | 20.42 | 8.615e−09 | 1117-1145 | BL00420 | Speract receptor repeat |
| | | | | | | proteins domain |
| | | | | | | proteins. |
| 1182 | BL00420A | 20.42 | 8.615e−09 | 1306-1334 | BL00420 | Speract receptor repeat |
| | | | | | | proteins domain |
| | | | | | | proteins. |
| 1182 | BL00420A | 20.42 | 8.672e−10 | 1270-1298 | BL00420 | Speract receptor repeat |
| | | | | | | proteins domain |
| | | | | | | proteins. |
| 1182 | BL00420A | 20.42 | 8.691e−11 | 1375-1403 | BL00420 | Speract receptor repeat |
| | | | | | | proteins domain |
| | | | | | | proteins. |
| 1182 | BL00420A | 20.42 | 8.754e−09 | 529-557 | BL00420 | Speract receptor repeat |
| | | | | | | proteins domain |
| | | | | | | proteins. |
| 1182 | BL00420A | 20.42 | 8.967e−10 | 1492-1520 | BL00420 | Speract receptor repeat |
| | | | | | | proteins domain |
| | | | | | | proteins. |
| 1182 | BL00420A | 20.42 | 9.031e−09 | 1156-1184 | BL00420 | Speract receptor repeat |
| | | | | | | proteins domain |
| | | | | | | proteins. |
| 1182 | BL00420A | 20.42 | 9.031e−09 | 931-959 | BL00420 | Speract receptor repeat |
| | | | | | | proteins domain |
| | | | | | | proteins. |
| 1182 | BL00420A | 20.42 | 9.115e−10 | 781-809 | BL00420 | Speract receptor repeat |
| | | | | | | proteins domain |
| | | | | | | proteins. |
| 1182 | BL00420A | 20.42 | 9.115e−10 | 910-938 | BL00420 | Speract receptor repeat |
| | | | | | | proteins domain |
| | | | | | | proteins. |
| 1182 | BL00420A | 20.42 | 9.169e−09 | 925-953 | BL00420 | Speract receptor repeat |
| | | | | | | proteins domain |
| | | | | | | proteins. |
| 1182 | BL00420A | 20.42 | 9.182e−11 | 1414-1442 | BL00420 | Speract receptor repeat |
| | | | | | | proteins domain |
| | | | | | | proteins. |
| 1182 | BL00420A | 20.42 | 9.262e−10 | 1411-1439 | BL00420 | Speract receptor repeat |
| | | | | | | proteins domain |
| | | | | | | proteins. |
| 1182 | BL00420A | 20.42 | 9.446e−09 | 1402-1430 | BL00420 | Speract receptor repeat |
| | | | | | | proteins domain |
| | | | | | | proteins. |
| 1182 | BL00420A | 20.42 | 9.449e−13 | 1318-1346 | BL00420 | Speract receptor repeat |
| | | | | | | proteins domain |
| | | | | | | proteins. |
| 1182 | BL00420A | 20.42 | 9.585e−09 | 1123-1151 | BL00420 | Speract receptor repeat |
| | | | | | | proteins domain |
| | | | | | | proteins. |
| 1182 | BL00420A | 20.42 | 9.585e−09 | 637-665 | BL00420 | Speract receptor repeat |
| | | | | | | proteins domain |
| | | | | | | proteins. |
| 1182 | BL00420A | 20.42 | 9.705e−10 | 919-947 | BL00420 | Speract receptor repeat |
| | | | | | | proteins domain |
| | | | | | | proteins. |
| 1182 | BL00420A | 20.42 | 9.723e−09 | 1477-1505 | BL00420 | Speract receptor repeat |
| | | | | | | proteins domain |
| | | | | | | proteins. |
| 1182 | BL00420A | 20.42 | 9.852e−10 | 526-554 | BL00420 | Speract receptor repeat |
| | | | | | | proteins domain |
| | | | | | | proteins. |
| 1182 | BL00420A | 20.42 | 9.862e−09 | 649-677 | BL00420 | Speract receptor repeat |
| | | | | | | proteins domain |
| | | | | | | proteins. |
| 1182 | BL00604F | 5.96 | 7.020e−09 | 1433-1477 | BL00604 | Synaptophysin/ |
| | | | | | | synaptoporin proteins. |
| 1182 | BL01113A | 17.99 | 1.000e−09 | 1123-1149 | BL01113 | c1q domain proteins. |
| 1182 | BL01113A | 17.99 | 1.000e−09 | 1405-1431 | BL01113 | c1q domain proteins. |
| 1182 | BL01113A | 17.99 | 1.000e−10 | 1396-1422 | BL01113 | C1q domain proteins. |
| 1182 | BL01113A | 17.99 | 1.000e−10 | 514-540 | BL01113 | c1q domain proteins. |
| 1182 | BL01113A | 17.99 | 1.191e−10 | 730-756 | BL01113 | c1q domain proteins. |
| 1182 | BL01113A | 17.99 | 1.231e−12 | 1492-1518 | BL01113 | c1q domain proteins. |
| 1182 | BL01113A | 17.99 | 1.243e−13 | 1177-1203 | BL01113 | c1q domain proteins. |
| 1182 | BL01113A | 17.99 | 1.519e−09 | 886-912 | BL01113 | c1q domain proteins. |
| 1182 | BL01113A | 17.99 | 1.545e−14 | 1138-1164 | BL01113 | c1q domain proteins. |
| 1182 | BL01113A | 17.99 | 1.614e−11 | 640-666 | BL01113 | c1q domain proteins. |
| 1182 | BL01113A | 17.99 | 1.614e−11 | 805-831 | BL01113 | c1q domain proteins. |
| 1182 | BL01113A | 17.99 | 1.614e−11 | 985-1011 | BL01113 | c1q domain proteins. |
| 1182 | BL01113A | 17.99 | 1.818e−11 | 751-777 | BL01113 | c1q domain proteins. |
| 1182 | BL01113A | 17.99 | 1.865e−09 | 523-549 | BL01113 | c1q domain proteins. |
| 1182 | BL01113A | 17.99 | 1.865e−09 | 979-1005 | BL01113 | c1q domain proteins. |
| 1182 | BL01113A | 17.99 | 1.923e−12 | 1387-1413 | BL01113 | c1q domain proteins. |
| 1182 | BL01113A | 17.99 | 1.957e−10 | 535-561 | BL01113 | c1q domain proteins. |
| 1182 | BL01113A | 17.99 | 1.957e−10 | 655-681 | BL01113 | c1q domain proteins. |
| 1182 | BL01113A | 17.99 | 2.023e−11 | 715-741 | BL01113 | c1q domain proteins. |
| 1182 | BL01113A | 17.99 | 2.038e−09 | 718-744 | BL01113 | c1q domain proteins. |
| 1182 | BL01113A | 17.99 | 2.216e−13 | 1372-1398 | BL01113 | c1q domain proteins. |
| 1182 | BL01113A | 17.99 | 2.385e−09 | 1450-1476 | BL01113 | c1q domain proteins. |
| 1182 | BL01113A | 17.99 | 2.452e−15 | 673-699 | BL01113 | c1q domain proteins. |
| 1182 | BL01113A | 17.99 | 2.459e−13 | 1225-1251 | BL01113 | c1q domain proteins. |
| 1182 | BL01113A | 17.99 | 2.532e−10 | 1084-1110 | BL01113 | c1q domain proteins. |
| 1182 | BL01113A | 17.99 | 2.532e−10 | 1468-1494 | BL01113 | c1q domain proteins. |
| 1182 | BL01113A | 17.99 | 2.532e−10 | 754-780 | BL01113 | c1q domain proteins. |
| 1182 | BL01113A | 17.99 | 2.558e−09 | 712-738 | BL01113 | c1q domain proteins. |
| 1182 | BL01113A | 17.99 | 2.558e−09 | 811-837 | BL01113 | c1q domain proteins. |
| 1182 | BL01113A | 17.99 | 2.636e−11 | 1048-1074 | BL01113 | c1q domain proteins. |
| 1182 | BL01113A | 17.99 | 2.723e−10 | 1561-1587 | BL01113 | c1q domain proteins. |
| 1182 | BL01113A | 17.99 | 2.731e−09 | 1108-1134 | BL01113 | c1q domain proteins. |
| 1182 | BL01113A | 17.99 | 2.915e−10 | 1081-1107 | BL01113 | c1q domain proteins. |
| 1182 | BL01113A | 17.99 | 3.045e−11 | 727-753 | BL01113 | c1q domain proteins. |
| 1182 | BL01113A | 17.99 | 3.298e−10 | 1585-1611 | BL01113 | c1q domain proteins. |
| 1182 | BL01113A | 17.99 | 3.298e−10 | 1594-1620 | BL01113 | c1q domain proteins. |
| 1182 | BL01113A | 17.99 | 3.432e−13 | 787-813 | BL01113 | c1q domain proteins. |
| 1182 | BL01113A | 17.99 | 3.455e−11 | 922-948 | BL01113 | c1q domain proteins. |
| 1182 | BL01113A | 17.99 | 3.455e−14 | 1555-1581 | BL01113 | c1q domain proteins. |
| 1182 | BL01113A | 17.99 | 3.489e−10 | 688-714 | BL01113 | c1q domain proteins. |
| 1182 | BL01113A | 17.99 | 3.596e−09 | 1411-1437 | BL01113 | c1q domain proteins. |
| 1182 | BL01113A | 17.99 | 3.596e−09 | 685-711 | BL01113 | c1q domain proteins. |
| 1182 | BL01113A | 17.99 | 3.596e−09 | 739-765 | BL01113 | c1q domain proteins. |
| 1182 | BL01113A | 17.99 | 3.769e−09 | 1117-1143 | BL01113 | c1q domain proteins. |
| 1182 | BL01113A | 17.99 | 3.769e−09 | 517-543 | BL01113 | C1q domain proteins. |
| 1182 | BL01113A | 17.99 | 3.769e−09 | 736-762 | BL01113 | C1q domain proteins. |
| 1182 | BL01113A | 17.99 | 3.872e−10 | 724-750 | BL01113 | C1q domain proteins. |
| 1182 | BL01113A | 17.99 | 3.942e−09 | 1384-1410 | BL01113 | C1q domain proteins. |
| 1182 | BL01113A | 17.99 | 3.942e−09 | 1414-1440 | BL01113 | C1q domain proteins. |
| 1182 | BL01113A | 17.99 | 4.064e−10 | 1051-1077 | BL01113 | C1q domain proteins. |
| 1182 | BL01113A | 17.99 | 4.068e−11 | 931-957 | BL01113 | C1q domain proteins. |
| 1182 | BL01113A | 17.99 | 4.255e−10 | 1375-1401 | BL01113 | C1q domain proteins. |
| 1182 | BL01113A | 17.99 | 4.288e−09 | 625-651 | BL01113 | C1q domain proteins. |
| 1182 | BL01113A | 17.99 | 4.447e−10 | 1480-1506 | BL01113 | C1q domain proteins. |
| 1182 | BL01113A | 17.99 | 4.447e−10 | 1570-1596 | BL01113 | C1q domain proteins. |
| 1182 | BL01113A | 17.99 | 4.462e−12 | 1000-1026 | BL01113 | C1q domain proteins. |
| 1182 | BL01113A | 17.99 | 4.462e−12 | 1249-1275 | BL01113 | C1q domain proteins. |
| 1182 | BL01113A | 17.99 | 4.462e−12 | 895-921 | BL01113 | C1q domain proteins. |
| 1182 | BL01113A | 17.99 | 4.477e−11 | 1318-1344 | BL01113 | C1q domain proteins. |
| 1182 | BL01113A | 17.99 | 4.635e−09 | 1027-1053 | BL01113 | C1q domain proteins. |
| 1182 | BL01113A | 17.99 | 4.635e−09 | 1255-1281 | BL01113 | C1q domain proteins. |
| 1182 | BL01113A | 17.99 | 4.635e−09 | 601-627 | BL01113 | C1q domain proteins. |
| 1182 | BL01113A | 17.99 | 4.808e−09 | 1279-1305 | BL01113 | C1q domain proteins. |
| 1182 | BL01113A | 17.99 | 4.830e−10 | 1057-1083 | BL01113 | C1q domain proteins. |
| 1182 | BL01113A | 17.99 | 4.830e−10 | 1312-1338 | BL01113 | C1q domain proteins. |
| 1182 | BL01113A | 17.99 | 4.830e−10 | 595-621 | BL01113 | C1q domain proteins. |
| 1182 | BL01113A | 17.99 | 4.830e−10 | 742-768 | BL01113 | C1q domain proteins. |
| 1182 | BL01113A | 17.99 | 4.886e−11 | 1267-1293 | BL01113 | C1q domain proteins. |
| 1182 | BL01113A | 17.99 | 4.892e−13 | 796-822 | BL01113 | C1q domain proteins. |
| 1182 | BL01113A | 17.99 | 4.923e−12 | 814-840 | BL01113 | C1q domain proteins. |
| 1182 | BL01113A | 17.99 | 4.981e−09 | 1213-1239 | BL01113 | C1q domain proteins. |
| 1182 | BL01113A | 17.99 | 5.021e−10 | 907-933 | BL01113 | C1q domain proteins. |
| 1182 | BL01113A | 17.99 | 5.091e−11 | 1489-1515 | BL01113 | C1q domain proteins. |
| 1182 | BL01113A | 17.99 | 5.154e−09 | 1321-1347 | BL01113 | C1q domain proteins. |
| 1182 | BL01113A | 17.99 | 5.154e−09 | 1429-1455 | BL01113 | C1q domain proteins. |
| 1182 | BL01113A | 17.99 | 5.295e−11 | 1045-1071 | BL01113 | C1q domain proteins. |
| 1182 | BL01113A | 17.99 | 5.295e−11 | 1369-1395 | BL01113 | C1q domain proteins. |
| 1182 | BL01113A | 17.99 | 5.295e−11 | 1558-1584 | BL01113 | C1q domain proteins. |
| 1182 | BL01113A | 17.99 | 5.378e−13 | 1303-1329 | BL01113 | C1q domain proteins. |
| 1182 | BL01113A | 17.99 | 5.378e−13 | 1357-1383 | BL01113 | C1q domain proteins. |
| 1182 | BL01113A | 17.99 | 5.385e−12 | 1354-1380 | BL01113 | C1q domain proteins. |
| 1182 | BL01113A | 17.99 | 5.385e−12 | 529-555 | BL01113 | C1q domain proteins. |
| 1182 | BL01113A | 17.99 | 5.404e−10 | 1063-1089 | BL01113 | C1q domain proteins. |
| 1182 | BL01113A | 17.99 | 5.500e−09 | 1135-1161 | BL01113 | C1q domain proteins. |
| 1182 | BL01113A | 17.99 | 5.500e−09 | 898-924 | BL01113 | C1q domain proteins. |
| 1182 | BL01113A | 17.99 | 5.615e−12 | 1477-1503 | BL01113 | C1q domain proteins. |
| 1182 | BL01113A | 17.99 | 5.622e−13 | 766-792 | BL01113 | C1q domain proteins. |
| 1182 | BL01113A | 17.99 | 5.636e−14 | 1564-1590 | BL01113 | C1q domain proteins. |
| 1182 | BL01113A | 17.99 | 5.705e−11 | 781-807 | BL01113 | C1q domain proteins. |
| 1182 | BL01113A | 17.99 | 5.787e−10 | 604-630 | BL01113 | C1q domain proteins. |
| 1182 | BL01113A | 17.99 | 5.846e−09 | 1285-1311 | BL01113 | C1q domain proteins. |
| 1182 | BL01113A | 17.99 | 6.019e−09 | 823-849 | BL01113 | C1q domain proteins. |
| 1182 | BL01113A | 17.99 | 6.114e−11 | 1348-1374 | BL01113 | C1q domain proteins. |
| 1182 | BL01113A | 17.99 | 6.182e−14 | 1495-1521 | BL01113 | C1q domain proteins. |
| 1182 | BL01113A | 17.99 | 6.192e−09 | 1402-1428 | BL01113 | C1q domain proteins. |
| 1182 | BL01113A | 17.99 | 6.365e−09 | 904-930 | BL01113 | C1q domain proteins. |
| 1182 | BL01113A | 17.99 | 6.455e−14 | 994-1020 | BL01113 | C1q domain proteins. |
| 1182 | BL01113A | 17.99 | 6.538e−09 | 1186-1212 | BL01113 | C1q domain proteins. |
| 1182 | BL01113A | 17.99 | 6.538e−09 | 772-798 | BL01113 | C1q domain proteins. |
| 1182 | BL01113A | 17.99 | 6.553e−10 | 1453-1479 | BL01113 | C1q domain proteins. |
| 1182 | BL01113A | 17.99 | 6.553e−10 | 709-735 | BL01113 | C1q domain proteins. |
| 1182 | BL01113A | 17.99 | 6.595e−13 | 721-747 | BL01113 | C1q domain proteins. |
| 1182 | BL01113A | 17.99 | 6.712e−09 | 1501-1527 | BL01113 | C1q domain proteins. |
| 1182 | BL01113A | 17.99 | 6.727e−11 | 508-534 | BL01113 | C1q domain proteins. |
| 1182 | BL01113A | 17.99 | 6.769e−12 | 790-816 | BL01113 | C1q domain proteins. |
| 1182 | BL01113A | 17.99 | 7.000e−12 | 1129-1155 | BL01113 | C1q domain proteins. |
| 1182 | BL01113A | 17.99 | 7.058e−09 | 1519-1545 | BL01113 | C1q domain proteins. |
| 1182 | BL01113A | 17.99 | 7.058e−09 | 901-927 | BL01113 | C1q domain proteins. |
| 1182 | BL01113A | 17.99 | 7.058e−09 | 910-936 | BL01113 | C1q domain proteins. |
| 1182 | BL01113A | 17.99 | 7.081e−13 | 682-708 | BL01113 | C1q domain proteins. |
| 1182 | BL01113A | 17.99 | 7.128e−10 | 1327-1353 | BL01113 | C1q domain proteins. |
| 1182 | BL01113A | 17.99 | 7.136e−11 | 1423-1449 | BL01113 | C1q domain proteins. |
| 1182 | BL01113A | 17.99 | 7.231e−09 | 619-645 | BL01113 | C1q domain proteins. |
| 1182 | BL01113A | 17.99 | 7.231e−09 | 703-729 | BL01113 | C1q domain proteins. |
| 1182 | BL01113A | 17.99 | 7.273e−14 | 1297-1323 | BL01113 | C1q domain proteins. |
| 1182 | BL01113A | 17.99 | 7.341e−11 | 1258-1284 | BL01113 | C1q domain proteins. |
| 1182 | BL01113A | 17.99 | 7.341e−11 | 610-636 | BL01113 | C1q domain proteins. |
| 1182 | BL01113A | 17.99 | 7.387e−15 | 1363-1389 | BL01113 | C1q domain proteins. |
| 1182 | BL01113A | 17.99 | 7.511e−10 | 1054-1080 | BL01113 | C1q domain proteins. |
| 1182 | BL01113A | 17.99 | 7.511e−10 | 1075-1101 | BL01113 | C1q domain proteins. |
| 1182 | BL01113A | 17.99 | 7.545e−11 | 1420-1446 | BL01113 | C1q domain proteins. |
| 1182 | BL01113A | 17.99 | 7.545e−11 | 1459-1485 | BL01113 | C1q domain proteins. |
| 1182 | BL01113A | 17.99 | 7.545e−11 | 784-810 | BL01113 | C1q domain proteins. |
| 1182 | BL01113A | 17.99 | 7.545e−14 | 1114-1140 | BL01113 | C1q domain proteins. |
| 1182 | BL01113A | 17.99 | 7.568e−13 | 1381-1407 | BL01113 | C1q domain proteins. |
| 1182 | BL01113A | 17.99 | 7.577e−09 | 1210-1236 | BL01113 | C1q domain proteins. |
| 1182 | BL01113A | 17.99 | 7.577e−09 | 1336-1362 | BL01113 | C1q domain proteins. |
| 1182 | BL01113A | 17.99 | 7.577e−09 | 631-657 | BL01113 | C1q domain proteins. |
| 1182 | BL01113A | 17.99 | 7.750e−09 | 1183-1209 | BL01113 | C1q domain proteins. |
| 1182 | BL01113A | 17.99 | 7.750e−09 | 1252-1278 | BL01113 | C1q domain proteins. |
| 1182 | BL01113A | 17.99 | 7.923e−09 | 1102-1128 | BL01113 | C1q domain proteins. |
| 1182 | BL01113A | 17.99 | 7.923e−09 | 1513-1539 | BL01113 | C1q domain proteins. |
| 1182 | BL01113A | 17.99 | 7.923e−12 | 880-906 | BL01113 | C1q domain proteins. |
| 1182 | BL01113A | 17.99 | 8.085e−10 | 1465-1491 | BL01113 | C1q domain proteins. |
| 1182 | BL01113A | 17.99 | 8.096e−09 | 1306-1332 | BL01113 | C1q domain proteins. |
| 1182 | BL01113A | 17.99 | 8.138e−16 | 1486-1512 | BL01113 | C1q domain proteins. |
| 1182 | BL01113A | 17.99 | 8.154e−12 | 1147-1173 | BL01113 | C1q domain proteins. |
| 1182 | BL01113A | 17.99 | 8.269e−09 | 958-984 | BL01113 | C1q domain proteins. |
| 1182 | BL01113A | 17.99 | 8.277e−10 | 1417-1443 | BL01113 | C1q domain proteins. |
| 1182 | BL01113A | 17.99 | 8.364e−11 | 1567-1593 | BL01113 | C1q domain proteins. |
| 1182 | BL01113A | 17.99 | 8.468e−10 | 532-558 | BL01113 | C1q domain proteins. |
| 1182 | BL01113A | 17.99 | 8.615e−12 | 1132-1158 | BL01113 | C1q domain proteins. |
| 1182 | BL01113A | 17.99 | 8.636e−14 | 1288-1314 | BL01113 | C1q domain proteins. |
| 1182 | BL01113A | 17.99 | 8.660e−10 | 889-915 | BL01113 | C1q domain proteins. |
| 1182 | BL01113A | 17.99 | 8.788e−09 | 691-717 | BL01113 | C1q domain proteins. |
| 1182 | BL01113A | 17.99 | 8.788e−09 | 760-786 | BL01113 | C1q domain proteins. |
| 1182 | BL01113A | 17.99 | 8.846e−12 | 1099-1125 | BL01113 | C1q domain proteins. |
| 1182 | BL01113A | 17.99 | 8.977e−11 | 1072-1098 | BL01113 | C1q domain proteins. |
| 1182 | BL01113A | 17.99 | 9.043e−10 | 1573-1599 | BL01113 | C1q domain proteins. |
| 1182 | BL01113A | 17.99 | 9.129e−15 | 1378-1404 | BL01113 | C1q domain proteins. |
| 1182 | BL01113A | 17.99 | 9.135e−09 | 1462-1488 | BL01113 | C1q domain proteins. |
| 1182 | BL01113A | 17.99 | 9.135e−09 | 859-885 | BL01113 | C1q domain proteins. |
| 1182 | BL01113A | 17.99 | 9.234e−10 | 1216-1242 | BL01113 | C1q domain proteins. |
| 1182 | BL01113A | 17.99 | 9.270e−13 | 775-801 | BL01113 | C1q domain proteins. |
| 1182 | BL01113A | 17.99 | 9.270e−13 | 991-1017 | BL01113 | C1q domain proteins. |
| 1182 | BL01113A | 17.99 | 9.426e−10 | 1066-1092 | BL01113 | C1q domain proteins. |
| 1182 | BL01113A | 17.99 | 9.426e−10 | 799-825 | BL01113 | C1q domain proteins. |
| 1182 | BL01113A | 17.99 | 9.769e−12 | 1003-1029 | BL01113 | C1q domain proteins. |
| 1182 | BL01113A | 17.99 | 9.769e−12 | 505-531 | BL01113 | C1q domain proteins. |
| 1182 | BL01113A | 17.99 | 9.827e−09 | 1180-1206 | BL01113 | C1q domain proteins. |
| 1182 | BL01113A | 17.99 | 9.827e−09 | 1588-1614 | BL01113 | C1q domain proteins. |
| 1182 | BL01113A | 17.99 | 9.827e−09 | 955-981 | BL01113 | C1q domain proteins. |
| 1182 | DM01418A | 20.83 | 1.000e−40 | 1668-1715 | DM01418 | 352 FIBRILLAR COLLAGEN |
| | | | | | | CARBOXYL-TERMINAL. |
| 1182 | DM01418B | 22.51 | 5.821e−39 | 1763-1804 | DM01418 | 352 FIBRILLAR COLLAGEN |
| | | | | | | CARBOXYL-TERMINAL. |
| 1182 | DM01418C | 20.48 | 1.000e−34 | 1831-1872 | DM01418 | 352 FIBRILLAR COLLAGEN |
| | | | | | | CARBOXYL-TERMINAL. |
| 1185 | BL00514C | 17.41 | 9.082e−28 | 264-300 | BL00514 | Fibrinogen beta and |
| | | | | | | gamma chains C-terminal |
| | | | | | | domain proteins. |
| 1185 | BL00514D | 15.35 | 3.118e−11 | 305-317 | BL00514 | Fibrinogen beta and |
| | | | | | | gamma chains C-terminal |
| | | | | | | domain proteins. |
| 1185 | BL00514G | 15.98 | 1.000e−14 | 391-420 | BL00514 | Fibrinogen beta and |
| | | | | | | gamma chains C-terminal |
| | | | | | | domain proteins. |
| 1185 | BL00514H | 14.95 | 7.545e−13 | 426-450 | BL00514 | Fibrinogen beta and |
| | | | | | | gamma chains C-terminal |
| | | | | | | domain proteins. |
| 1187 | BL50002A | 14.19 | 4.750e−12 | 339-357 | BL50002 | Src homology 3 (SH3) |
| | | | | | | domain proteins |
| | | | | | | profile. |
| 1187 | PR00452B | 11.65 | 5.500e−09 | 349-364 | PR00452 | SH3 DOMAIN SIGNATURE |
| 1188 | BL00663A | 11.51 | 8.364e−22 | 44-64 | BL00663 | Vinculin family talin- |
| | | | | | | binding region |
| | | | | | | proteins. |
| 1188 | BL00663B | 27.86 | 1000e−40 | 69-122 | BL00663 | Vinculin family talin- |
| | | | | | | binding region |
| | | | | | | proteins. |
| 1188 | BL00663C | 22.59 | 1.000e−40 | 131-185 | BL00663 | Vinculin family talin- |
| | | | | | | binding region |
| | | | | | | proteins. |
| 1188 | BL00663D | 24.77 | 1.000e−40 | 206-252 | BL00663 | Vinculin family talin- |
| | | | | | | binding region |
| | | | | | | proteins. |
| 1188 | BL00663E | 21.19 | 2.200e−33 | 254-291 | BL00663 | Vinculin family talin- |
| | | | | | | binding region |
| | | | | | | proteins. |
| 1188 | BL00663F | 20.78 | 7.000e−40 | 321-361 | BL00663 | Vinculin family talin- |
| | | | | | | binding region |
| | | | | | | proteins. |
| 1188 | BL00663G | 24.17 | 1.000e−40 | 393-442 | BL00663 | Vinculin family talin- |
| | | | | | | binding region |
| 1188 | BL00663H | 27.09 | 1.000e−40 | 465-517 | BL00663 | Vinculin family talin- |
| | | | | | | binding region |
| | | | | | | proteins. |
| 1188 | BL00663I | 27.27 | 1.000e−40 | 543-596 | BL00663 | Vinculin family talin- |
| | | | | | | binding region |
| | | | | | | proteins. |
| 1188 | BL00663J | 18.16 | 1.000e−40 | 725-761 | BL00663 | Vinculin family talin- |
| | | | | | | binding region |
| | | | | | | proteins. |
| 1188 | BL00663K | 21.52 | 1.000e−40 | 770-824 | BL00663 | Vinculin family talin- |
| | | | | | | binding region |
| | | | | | | proteins. |
| 1188 | BL00663L | 20.67 | 9.053e−38 | 837-872 | BL00663 | Vinculin family talin- |
| | | | | | | binding region |
| | | | | | | proteins. |
| 1188 | PR00805A | 11.15 | 1.692e−31 | 36-60 | PR00805 | ALPHA-CATENIN SIGNATURE |
| 1188 | PR00805B | 14.82 | 1.409e−25 | 134-152 | PR00805 | ALPHA-CATENIN SIGNATURE |
| 1188 | PR00805C | 8.43 | 1.300e−23 | 153-171 | PR00805 | ALPHA-CATENIN SIGNATURE |
| 1188 | PR00805D | 7.82 | 1.257e−31 | 329-353 | PR00805 | ALPHA-CATENIN SIGNATURE |
| 1188 | PR00805E | 10.38 | 1.375e−27 | 397-417 | PR00805 | ALPHA-CATENIN SIGNATURE |
| 1188 | PR00805F | 11.72 | 1.375e−31 | 518-542 | PR00805 | ALPHA-CATENIN SIGNATURE |
| 1188 | PR00805G | 11.78 | 1.000e−31 | 633-657 | PR00805 | ALPHA-CATENIN SIGNATURE |
| 1188 | PR00805H | 14.97 | 1.161e−31 | 735-757 | PR00805 | ALPHA-CATENIN SIGNATURE |
| 1188 | PR00805I | 12.05 | 1.188e−32 | 799-823 | PR00805 | ALPHA-CATENIN SIGNATURE |
| 1188 | PR00805J | 7.44 | 2.800e−25 | 879-897 | PR00805 | ALPHA-CATENIN SIGNATURE |
| 1188 | PR00806C | 11.07 | 2.258e−09 | 734-751 | PR00806 | VINCULIN SIGNATURE |
| 1188 | PR00929C | 5.26 | 9.069e−09 | 71-81 | PR00929 | AT-HOOK-LIKE DOMAIN |
| | | | | | | SIGNATURE |
| 1189 | BL00223A | 15.59 | 1.911e−11 | 78-111 | BL00223 | Annexins repeat |
| | | | | | | proteins domain |
| | | | | | | proteins. |
| 1189 | BL00223C | 24.79 | 5.725e−40 | 65-119 | BL00223 | Annexins repeat |
| | | | | | | proteins domain |
| | | | | | | proteins. |
| 1189 | PR00196C | 10.36 | 6.311e−13 | 82-103 | PR00196 | ANNEXIN FAMILY |
| | | | | | | SIGNATURE |
| 1189 | PR00196D | 21.86 | 6.400e−09 | 6-32 | PR00196 | ANNEXIN FAMILY |
| | | | | | | SIGNATURE |
| 1189 | PR00196E | 9.19 | 7.128e−18 | 86-106 | PR00196 | ANNEXIN FAMILY |
| | | | | | | SIGNATURE |
| 1189 | PR00196F | 13.89 | 1.000e−14 | 114-129 | PR00196 | ANNEXIN FAMILY |
| | | | | | | SIGNATURE |
| 1189 | PR00196G | 11.72 | 1.439e−11 | 130-143 | PR00196 | ANNEXIN FAMILY |
| | | | | | | SIGNATURE |
| 1189 | PR00197D | 7.50 | 1.297e−10 | 82-103 | PR00197 | ANNEXIN TYPE I |
| | | | | | | SIGNATURE |
| 1189 | PR00197F | 9.03 | 3.314e−17 | 86-106 | PR00197 | ANNEXIN TYPE I |
| | | | | | | SIGNATURE |
| 1189 | PR00198D | 7.65 | 1.175e−09 | 82-103 | PR00198 | ANNEXIN TYPE II |
| | | | | | | SIGNATURE |
| 1189 | PR00198G | 8.09 | 3.132e−14 | 86-106 | PR00198 | ANNEXIN TYPE II |
| | | | | | | SIGNATURE |
| 1189 | PR00198H | 12.05 | 9.663e−09 | 130-143 | PR00198 | ANNEXIN TYPE II |
| | | | | | | SIGNATURE |
| 1189 | PR00199D | 5.65 | 8.699e−11 | 82-103 | PR00199 | ANNEXIN TYPE III |
| | | | | | | SIGNATURE |
| 1189 | PR00199G | 9.09 | 2.588e−20 | 87-112 | PR00199 | ANNEXIN TYPE III |
| | | | | | | SIGNATURE |
| 1189 | PR00199H | 12.62 | 3.000e−15 | 130-143 | PR00199 | ANNEXIN TYPE III |
| | | | | | | SIGNATURE |
| 1189 | PR00200E | 10.00 | 1.489e−11 | 82-103 | PR00200 | ANNEXIN TYPE IV |
| | | | | | | SIGNATURE |
| 1189 | PR00200G | 9.43 | 1.000e−18 | 86-112 | PR00200 | ANNEXIN TYPE IV |
| | | | | | | SIGNATURE |
| 1189 | PR00200H | 13.68 | 2.987e−11 | 130-143 | PR00200 | ANNEXIN TYPE IV |
| | | | | | | SIGNATURE |
| 1189 | PR00201D | 10.49 | 8.981e−09 | 82-103 | PR00201 | ANNEXIN TYPE V |
| | | | | | | SIGNATURE |
| 1189 | PR00201G | 11.02 | 1.625e−21 | 86-112 | PR00201 | ANNEXIN TYPE V |
| | | | | | | SIGNATURE |
| 1189 | PR00201H | 12.04 | 8.024e−11 | 130-143 | PR00201 | ANNEXIN TYPE V |
| | | | | | | SIGNATURE |
| 1189 | PR00202G | 8.01 | 9.538e−21 | 86-112 | PR00202 | ANNEXIN TYPE VI |
| | | | | | | SIGNATURE |
| 1189 | PR00202H | 9.20 | 2.800e−10 | 130-143 | PR00202 | ANNEXIN TYPE VI |
| | | | | | | SIGNATURE |
| 1190 | BL00593A | 13.25 | 6.700e−30 | 38-63 | BL00593 | Heme oxygenase |
| | | | | | | proteins. |
| 1190 | BL00593B | 13.38 | 1.000e−40 | 72-115 | BL00593 | Heme oxygenase |
| | | | | | | proteins. |
| 1190 | BL00593C | 10.02 | 1.000e−40 | 144-188 | BL00593 | Heme oxygenase |
| | | | | | | proteins. |
| 1190 | BL00593D | 19.91 | 1.000e−40 | 192-244 | BL00593 | Heme oxygenase |
| | | | | | | proteins. |
| 1190 | BL00593E | 13.32 | 4.000e−24 | 292-314 | BL00593 | Heme oxygenase |
| | | | | | | proteins. |
| 1190 | PR00088A | 13.37 | 1.237e−29 | 38-63 | PR00088 | HAEM OXYGENASE |
| | | | | | | SIGNATURE |
| 1190 | PR00088B | 14.55 | 5.615e−29 | 73-98 | PR00088 | HAEM OXYGENASE |
| | | | | | | SIGNATURE |
| 1190 | PR00088C | 13.00 | 7.395e−30 | 99-124 | PR00088 | HAEM OXYGENASE |
| | | | | | | SIGNATURE |
| 1190 | PR00088D | 16.75 | 1.000e−27 | 152-173 | PR00088 | HAEM OXYGENASE |
| | | | | | | SIGNATURE |
| 1190 | PR00088E | 11.90 | 4.900e−25 | 174-195 | PR00088 | HAEM OXYGENASE |
| | | | | | | SIGNATURE |
| 1190 | PR00088F | 12.62 | 3.025e−24 | 196-217 | PR00088 | HAEM OXYGENASE |
| | | | | | | SIGNATURE |
| 1190 | PR00088G | 10.67 | 7.429e−21 | 228-246 | PR00088 | HAEM OXYGENASE |
| | | | | | | SIGNATURE |
| 1193 | BL00388A | 23.14 | 1.257e−33 | 15-60 | BL00388 | Proteasome A-type |
| | | | | | | subunits proteins. |
| 1193 | BL00388B | 31.38 | 7.429e−28 | 74-115 | BL00388 | Proteasome A-type |
| | | | | | | subunits proteins. |
| 1193 | BL00388C | 18.79 | 9.710e−17 | 129-150 | BL00388 | Proteasome A-type |
| | | | | | | subunits proteins. |
| 1193 | BL00388D | 20.71 | 3.382e−20 | 157-187 | BL00388 | Proteasome A-type |
| | | | | | | subunits proteins. |
| 1193 | PF00227 | 14.68 | 5.950e−09 | 22-33 | PF00227 | Proteasome A-type and |
| | | | | | | B-type. |
| 1194 | BL00061B | 25.79 | 2.636e−17 | 219-256 | BL00061 | Short-chain |
| | | | | | | dehydrogenases/reductases |
| | | | | | | family proteins. |
| 1194 | PR00080C | 17.16 | 8.714e−13 | 239-258 | PR00080 | ALCOHOL DEHYDROGENASE |
| | | | | | | SUPERFAMILY SIGNATURE |
| 1194 | PR00081A | 10.53 | 5.979e−10 | 91-108 | PR00081 | GLUCOSE/RIBITOL |
| | | | | | | DEHYDROGENASE FAMILY |
| | | | | | | SIGNATURE |
| 1194 | PR00081C | 15.13 | 9.654e−11 | 213-229 | PR00081 | GLUCOSE/RIBITOL |
| | | | | | | DEHYDROGENASE FAMILY |
| | | | | | | SIGNATURE |
| 1194 | PR00081D | 15.80 | 1.231e−10 | 239-258 | PR00081 | GLUCOSE/RIBITOL |
| | | | | | | DEHYDROGENASE FAMILY |
| | | | | | | SIGNATURE |
| 1195 | BL00326A | 14.01 | 9.686e−09 | 34-67 | BL00326 | Tropomyosins proteins. |
| 1197 | PF00651 | 15.00 | 7.857e−10 | 345-357 | PF00651 | BTB (also known as BR- |
| | | | | | | C/Ttk) domain proteins. |
| 1199 | PR00001A | 12.78 | 9.379e−15 | 38-51 | PR00001 | COAGULATION FACTOR GLA |
| | | | | | | DOMAIN SIGNATURE |
| 1199 | PR00001B | 10.75 | 6.932e−13 | 52-65 | PR00001 | COAGULATION FACTOR GLA |
| | | | | | | DOMAIN SIGNATURE |
| 1199 | PR00001C | 16.60 | 2.459e−11 | 66-80 | PR00001 | COAGULATION FACTOR GLA |
| | | | | | | DOMAIN SIGNATURE |
| 1200 | PD00289 | 9.97 | 4.103e−09 | 160-173 | PD00289 | PROTEIN SH3 DOMAIN |
| | | | | | | REPEAT PRESYNA. |
| 1201 | BL00107A | 18.39 | 3.118e−20 | 733-763 | BL00107 | Protein kinases ATP- |
| | | | | | | binding region |
| | | | | | | proteins. |
| 1201 | BL00107B | 13.31 | 8.615e−12 | 803-818 | BL00107 | Protein kinases ATP- |
| | | | | | | binding region |
| | | | | | | proteins. |
| 1201 | BL00239B | 25.15 | 9.224e−21 | 667-714 | BL00239 | Receptor tyrosine |
| | | | | | | kinase class II |
| | | | | | | proteins. |
| 1201 | BL00239C | 18.75 | 7.474e−13 | 720-742 | BL00239 | Receptor tyrosine |
| | | | | | | kinase class II |
| | | | | | | proteins. |
| 1201 | BL00239D | 16.81 | 2.373e−11 | 745-770 | BL00239 | Receptor tyrosine |
| | | | | | | kinase class II |
| | | | | | | proteins. |
| 1201 | BL00239E | 17.14 | 4.682e−24 | 775-824 | BL00239 | Receptor tyrosine |
| | | | | | | kinase class II |
| | | | | | | proteins. |
| 1201 | BL00239F | 28.15 | 2.929e−20 | 829-873 | BL00239 | Receptor tyrosine |
| | | | | | | kinase class II |
| | | | | | | proteins. |
| 1201 | BL00240E | 11.56 | 7.808e−17 | 719-756 | BL00240 | Receptor tyrosine |
| | | | | | | kinase class III |
| | | | | | | proteins. |
| 1201 | BL00240F | 17.74 | 9.241e−19 | 774-821 | BL00240 | Receptor tyrosine |
| | | | | | | kinase class III |
| | | | | | | proteins. |
| 1201 | BL00240G | 28.45 | 2.611e−11 | 821-873 | BL00240 | Receptor tyrosine |
| | | | | | | kinase class III |
| | | | | | | proteins. |
| 1201 | BL00790A | 19.74 | 5.371e−17 | 20-41 | BL00790 | Receptor tyrosine |
| | | | | | | kinase class V |
| | | | | | | proteins. |
| 1201 | BL00790B | 21.59 | 1.000e−40 | 53-104 | BL00790 | Receptor tyrosine |
| | | | | | | kinase class V |
| | | | | | | proteins. |
| 1201 | BL00790C | 16.65 | 1.000e−40 | 161-214 | BL00790 | Receptor tyrosine |
| | | | | | | kinase class V |
| | | | | | | proteins. |
| 1201 | BL00790D | 12.41 | 2.703e−22 | 238-262 | BL00790 | Receptor tyrosine |
| | | | | | | kinase class V |
| | | | | | | proteins. |
| 1201 | BL00790E | 29.58 | 6.400e−39 | 271-318 | BL00790 | Receptor tyrosine |
| | | | | | | kinase class V |
| | | | | | | proteins. |
| 1201 | BL00790F | 15.90 | 7.250e−22 | 337-363 | BL00790 | Receptor tyrosine |
| | | | | | | kinase class V |
| | | | | | | proteins. |
| 1201 | BL00790G | 22.06 | 2.846e−34 | 373-416 | BL00790 | Receptor tyrosine |
| | | | | | | kinase class V |
| | | | | | | proteins. |
| 1201 | BL00790H | 13.42 | 1.771e−23 | 452-477 | BL00790 | Receptor tyrosine |
| | | | | | | kinase class V |
| | | | | | | proteins. |
| 1201 | BL00790I | 20.01 | 8.941e−27 | 499-529 | BL00790 | Receptor tyrosine |
| | | | | | | kinase class V |
| | | | | | | proteins. |
| 1201 | BL00790J | 14.21 | 1.000e−40 | 588-627 | BL00790 | Receptor tyrosine |
| | | | | | | kinase class V |
| | | | | | | proteins. |
| 1201 | BL00790K | 9.30 | 1.000e−40 | 640-693 | BL00790 | Receptor tyrosine |
| | | | | | | kinase class V |
| | | | | | | proteins. |
| 1201 | BL00790L | 11.16 | 3.423e−24 | 704-723 | BL00790 | Receptor tyrosine |
| | | | | | | kinase class V |
| | | | | | | proteins. |
| 1201 | BL00790M | 8.74 | 4.977e−26 | 724-745 | BL00790 | Receptor tyrosine |
| | | | | | | kinase class V |
| | | | | | | proteins. |
| 1201 | BL00790N | 13.25 | 8.071e−31 | 746-772 | BL00790 | Receptor tyrosine |
| | | | | | | kinase class V |
| | | | | | | proteins. |
| 1201 | BL00790O | 7.68 | 1.000e−40 | 782-814 | BL00790 | Receptor tyrosine |
| | | | | | | kinase class V |
| | | | | | | proteins. |
| 1201 | BL00790P | 12.33 | 1.281e−30 | 815-839 | BL00790 | Receptor tyrosine |
| | | | | | | kinase class V |
| | | | | | | proteins. |
| 1201 | BL00790Q | 15.61 | 1.000e−40 | 840-888 | BL00790 | Receptor tyrosine |
| | | | | | | kinase class V |
| | | | | | | proteins. |
| 1201 | BL00790R | 16.20 | 4.000e−39 | 931-974 | BL00790 | Receptor tyrosine |
| | | | | | | kinase class V |
| | | | | | | proteins. |
| 1201 | BL50001B | 17.40 | 3.647e−13 | 730-750 | BL50001 | Src homology 2 (SH2) |
| | | | | | | domain proteins |
| | | | | | | profile. |
| 1201 | BL50001C | 10.17 | 1.000e−09 | 784-794 | BL50001 | Src homology 2 (SH2) |
| | | | | | | domain proteins |
| | | | | | | profile. |
| 1201 | PR00014D | 12.04 | 3.077e−12 | 506-520 | PR00014 | FIBRONECTIN TYPE III |
| | | | | | | REPEAT SIGNATURE |
| 1201 | PR00109A | 15.00 | 1.409e−12 | 696-709 | PR00109 | TYROSINE KINASE |
| | | | | | | CATALYTIC DOMAIN |
| | | | | | | SIGNATURE |
| 1201 | PR00109B | 12.27 | 1.000e−19 | 733-751 | PR00109 | TYROSINE KINASE |
| | | | | | | CATALYTIC DOMAIN |
| | | | | | | SIGNATURE |
| 1201 | PR00109C | 12.85 | 5.235e−12 | 785-795 | PR00109 | TYROSINE KINASE |
| | | | | | | CATALYTIC DOMAIN |
| | | | | | | SIGNATURE |
| 1201 | PR00109D | 17.04 | 2.038e−20 | 804-826 | PR00109 | TYROSINE KINASE |
| | | | | | | CATALYTIC DOMAIN |
| | | | | | | SIGNATURE |
| 1201 | PR00109E | 14.41 | 8.500e−18 | 848-870 | PR00109 | TYROSINE KINASE |
| | | | | | | CATALYTIC DOMAIN |
| | | | | | | SIGNATURE |
| 1203 | DM00215 | 19.43 | 9.390e−09 | 157-189 | DM00215 | PROLINE-RICH PROTEIN 3. |
| 1203 | PR00049D | 0.00 | 7.254e−09 | 175-189 | PR00049 | WILM'S TUMOUR PROTEIN |
| | | | | | | SIGNATURE |
| 1204 | BL00225A | 13.82 | 3.127e−09 | 1133-1153 | BL00225 | Crystallins beta and |
| | | | | | | gamma ‘Greek key’ motif |
| | | | | | | proteins. |
| 1204 | BL00225A | 13.82 | 5.829e−12 | 1417-1437 | BL00225 | Crystallins beta and |
| | | | | | | gamma ‘Greek key’ motif |
| | | | | | | proteins. |
| 1204 | BL00225B | 18.06 | 2.575e−19 | 1270-1304 | BL00225 | Crystallins beta and |
| | | | | | | gamma ‘Greek key’ motif |
| | | | | | | proteins. |
| 1204 | BL00225B | 18.06 | 4.808e−14 | 970-1004 | BL00225 | Crystallins beta and |
| | | | | | | gamma ‘Greek key’ motif |
| | | | | | | proteins. |
| 1204 | BL00225B | 18.06 | 5.500e−14 | 1451-1485 | BL00225 | Crystallins beta and |
| | | | | | | gamma ‘Greek key’ motif |
| | | | | | | proteins. |
| 1204 | BL00225B | 18.06 | 7.517e−24 | 1179-1213 | BL00225 | Crystallins beta and |
| | | | | | | gamma ‘Greek key’ motif |
| | | | | | | proteins. |
| 1204 | BL00225B | 18.06 | 8.200e−19 | 1072-1106 | BL00225 | Crystallins beta and |
| | | | | | | gamma ‘Greek key’ motif |
| | | | | | | proteins. |
| 1204 | BL00225B | 18.06 | 8.297e−20 | 1361-1395 | BL00225 | Crystallins beta and |
| | | | | | | gamma ‘Greek key’ motif |
| | | | | | | proteins. |
| 1205 | BL00266B | 24.48 | 8.457e−21 | 19-56 | BL00266 | Somatotropin, prolactin |
| | | | | | | and related hormones |
| | | | | | | proteins. |
| 1205 | PR00836A | 14.40 | 2.800e−13 | 19-32 | PR00836 | SOMATOTROPIN HORMONE |
| | | | | | | FAMILY SIGNATURE |
| 1205 | PR00836B | 16.59 | 5.814e−10 | 41-59 | PR00836 | SOMATOTROPIN HORMONE |
| | | | | | | FAMILY SIGNATURE |
| 1205 | PR00836C | 11.95 | 1.000e−12 | 119-135 | PR00836 | SOMATOTROPIN HORMONE |
| | | | | | | FAMILY SIGNATURE |
| 1206 | BL00046 | 12.95 | 1.000e−40 | 59-113 | BL00046 | Histone H2A proteins. |
| 1206 | PR00620A | 11.03 | 2.636e−27 | 40-62 | PR00620 | HISTONE H2A SIGNATURE |
| 1206 | PR00620B | 8.47 | 1.750e−20 | 69-84 | PR00620 | HISTONE H2A SIGNATURE |
| 1206 | PR00620C | 10.19 | 2.125e−17 | 84-97 | PR00620 | HISTONE H2A SIGNATURE |
| 1206 | PR00620D | 11.39 | 1.692e−19 | 98-112 | PR00620 | HISTONE H2A SIGNATURE |
| 1206 | PR00620E | 8.91 | 2.500e−16 | 112-124 | PR00620 | HISTONE H2A SIGNATURE |
| 1206 | PR00620F | 7.29 | 7.750e−22 | 126-144 | PR00620 | HISTONE H2A SIGNATURE |
| 1208 | BL00309A | 19.16 | 7.545e−20 | 75-99 | BL00309 | Vertebrate galactoside- |
| | | | | | | binding lectin |
| | | | | | | proteins. |
| 1208 | BL00309B | 12.11 | 6.000e−16 | 101-115 | BL00309 | Vertebrate galactoside- |
| | | | | | | binding lectin |
| | | | | | | proteins. |
| 1208 | BL00309C | 18.65 | 5.000e−24 | 123-147 | BL00309 | Vertebrate galactoside- |
| | | | | | | binding lectin |
| | | | | | | proteins. |
| 1209 | PF00075B | 12.56 | 4.073e−10 | 260-270 | PF00075 | RNase H. |
| 1209 | PF00075C | 11.58 | 9.786e−11 | 295-306 | PF00075 | RNase H. |
| 1209 | PF00075D | 10.71 | 7.000e−11 | 327-337 | PF00075 | RNase H. |
| 1209 | PF00075F | 12.87 | 4.750e−11 | 685-695 | PF00075 | RNase H. |
| 1209 | PF00075J | 15.78 | 8.350e−11 | 980-997 | PF00075 | RNase H. |
| 1209 | PF00429 | 31.08 | 3.492e−17 | 1105-1154 | PF00429 | ENV polyprotein (coat |
| | | | | | | polyprotein). |
| 1210 | BL00272C | 8.27 | 8.326e−09 | 95-106 | BL00272 | Snake toxins proteins. |
| 1210 | BL00983C | 12.69 | 4.981e−09 | 91-106 | BL00983 | Ly-6/u-PAR domain |
| | | | | | | proteins. |
| 1211 | BL00139A | 10.29 | 7.261e−14 | 320-329 | BL00139 | Eukaryotic thiol |
| | | | | | | (cysteine) proteases |
| | | | | | | cysteine proteins. |
| 1211 | BL00139C | 9.23 | 1.000e−11 | 461-470 | BL00139 | Eukaryotic thiol |
| | | | | | | (cysteine) proteases |
| | | | | | | cysteine proteins. |
| 1211 | BL00139D | 9.24 | 5.125e−17 | 477-493 | BL00139 | Eukaryotic thiol |
| | | | | | | (cysteine) proteases |
| | | | | | | cysteine proteins. |
| 1211 | PR00705A | 10.55 | 6.294e−16 | 320-335 | PR00705 | PAPAIN CYSTEINE |
| | | | | | | PROTEASE (C1) FAMILY |
| | | | | | | SIGNATURE |
| 1211 | PR00705B | 10.22 | 1.844e−09 | 462-472 | PR00705 | PAPAIN CYSTEINE |
| | | | | | | PROTEASE (C1) FAMILY |
| | | | | | | SIGNATURE |
| 1214 | BL00282 | 16.88 | 6.294e−11 | 12-34 | BL00282 | Kazal serine protease |
| | | | | | | inhibitors family |
| | | | | | | proteins. |
| 1216 | BL01177C | 17.39 | 2.875e−20 | 109-127 | BL01177 | Anaphylatoxin domain |
| | | | | | | proteins. |
| 1216 | BL01187A | 9.98 | 1.000e−12 | 100-111 | BL01187 | Calcium-binding EGF- |
| | | | | | | like domain proteins |
| | | | | | | pattern proteins. |
| 1216 | BL01187A | 9.98 | 6.625e−09 | 58-69 | BL01187 | Calcium-binding EGF- |
| | | | | | | like domain proteins |
| | | | | | | pattern proteins. |
| 1216 | BL01187B | 12.04 | 3.250e−14 | 76-91 | BL01187 | Calcium-binding EGF- |
| | | | | | | like domain proteins |
| | | | | | | pattern proteins. |
| 1216 | BL01187B | 12.04 | 6.478e−13 | 115-130 | BL01187 | Calcium-binding EGF- |
| | | | | | | like domain proteins |
| | | | | | | pattern proteins. |
| 1216 | PR00010A | 11.79 | 9.308e−09 | 102-113 | PR00010 | TYPE II EGF-LIKE |
| | | | | | | SIGNATURE |
| 1216 | PR00010C | 11.16 | 5.714e−09 | 81-91 | PR00010 | TYPE II EGF-LIKE |
| | | | | | | SIGNATURE |
| 1218 | BL00226D | 19.10 | 1.000e−40 | 31-77 | BL00226 | Intermediate filaments |
| | | | | | | proteins. |
| 1219 | BL00107A | 18.39 | 6.192e−12 | 211-241 | BL00107 | Protein kinases ATP- |
| | | | | | | binding region |
| | | | | | | proteins. |
| 1219 | BL00239B | 25.15 | 8.909e−17 | 146-193 | BL00239 | Receptor tyrosine |
| | | | | | | kinase class II |
| | | | | | | proteins. |
| 1219 | BL00240D | 23.07 | 3.483e−09 | 135-189 | BL00240 | Receptor tyrosine |
| | | | | | | kinase class III |
| | | | | | | proteins. |
| 1219 | BL00240E | 11.56 | 6.185e−12 | 197-234 | BL00240 | Receptor tyrosine |
| | | | | | | kinase class III |
| | | | | | | proteins. |
| 1219 | BL00479C | 12.01 | 2.000e−09 | 263-275 | BL00479 | Phorbol esters/ |
| | | | | | | diacylglycerol binding |
| | | | | | | domain proteins. |
| 1219 | BL00790M | 8.74 | 3.571e−09 | 202-223 | BL00790 | Receptor tyrosine |
| | | | | | | kinase class V |
| | | | | | | proteins. |
| 1219 | PR00109A | 15.00 | 1.486e−09 | 175-188 | PR00109 | TYROSINE KINASE |
| | | | | | | CATALYTIC DOMAIN |
| | | | | | | SIGNATURE |
| 1219 | PR00109B | 12.27 | 5.596e−13 | 211-229 | PR00109 | TYROSINE KINASE |
| | | | | | | CATALYTIC DOMAIN |
| | | | | | | SIGNATURE |
| 1221 | BL00421E | 20.97 | 5.125e−16 | 41-70 | BL00421 | Transmembrane 4 family |
| | | | | | | proteins. |
| 1221 | PR00259D | 13.50 | 2.241e−21 | 44-70 | PR00259 | TRANSMEMBRANE FOUR |
| | | | | | | FAMILY SIGNATURE |
| 1222 | BL00540B | 18.82 | 1.000e−40 | 50-104 | BL00540 | Ferritin iron-binding |
| | | | | | | regions proteins. |
| 1222 | BL00540C | 13.00 | 7.750e−14 | 115-126 | BL00540 | Ferritin iron-binding |
| | | | | | | regions proteins. |
| 1223 | BL00824B | 9.21 | 7.750e−22 | 89-108 | BL00824 | Elongation factor 1 |
| | | | | | | beta/beta'/delta chain |
| | | | | | | proteins. |
| 1224 | BL00266A | 15.69 | 9.000e−19 | 30-56 | BL00266 | Somatotropin, prolactin |
| | | | | | | and related hormones |
| | | | | | | proteins. |
| 1224 | BL00266B | 24.48 | 7.261e−16 | 74-111 | BL00266 | Somatotropin, prolactin |
| | | | | | | and related hormones |
| | | | | | | proteins. |
| 1224 | PR00836A | 14.40 | 9.379e−11 | 74-87 | PR00836 | SOMATOTROPIN HORMONE |
| | | | | | | FAMILY SIGNATURE |
| 1225 | PF00084C | 11.25 | 3.571e−10 | 34-43 | PF00084 | Sushi domain proteins |
| | | | | | | (SCR repeat proteins. |
| 1227 | BL00475C | 13.06 | 3.700e−17 | 57-73 | BL00475 | Ribosomal protein L15 |
| | | | | | | proteins. |
| 1228 | PR00702G | 9.63 | 2.625e−09 | 22-45 | PR00702 | ACRIFLAVIN RESISTANCE |
| | | | | | | PROTEIN FAMILY |
| | | | | | | SIGNATURE |
| 1231 | PD02269B | 18.48 | 2.667e−27 | 74-100 | PD02269 | CYTIDINE DEAMINASE |
| | | | | | | HYDROLASE ZINC AMINOHY. |
| 1231 | PD02269C | 16.36 | 7.882e−17 | 119-131 | PD02269 | CYTIDINE DEAMINASE |
| | | | | | | HYDROLASE ZINC AMINOHY. |
| 1232 | BL00061A | 9.41 | 4.600e−13 | 105-115 | BL00061 | Short-chain |
| | | | | | | dehydrogenases/reductases |
| | | | | | | family proteins. |
| 1232 | PR00080A | 9.32 | 3.143e−12 | 105-116 | PR00080 | ALCOHOL DEHYDROGENASE |
| | | | | | | SUPERFAMILY SIGNATURE |
| 1232 | PR00081B | 10.38 | 8.800e−14 | 105-116 | PR00081 | GLUCOSE/RIBITOL |
| | | | | | | DEHYDROGENASE FAMILY |
| | | | | | | SIGNATURE |
| 1233 | BL00064A | 21.16 | 1.000e−33 | 48-85 | BL00064 | L-lactate dehydrogenase |
| | | | | | | proteins. |
| 1233 | BL00957A | 8.31 | 9.609e−09 | 48-63 | BL00957 | NAD-dependent glycerol- |
| | | | | | | 3-phosphate |
| | | | | | | dehydrogenase proteins. |
| 1233 | PR00086A | 16.12 | 4.000e−26 | 48-72 | PR00086 | L-LACTATE DEHYDROGENASE |
| | | | | | | SIGNATURE |
| 1233 | PR00086B | 13.67 | 4.462e−24 | 73-97 | PR00086 | L-LACTATE DEHYDROGENASE |
| | | | | | | SIGNATURE |
| 1234 | BL00353B | 11.47 | 1.000e−40 | 65-114 | BL00353 | HMG1/2 proteins. |
| 1234 | BL00353C | 14.83 | 5.680e−24 | 115-161 | BL00353 | HMG1/2 proteins. |
| 1234 | BL00353C | 14.83 | 7.254e−09 | 31-77 | BL00353 | HMG1/2 proteins. |
| 1234 | PR00886A | 10.08 | 2.929e−30 | 27-49 | PR00886 | HIGH MOBILITY GROUP |
| | | | | | | (HMG1/HMG2) PROTEIN |
| | | | | | | SIGNATURE |
| 1234 | PR00886B | 9.88 | 6.625e−27 | 50-70 | PR00886 | HIGH MOBILITY GROUP |
| | | | | | | (HMG1/HMG2) PROTEIN |
| | | | | | | SIGNATURE |
| 1234 | PR00886C | 11.84 | 1.500e−22 | 97-115 | PR00886 | HIGH MOBILITY GROUP |
| | | | | | | (HMG1/HMG2) PROTEIN |
| | | | | | | SIGNATURE |
| 1234 | PR00886D | 15.72 | 4.830e−14 | 115-134 | PR00886 | HIGH MOBILITY GROUP |
| | | | | | | (HMG1/HMG2) PROTEIN |
| | | | | | | SIGNATURE |
| 1234 | PR00886E | 8.85 | 9.316e−09 | 50-70 | PR00886 | HIGH MOBILITY GROUP |
| | | | | | | (HMG1/HMG2) PROTEIN |
| | | | | | | SIGNATURE |
| 1235 | BL00740A | 13.87 | 7.200e−10 | 64-76 | BL00740 | MAM domain proteins. |
| 1235 | PR00020A | 18.17 | 6.684e−10 | 62-80 | PR00020 | MAM DOMAIN SIGNATURE |
| 1236 | BL01187A | 9.98 | 3.250e−09 | 68-79 | BL01187 | Calcium-binding EGF- |
| | | | | | | like domain proteins |
| | | | | | | pattern proteins. |
| 1236 | BL01187A | 9.98 | 3.571e−10 | 27-38 | BL01187 | Calcium-binding EGF- |
| | | | | | | like domain proteins |
| | | | | | | pattern proteins. |
| 1236 | BL01187B | 12.04 | 1.391e−13 | 46-61 | BL01187 | Calcium-binding EGF- |
| | | | | | | like domain proteins |
| | | | | | | pattern proteins. |
| 1236 | BL01187B | 12.04 | 2.000e−12 | 5-20 | BL01187 | Calcium-binding EGF- |
| | | | | | | like domain proteins |
| | | | | | | pattern proteins. |
| 1236 | BL01187B | 12.04 | 4.375e−09 | 86-101 | BL01187 | Calcium-binding EGF- |
| | | | | | | like domain proteins |
| | | | | | | pattern proteins. |
| 1236 | PR00010C | 11.16 | 7.000e−09 | 51-61 | PR00010 | TYPE II EGF-LIKE |
| | | | | | | SIGNATURE |
| 1236 | PR00907G | 11.63 | 6.514e−09 | 46-72 | PR00907 | THROMBOMODULIN |
| | | | | | | SIGNATURE |
| 1236 | PR00907G | 11.63 | 8.622e−09 | 5-31 | PR00907 | THROMBOMODULIN |
| | | | | | | SIGNATURE |
| 1237 | BL00287 | 17.35 | 1.947e−20 | 25-48 | BL00287 | Cysteine proteases |
| | | | | | | inhibitors proteins. |
| 1245 | DM00303A | 13.20 | 3.382e−11 | 52-101 | DM00303 | 6 LEA 11-MER REPEAT |
| | | | | | | REPEAT. |
| 1246 | BL00064C | 17.28 | 1.000e−40 | 18-62 | BL00064 | L-lactate dehydrogenase |
| | | | | | | proteins. |
| 1246 | BL00064D | 14.19 | 8.875e−32 | 63-92 | BL00064 | L-lactate dehydrogenase |
| | | | | | | proteins. |
| 1246 | BL00068C | 29.08 | 3.089e−17 | 14-60 | BL00068 | Malate dehydrogenase |
| | | | | | | proteins. |
| 1246 | PR00086C | 16.22 | 6.400e−25 | 15-35 | PR00086 | L-LACTATE DEHYDROGENASE |
| | | | | | | SIGNATURE |
| 1246 | PR00086D | 15.53 | 4.600e−24 | 39-57 | PR00086 | L-LACTATE DEHYDROGENASE |
| | | | | | | SIGNATURE |
| 1246 | PR00086E | 11.21 | 8.364e−18 | 69-82 | PR00086 | L-LACTATE DEHYDROGENASE |
| | | | | | | SIGNATURE |
| 1251 | BL00142 | 8.38 | 4.429e−09 | 430-440 | BL00142 | Neutral zinc |
| | | | | | | metallopeptidases, |
| | | | | | | zinc-binding region |
| | | | | | | proteins. |
| 1251 | PD01719A | 12.89 | 3.429e−14 | 594-621 | PD01719 | PRECURSOR GLYCOPROTEIN |
| | | | | | | SIGNAL RE. |
| 1251 | PD01719A | 12.89 | 9.408e−10 | 943-970 | PD01719 | PRECURSOR GLYCOPROTEIN |
| | | | | | | SIGNAL RE. |
| 1254 | BL00319C | 17.12 | 1.592e−09 | 43-76 | BL00319 | Amyloidogenic |
| | | | | | | glycoprotein |
| | | | | | | extracellular domain |
| | | | | | | proteins. |
| 1254 | BL00319C | 17.12 | 2.625e−10 | 106-139 | BL00319 | Amyloidogenic |
| | | | | | | glycoprotein |
| | | | | | | extracellular domain |
| | | | | | | proteins. |
| 1254 | BL00319C | 17.12 | 3.013e−09 | 100-133 | BL00319 | Amyloidogenic |
| | | | | | | glycoprotein |
| | | | | | | extracellular domain |
| | | | | | | proteins. |
| 1254 | BL00319C | 17.12 | 3.857e−12 | 101-134 | BL00319 | Amyloidogenic |
| | | | | | | glycoprotein |
| | | | | | | extracellular domain |
| | | | | | | proteins. |
| 1254 | BL00319C | 17.12 | 4.671e−09 | 107-140 | BL00319 | Amyloidogenic |
| | | | | | | glycoprotein |
| | | | | | | extracellular domain |
| | | | | | | proteins. |
| 1254 | BL00319C | 17.12 | 4.875e−10 | 97-130 | BL00319 | Amyloidogenic |
| | | | | | | glycoprotein |
| | | | | | | extracellular domain |
| | | | | | | proteins. |
| 1254 | BL00319C | 17.12 | 5.836e−11 | 44-77 | BL00319 | Amyloidogenic |
| | | | | | | glycoprotein |
| | | | | | | extracellular domain |
| | | | | | | proteins. |
| 1254 | BL00319C | 17.12 | 7.625e−10 | 104-137 | BL00319 | Amyloidogenic |
| | | | | | | glycoprotein |
| | | | | | | extracellular domain |
| | | | | | | proteins. |
| 1254 | BL00319C | 17.12 | 8.105e−09 | 98-131 | BL00319 | Amyloidogenic |
| | | | | | | glycoprotein |
| | | | | | | extracellular domain |
| | | | | | | proteins. |
| 1254 | BL00319C | 17.12 | 8.800e−13 | 102-135 | BL00319 | Amyloidogenic |
| | | | | | | glycoprotein |
| | | | | | | extracellular domain |
| | | | | | | proteins. |
| 1254 | BL00319C | 17.12 | 8.857e−12 | 105-138 | BL00319 | Amyloidogenic |
| | | | | | | glycoprotein |
| | | | | | | extracellular domain |
| | | | | | | proteins. |
| 1254 | BL00319C | 17.12 | 9.289e−09 | 39-72 | BL00319 | Amyloidogenic |
| | | | | | | glycoprotein |
| | | | | | | extracellular domain |
| | | | | | | proteins. |
| 1254 | BL00319C | 17.12 | 9.289e−09 | 96-129 | BL00319 | Amyloidogenic |
| | | | | | | glycoprotein |
| | | | | | | extracellular domain |
| | | | | | | proteins. |
| 1254 | BL00412D | 16.54 | 3.935e−10 | 66-116 | BL00412 | Neuromodulin (GAP-43) |
| | | | | | | proteins. |
| 1254 | BL00412D | 16.54 | 6.283e−10 | 93-143 | BL00412 | Neuromodulin (GAP-43) |
| | | | | | | proteins. |
| 1254 | BL00412D | 16.54 | 6.420e−11 | 68-118 | BL00412 | Neuromodulin (GAP-43) |
| | | | | | | proteins. |
| 1254 | BL00824B | 9.21 | 2.216e−09 | 107-126 | BL00824 | Elongation factor 1 |
| | | | | | | beta/beta′/delta chain |
| | | | | | | proteins. |
| 1254 | BL00824B | 9.21 | 2.338e−09 | 106-125 | BL00824 | Elongation factor 1 |
| | | | | | | beta/beta′/delta chain |
| | | | | | | proteins. |
| 1254 | BL00824B | 9.21 | 4.770e−09 | 105-124 | BL00824 | Elongation factor 1 |
| | | | | | | beta/beta′/delta chain |
| | | | | | | proteins. |
| 1254 | BL00824B | 9.21 | 5.257e−09 | 45-64 | BL00824 | Elongation factor 1 |
| | | | | | | beta/beta′/delta chain |
| | | | | | | proteins. |
| 1254 | BL00824B | 9.21 | 8.435e−10 | 102-121 | BL00824 | Elongation factor 1 |
| | | | | | | beta/beta′/delta chain |
| | | | | | | proteins. |
| 1254 | BL00884B | 12.47 | 9.664e−09 | 76-119 | BL00884 | Osteopontin proteins. |
| 1254 | BL01115D | 14.49 | 6.924e−09 | 14-45 | BL01115 | GTP-binding nuclear |
| | | | | | | protein ran proteins. |
| 1254 | PD00301A | 10.24 | 1.900e−09 | 116-126 | PD00301 | PROTEIN REPEAT MUSCLE |
| | | | | | | CALCIUM-BI. |
| 1254 | PD00919F | 11.63 | 5.107e−09 | 33-61 | PD00919 | CALCIUM-BINDING |
| | | | | | | PRECURSOR SIGNAL R. |
| 1254 | PF00922A | 19.17 | 4.951e−10 | 92-125 | PF00922 | Vesiculovirus |
| | | | | | | phosphoprotein. |
| 1254 | PF00922A | 19.17 | 5.966e−09 | 94-127 | PF00922 | Vesiculovirus |
| | | | | | | phosphoprotein. |
| 1254 | PF00922A | 19.17 | 6.690e−09 | 91-124 | PF00922 | Vesiculovirus |
| | | | | | | phosphoprotein. |
| 1254 | PF00922A | 19.17 | 9.561e−10 | 93-126 | PF00922 | Vesiculovirus |
| | | | | | | phosphoprotein. |
| 1255 | PR00121B | 7.83 | 9.250e−09 | 87-107 | PR00121 | SODIUM/POTASSIUM- |
| | | | | | | TRANSPORTING ATPASE |
| | | | | | | SIGNATURE |
| 1256 | BL00406B | 5.47 | 1.000e−40 | 72-126 | BL00406 | Actins proteins. |
| 1256 | PR00190A | 7.24 | 1.375e−13 | 15-24 | PR00190 | ACTIN SIGNATURE |
| 1256 | PR00190B | 9.98 | 1.000e−15 | 38-49 | PR00190 | ACTIN SIGNATURE |
| 1256 | PR00190C | 11.49 | 1.474e−30 | 50-72 | PR00190 | ACTIN SIGNATURE |
| 1256 | PR00190D | 19.23 | 1.450e−26 | 73-91 | PR00190 | ACTIN SIGNATURE |
| 1256 | PR00190E | 7.16 | 1.450e−19 | 104-117 | PR00190 | ACTIN SIGNATURE |
| 1258 | BL00389A | 11.02 | 7.188e−10 | 37-49 | BL00389 | ATP synthase delta |
| | | | | | | (OSCP) subunit |
| | | | | | | proteins. |
| 1258 | BL00389B | 17.02 | 6.211e−13 | 107-128 | BL00389 | ATP synthase delta |
| | | | | | | (OSCP) subunit |
| | | | | | | proteins. |
| 1258 | BL00389C | 20.13 | 6.760e−25 | 168-205 | BL00389 | ATP synthase delta |
| | | | | | | (OSCP) subunit |
| | | | | | | proteins. |
| 1258 | PR00125A | 16.03 | 8.364e−15 | 37-56 | PR00125 | ATP SYNTHASE DELTA |
| | | | | | | SUBUNIT SIGNATURE |
| 1258 | PR00125B | 12.78 | 8.125e−10 | 106-117 | PR00125 | ATP SYNTHASE DELTA |
| | | | | | | SUBUNIT SIGNATURE |
| 1258 | PR00125D | 11.00 | 5.345e−11 | 169-184 | PR00125 | ATP SYNTHASE DELTA |
| | | | | | | SUBUNIT SIGNATURE |
| 1258 | PR00125E | 13.56 | 9.250e−16 | 184-202 | PR00125 | ATP SYNTHASE DELTA |
| | | | | | | SUBUNIT SIGNATURE |
| 1260 | BL00678 | 9.67 | 1.947e−09 | 194-204 | BL00678 | Trp-Asp (WD) repeat |
| | | | | | | proteins proteins. |
| 1260 | BL00678 | 9.67 | 9.053e−09 | 290-300 | BL00678 | Trp-Asp (WD) repeat |
| | | | | | | proteins proteins. |
| 1260 | PR00320A | 16.74 | 2.862e−11 | 288-302 | PR00320 | G-PROTEIN BETA WD-40 |
| | | | | | | REPEAT SIGNATURE |
| 1260 | PR00320A | 16.74 | 2.976e−09 | 332-346 | PR00320 | G-PROTEIN BETA WD-40 |
| | | | | | | REPEAT SIGNATURE |
| 1260 | PR00320A | 16.74 | 5.714e−13 | 192-206 | PR00320 | G-PROTEIN BETA WD-40 |
| | | | | | | REPEAT SIGNATURE |
| 1260 | PR00320B | 12.19 | 1.783e−13 | 288-302 | PR00320 | G-PROTEIN BETA WD-40 |
| | | | | | | REPEAT SIGNATURE |
| 1260 | PR00320B | 12.19 | 5.114e−10 | 192-206 | PR00320 | G-PROTEIN BETA WD-40 |
| | | | | | | REPEAT SIGNATURE |
| 1260 | PR00320C | 13.01 | 1.783e−11 | 332-346 | PR00320 | G-PROTEIN BETA WD-40 |
| | | | | | | REPEAT SIGNATURE |
| 1260 | PR00320C | 13.01 | 3.400e−09 | 192-206 | PR00320 | G-PROTEIN BETA WD-40 |
| | | | | | | REPEAT SIGNATURE |
| 1260 | PR00320C | 13.01 | 9.640e−10 | 288-302 | PR00320 | G-PROTEIN BETA WD-40 |
| | | | | | | REPEAT SIGNATURE |
| 1261 | BL00678 | 9.67 | 7.158e−09 | 69-79 | BL00678 | Trp-Asp (WD) repeat |
| | | | | | | proteins proteins. |
| 1261 | PR00320A | 16.74 | 6.707e−09 | 203-217 | PR00320 | G-PROTEIN BETA WD-40 |
| | | | | | | REPEAT SIGNATURE |
| 1261 | PR00320A | 16.74 | 9.122e−09 | 67-81 | PR00320 | G-PROTEIN BETA WD-40 |
| | | | | | | REPEAT SIGNATURE |
| 1261 | PR00320B | 12.19 | 1.514e−10 | 67-81 | PR00320 | G-PROTEIN BETA WD-40 |
| | | | | | | REPEAT SIGNATURE |
| 1261 | PR00320C | 13.01 | 2.500e−09 | 67-81 | PR00320 | G-PROTEIN BETA WD-40 |
| | | | | | | REPEAT SIGNATURE |
| 1261 | PR00320C | 13.01 | 4.960e−10 | 203-217 | PR00320 | G-PROTEIN BETA WD-40 |
| | | | | | | REPEAT SIGNATURE |
| 1262 | BL00019A | 12.56 | 3.475e−13 | 73-83 | BL00019 | Actinin-type actin- |
| | | | | | | binding domain |
| | | | | | | proteins. |
| 1262 | BL00019B | 13.34 | 4.288e−10 | 2002-2024 | BL00019 | Actinin-type actin- |
| | | | | | | binding domain |
| | | | | | | proteins. |
| 1262 | BL00019B | 13.34 | 9.135e−10 | 98-120 | BL00019 | Actinin-type actin- |
| | | | | | | binding domain |
| | | | | | | proteins. |
| 1262 | BL00019C | 14.66 | 4.800e−30 | 146-181 | BL00019 | Actinin-type actin- |
| | | | | | | binding domain |
| | | | | | | proteins. |
| 1262 | BL00019D | 15.33 | 2.623e−13 | 2465-2494 | BL00019 | Actinin-type actin- |
| | | | | | | binding domain |
| | | | | | | proteins. |
| 1262 | BL00019D | 15.33 | 8.105e−09 | 210-239 | BL00019 | Actinin-type actin- |
| | | | | | | binding domain |
| | | | | | | proteins. |
| 1262 | BL00019F | 19.68 | 6.609e−09 | 182-203 | BL00019 | Actinin-type actin- |
| | | | | | | binding domain |
| | | | | | | proteins. |
| 1264 | BL00514C | 17.41 | 4.000e−29 | 59-95 | BL00514 | Fibrinogen beta and |
| | | | | | | gamma chains C-terminal |
| | | | | | | domain proteins. |
| 1264 | BL00514D | 15.35 | 7.511e−12 | 100-112 | BL00514 | Fibrinogen beta and |
| | | | | | | gamma chains C-terminal |
| | | | | | | domain proteins. |
| 1264 | BL00514E | 14.28 | 3.951e−10 | 119-135 | BL00514 | Fibrinogen beta and |
| | | | | | | gamma chains C-terminal |
| | | | | | | domain proteins. |
| 1264 | BL00514G | 15.98 | 2.268e−16 | 184-213 | BL00514 | Fibrinogen beta and |
| | | | | | | gamma chains C-terminal |
| | | | | | | domain proteins. |
| 1264 | BL00514H | 14.95 | 7.245e−15 | 217-241 | BL00514 | Fibrinogen beta and |
| | | | | | | gamma chains C-terminal |
| | | | | | | domain proteins. |
| 1265 | BL00038B | 16.97 | 4.273e−11 | 112-132 | BL00038 | Myc-type, ‘helix-loop- |
| | | | | | | helix’ dimerization |
| | | | | | | domain proteins. |
| 1266 | BL00421A | 11.79 | 3.864e−20 | 8-26 | BL00421 | Transmembrane 4 family |
| | | | | | | proteins. |
| 1266 | BL00421B | 17.62 | 5.737e−39 | 62-100 | BL00421 | Transmembrane 4 family |
| | | | | | | proteins. |
| 1266 | BL00421C | 12.89 | 3.667e−11 | 146-157 | BL00421 | Transmembrane 4 family |
| | | | | | | proteins. |
| 1266 | BL00421E | 20.97 | 4.115e−26 | 192-221 | BL00421 | Transmembrane 4 family |
| | | | | | | proteins. |
| 1266 | BL00456C | 24.55 | 7.223e−09 | 52-106 | BL00456 | Sodium: solute symporter |
| | | | | | | family proteins. |
| 1266 | PD02680A | 23.51 | 9.341e−10 | 60-110 | PD02680 | TRANSPORT GLUCONATE |
| | | | | | | TRANSMEMBRANE PROTEIN |
| | | | | | | PERMEA. |
| 1266 | PR00259A | 9.27 | 2.241e−22 | 12-35 | PR00259 | TRANSMEMBRANE FOUR |
| | | | | | | FAMILY SIGNATURE |
| 1266 | PR00259B | 14.81 | 8.071e−28 | 56-82 | PR00259 | TRANSMEMBRANE FOUR |
| | | | | | | FAMILY SIGNATURE |
| 1266 | PR00259C | 16.40 | 2.688e−30 | 83-111 | PR00259 | TRANSMEMBRANE FOUR |
| | | | | | | FAMILY SIGNATURE |
| 1266 | PR00259D | 13.50 | 4.316e−26 | 195-221 | PR00259 | TRANSMEMBRANE FOUR |
| | | | | | | FAMILY SIGNATURE |
| 1268 | BL00223A | 15.59 | 4.783e−14 | 252-285 | BL00223 | Annexins repeat |
| | | | | | | proteins domain |
| | | | | | | proteins. |
| 1268 | BL00223A | 15.59 | 5.500e−21 | 93-126 | BL00223 | Annexins repeat |
| | | | | | | proteins domain |
| | | | | | | proteins. |
| 1268 | BL00223A | 15.59 | 5.500e−32 | 21-54 | BL00223 | Annexins repeat |
| | | | | | | proteins domain |
| | | | | | | proteins. |
| 1268 | BL00223B | 28.47 | 1.000e−40 | 162-211 | BL00223 | Annexins repeat |
| | | | | | | proteins domain |
| | | | | | | proteins. |
| 1268 | BL00223C | 24.79 | 1.000e−40 | 239-293 | BL00223 | Annexins repeat |
| | | | | | | proteins domain |
| | | | | | | proteins. |
| 1268 | BL00223C | 24.79 | 1.424e−14 | 80-134 | BL00223 | Annexins repeat |
| | | | | | | proteins domain |
| | | | | | | proteins. |
| 1268 | BL00223C | 24.79 | 2.515e−10 | 8-62 | BL00223 | Annexins repeat |
| | | | | | | proteins domain |
| | | | | | | proteins. |
| 1268 | PR00196A | 11.16 | 6.704e−10 | 102-124 | PR00196 | ANNEXIN FAMILY |
| | | | | | | SIGNATURE |
| 1268 | PR00196A | 11.16 | 9.100e−21 | 30-52 | PR00196 | ANNEXIN FAMILY |
| | | | | | | SIGNATURE |
| 1268 | PR00196B | 10.68 | 3.700e−17 | 70-86 | PR00196 | ANNEXIN FAMILY |
| | | | | | | SIGNATURE |
| 1268 | PR00196C | 10.36 | 2.174e−23 | 97-118 | PR00196 | ANNEXIN FAMILY |
| | | | | | | SIGNATURE |
| 1268 | PR00196C | 10.36 | 5.167e−15 | 25-46 | PR00196 | ANNEXIN FAMILY |
| | | | | | | SIGNATURE |
| 1268 | PR00196C | 10.36 | 7.344e−13 | 256-277 | PR00196 | ANNEXIN FAMILY |
| | | | | | | SIGNATURE |
| 1268 | PR00196D | 21.86 | 3.032e−24 | 180-206 | PR00196 | ANNEXIN FAMILY |
| | | | | | | SIGNATURE |
| 1268 | PR00196E | 9.19 | 1.118e−10 | 101-121 | PR00196 | ANNEXIN FAMILY |
| | | | | | | SIGNATURE |
| 1268 | PR00196E | 9.19 | 8.333e−23 | 260-280 | PR00196 | ANNEXIN FAMILY |
| | | | | | | SIGNATURE |
| 1268 | PR00196F | 13.89 | 2.714e−15 | 288-303 | PR00196 | ANNEXIN FAMILY |
| | | | | | | SIGNATURE |
| 1268 | PR00196F | 13.89 | 4.188e−09 | 129-144 | PR00196 | ANNEXIN FAMILY |
| | | | | | | SIGNATURE |
| 1268 | PR00196G | 11.72 | 3.000e−14 | 304-317 | PR00196 | ANNEXIN FAMILY |
| | | | | | | SIGNATURE |
| 1268 | PR00196G | 11.72 | 9.217e−10 | 229-242 | PR00196 | ANNEXIN FAMILY |
| | | | | | | SIGNATURE |
| 1268 | PR00197B | 7.56 | 2.206e−09 | 30-52 | PR00197 | ANNEXIN TYPE I |
| 1268 | PR00197D | 7.50 | 1.250e−15 | 25-46 | PR00197 | ANNEXIN TYPE I |
| | | | | | | SIGNATURE |
| 1268 | PR00197D | 7.50 | 1.542e−12 | 256-277 | PR00197 | ANNEXIN TYPE I |
| | | | | | | SIGNATURE |
| 1268 | PR00197D | 7.50 | 1.844e−18 | 97-118 | PR00197 | ANNEXIN TYPE I |
| | | | | | | SIGNATURE |
| 1268 | PR00197E | 11.89 | 8.463e−14 | 180-206 | PR00197 | ANNEXIN TYPE I |
| | | | | | | SIGNATURE |
| 1268 | PR00197F | 9.03 | 5.250e−16 | 260-280 | PR00197 | ANNEXIN TYPE I |
| | | | | | | SIGNATURE |
| 1268 | PR00197F | 9.03 | 7.894e−10 | 101-121 | PR00197 | ANNEXIN TYPE I |
| | | | | | | SIGNATURE |
| 1268 | PR00198B | 8.71 | 9.357e−10 | 30-52 | PR00198 | ANNEXIN TYPE II |
| | | | | | | SIGNATURE |
| 1268 | PR00198C | 14.32 | 6.718e−10 | 70-86 | PR00198 | ANNEXIN TYPE II |
| | | | | | | SIGNATURE |
| 1268 | PR00198D | 7.65 | 2.271e−13 | 256-277 | PR00198 | ANNEXIN TYPE II |
| | | | | | | SIGNATURE |
| 1268 | PR00198D | 7.65 | 8.333e−15 | 97-118 | PR00198 | ANNEXIN TYPE II |
| | | | | | | SIGNATURE |
| 1268 | PR00198D | 7.65 | 9.894e−13 | 25-46 | PR00198 | ANNEXIN TYPE II |
| | | | | | | SIGNATURE |
| 1268 | PR00198E | 14.67 | 6.381e−11 | 180-206 | PR00198 | ANNEXIN TYPE II |
| | | | | | | SIGNATURE |
| 1268 | PR00198G | 8.09 | 4.656e−09 | 101-121 | PR00198 | ANNEXIN TYPE II |
| | | | | | | SIGNATURE |
| 1268 | PR00198G | 8.09 | 7.943e−16 | 260-280 | PR00198 | ANNEXIN TYPE II |
| | | | | | | SIGNATURE |
| 1268 | PR00198H | 12.05 | 1.462e−10 | 304-317 | PR00198 | ANNEXIN TYPE II |
| | | | | | | SIGNATURE |
| 1268 | PR00199B | 6.86 | 1.574e−13 | 30-52 | PR00199 | ANNEXIN TYPE III |
| | | | | | | SIGNATURE |
| 1268 | PR00199B | 6.86 | 8.313e−09 | 102-124 | PR00199 | ANNEXIN TYPE III |
| | | | | | | SIGNATURE |
| 1268 | PR00199C | 13.84 | 1.857e−09 | 70-86 | PR00199 | ANNEXIN TYPE III |
| | | | | | | SIGNATURE |
| 1268 | PR00199D | 5.65 | 3.443e−15 | 97-118 | PR00199 | ANNEXIN TYPE III |
| | | | | | | SIGNATURE |
| 1268 | PR00199D | 5.65 | 5.375e−14 | 25-46 | PR00199 | ANNEXIN TYPE III |
| | | | | | | SIGNATURE |
| 1268 | PR00199D | 5.65 | 7.987e−13 | 256-277 | PR00199 | ANNEXIN TYPE III |
| | | | | | | SIGNATURE |
| 1268 | PR00199F | 16.19 | 5.636e−16 | 180-206 | PR00199 | ANNEXIN TYPE III |
| | | | | | | SIGNATURE |
| 1268 | PR00199G | 9.09 | 6.365e−09 | 102-127 | PR00199 | ANNEXIN TYPE III |
| | | | | | | SIGNATURE |
| 1268 | PR00199G | 9.09 | 8.364e−21 | 261-286 | PR00199 | ANNEXIN TYPE III |
| | | | | | | SIGNATURE |
| 1268 | PR00199H | 12.62 | 5.339e−12 | 304-317 | PR00199 | ANNEXIN TYPE III |
| | | | | | | SIGNATURE |
| 1268 | PR00200A | 4.93 | 2.125e−14 | 5-15 | PR00200 | ANNEXIN TYPE IV |
| | | | | | | SIGNATURE |
| 1268 | PR00200B | 7.39 | 1.643e−29 | 30-52 | PR00200 | ANNEXIN TYPE IV |
| | | | | | | SIGNATURE |
| 1268 | PR00200C | 8.76 | 1.500e−12 | 54-62 | PR00200 | ANNEXIN TYPE IV |
| | | | | | | SIGNATURE |
| 1268 | PR00200D | 10.01 | 2.286e−22 | 70-86 | PR00200 | ANNEXIN TYPE IV |
| | | | | | | SIGNATURE |
| 1268 | PR00200E | 10.00 | 1.110e−27 | 97-118 | PR00200 | ANNEXIN TYPE IV |
| | | | | | | SIGNATURE |
| 1268 | PR00200E | 10.00 | 2.111e−14 | 25-46 | PR00200 | ANNEXIN TYPE IV |
| | | | | | | SIGNATURE |
| 1268 | PR00200E | 10.00 | 2.859e−11 | 256-277 | PR00200 | ANNEXIN TYPE IV |
| | | | | | | SIGNATURE |
| 1268 | PR00200F | 13.72 | 1.118e−35 | 180-206 | PR00200 | ANNEXIN TYPE IV |
| | | | | | | SIGNATURE |
| 1268 | PR00200G | 9.43 | 1.000e−34 | 260-286 | PR00200 | ANNEXIN TYPE IV |
| | | | | | | SIGNATURE |
| 1268 | PR00200G | 9.43 | 1.983e−09 | 101-127 | PR00200 | ANNEXIN TYPE IV |
| | | | | | | SIGNATURE |
| 1268 | PR00200G | 9.43 | 5.294e−11 | 29-55 | PR00200 | ANNEXIN TYPE IV |
| | | | | | | SIGNATURE |
| 1268 | PR00200H | 13.68 | 1.766e−18 | 304-317 | PR00200 | ANNEXIN TYPE IV |
| | | | | | | SIGNATURE |
| 1268 | PR00201A | 6.05 | 4.770e−16 | 30-52 | PR00201 | ANNEXIN TYPE V |
| | | | | | | SIGNATURE |
| 1268 | PR00201C | 11.13 | 9.316e−12 | 70-86 | PR00201 | ANNEXIN TYPE V |
| | | | | | | SIGNATURE |
| 1268 | PR00201D | 10.49 | 1.456e−15 | 97-118 | PR00201 | ANNEXIN TYPE V |
| | | | | | | SIGNATURE |
| 1268 | PR00201D | 10.49 | 6.179e−09 | 25-46 | PR00201 | ANNEXIN TYPE V |
| | | | | | | SIGNATURE |
| 1268 | PR00201E | 12.37 | 4.103e−15 | 180-206 | PR00201 | ANNEXIN TYPE V |
| | | | | | | SIGNATURE |
| 1268 | PR00201G | 11.02 | 8.402e−10 | 29-55 | PR00201 | ANNEXIN TYPE V |
| | | | | | | SIGNATURE |
| 1268 | PR00201G | 11.02 | 9.419e−26 | 260-286 | PR00201 | ANNEXIN TYPE V |
| | | | | | | SIGNATURE |
| 1268 | PR00201G | 11.02 | 9.912e−11 | 101-127 | PR00201 | ANNEXIN TYPE V |
| | | | | | | SIGNATURE |
| 1268 | PR00201H | 12.04 | 4.375e−14 | 304-317 | PR00201 | ANNEXIN TYPE V |
| | | | | | | SIGNATURE |
| 1268 | PR00202B | 11.44 | 2.763e−11 | 29-52 | PR00202 | ANNEXIN TYPE VI |
| | | | | | | SIGNATURE |
| 1268 | PR00202C | 13.34 | 3.800e−11 | 70-86 | PR00202 | ANNEXIN TYPE VI |
| | | | | | | SIGNATURE |
| 1268 | PR00202D | 5.58 | 1.908e−09 | 25-46 | PR00202 | ANNEXIN TYPE VI |
| | | | | | | SIGNATURE |
| 1268 | PR00202D | 5.58 | 3.224e−15 | 97-118 | PR00202 | ANNEXIN TYPE VI |
| | | | | | | SIGNATURE |
| 1268 | PR00202E | 13.00 | 4.643e−16 | 180-206 | PR00202 | ANNEXIN TYPE VI |
| | | | | | | SIGNATURE |
| 1268 | PR00202G | 8.01 | 4.833e−28 | 260-286 | PR00202 | ANNEXIN TYPE VI |
| | | | | | | SIGNATURE |
| 1268 | PR00202G | 8.01 | 5.881e−09 | 101-127 | PR00202 | ANNEXIN TYPE VI |
| | | | | | | SIGNATURE |
| 1268 | PR00202G | 8.01 | 9.237e−09 | 29-55 | PR00202 | ANNEXIN TYPE VI |
| | | | | | | SIGNATURE |
| 1268 | PR00202H | 9.20 | 4.740e−11 | 304-317 | PR00202 | ANNEXIN TYPE VI |
| | | | | | | SIGNATURE |
| 1268 | PR00301D | 15.51 | 7.395e−09 | 38-58 | PR00301 | 70 KD HEAT SHOCK |
| | | | | | | PROTEIN SIGNATURE |
| 1269 | BL01179A | 12.63 | 1.429e−11 | 209-220 | BL01179 | Phosphotyrosine |
| | | | | | | interaction domain |
| | | | | | | proteins (PID) profile. |
| 1269 | BL01179B | 15.18 | 9.679e−11 | 400-414 | BL01179 | Phosphotyrosine |
| | | | | | | interaction domain |
| | | | | | | proteins (PID) profile. |
| 1270 | BL01033A | 16.94 | 7.923e−18 | 25-46 | BL01033 | Globins profile. |
| 1270 | BL01033B | 13.81 | 1.000e−15 | 93-104 | BL01033 | Globins profile. |
| 1270 | PR00612D | 9.76 | 3.415e−10 | 80-93 | PR00612 | ALPHA HAEMOGLOBIN |
| | | | | | | SIGNATURE |
| 1270 | PR00814A | 12.94 | 5.500e−22 | 30-46 | PR00814 | BETA HAEMOGLOBIN |
| | | | | | | SIGNATURE |
| 1270 | PR00814B | 9.18 | 3.250e−17 | 48-63 | PR00814 | BETA HAEMOGLOBIN |
| | | | | | | SIGNATURE |
| 1270 | PR00814C | 9.20 | 4.273e−16 | 72-89 | PR00814 | BETA HAEMOGLOBIN |
| | | | | | | SIGNATURE |
| 1270 | PR00814D | 15.25 | 2.286e−09 | 94-99 | PR00814 | BETA HAEMOGLOBIN |
| | | | | | | SIGNATURE |
| 1270 | PR00814E | 10.17 | 8.071e−19 | 128-144 | PR00814 | BETA HAEMOGLOBIN |
| | | | | | | SIGNATURE |
| 1273 | BL00407A | 18.57 | 8.500e−35 | 11-47 | BL00407 | Connexins proteins. |
| 1273 | BL00407B | 14.23 | 1.000e−35 | 48-78 | BL00407 | Connexins proteins. |
| 1273 | BL00407C | 14.61 | 6.850e−31 | 79-106 | BL00407 | Connexins proteins. |
| 1273 | BL00407D | 17.61 | 5.091e−28 | 157-186 | BL00407 | Connexins proteins. |
| 1273 | BL00407E | 22.17 | 1.000e−40 | 195-239 | BL00407 | Connexins proteins. |
| 1273 | PR00206A | 11.35 | 9.053e−27 | 29-53 | PR00206 | CONNEXIN SIGNATURE |
| 1273 | PR00206B | 13.75 | 7.882e−30 | 60-82 | PR00206 | CONNEXIN SIGNATURE |
| 1273 | PR00206C | 15.16 | 3.842e−23 | 85-105 | PR00206 | CONNEXIN SIGNATURE |
| 1273 | PR00206D | 16.57 | 4.429e−26 | 159-185 | PR00206 | CONNEXIN SIGNATURE |
| 1273 | PR00206E | 15.09 | 1.857e−25 | 195-215 | PR00206 | CONNEXIN SIGNATURE |
| 1273 | PR00206F | 16.77 | 6.571e−23 | 216-239 | PR00206 | CONNEXIN SIGNATURE |
| 1274 | BL00021B | 13.33 | 3.786e−18 | 34-51 | BL00021 | Kringle domain |
| | | | | | | proteins. |
| 1274 | BL00021D | 24.56 | 4.759e−11 | 190-231 | BL00021 | Kringle domain |
| | | | | | | proteins. |
| 1274 | BL00134A | 11.96 | 9.609e−18 | 34-50 | BL00134 | Serine proteases, |
| | | | | | | trypsin family, |
| | | | | | | histidine proteins. |
| 1274 | BL00134B | 15.99 | 5.714e−19 | 185-208 | BL00134 | Serine proteases, |
| | | | | | | trypsin family, |
| | | | | | | histidine proteins. |
| 1274 | BL00134C | 13.45 | 4.750e−12 | 218-231 | BL00134 | Serine proteases, |
| | | | | | | trypsin family, |
| | | | | | | histidine proteins. |
| 1274 | BL00495K | 12.58 | 3.796e−09 | 36-68 | BL00495 | Apple domain proteins. |
| 1274 | BL01253D | 4.84 | 9.855e−12 | 34-47 | BL01253 | Type I fibronectin |
| | | | | | | domain proteins. |
| 1274 | BL01253G | 11.34 | 7.972e−14 | 184-197 | BL01253 | Type I fibronectin |
| | | | | | | domain proteins. |
| 1274 | BL01253H | 13.15 | 7.680e−12 | 200-234 | BL01253 | Type I fibronectin |
| | | | | | | domain proteins. |
| 1274 | PR00722A | 12.27 | 6.087e−16 | 35-50 | PR00722 | CHYMOTRYPSIN SERINE |
| | | | | | | PROTEASE FAMILY (S1) |
| | | | | | | SIGNATURE |
| 1274 | PR00722C | 10.87 | 5.500e−15 | 184-196 | PR00722 | CHYMOTRYPSIN SERINE |
| | | | | | | PROTEASE FAMILY (S1) |
| | | | | | | SIGNATURE |
| 1276 | PD01876C | 21.73 | 8.529e−11 | 461-513 | PD01876 | ANTIGEN MELANOMA- |
| | | | | | | ASSOCIATED MULTIGENE |
| | | | | | | FAMILY TUM. |
| 1276 | PR00411A | 15.95 | 4.724e−09 | 749-771 | PR00411 | PYRIDINE NUCLEOTIDE |
| | | | | | | DISULPHIDE REDUCTASE |
| | | | | | | CLASS-I SIGNATURE |
| 1279 | BL01310 | 14.74 | 1.321e−36 | 28-63 | BL01310 | ATP1G1/PLM/MAT8 |
| | | | | | | family proteins. |
| 1281 | BL00296B | 15.98 | 6.625e−09 | 83-136 | BL00296 | Chaperonins cpn60 |
| | | | | | | proteins. |
| 1281 | BL00750A | 20.07 | 1.310e−30 | 32-74 | BL00750 | Chaperonins TCP-1 |
| | | | | | | proteins. |
| 1281 | BL00750B | 16.17 | 7.517e−37 | 76-125 | BL00750 | Chaperonins TCP-1 |
| | | | | | | proteins. |
| 1281 | BL00750C | 25.65 | 2.909e−15 | 157-188 | BL00750 | Chaperonins TCP-1 |
| | | | | | | proteins. |
| 1281 | BL00750D | 16.16 | 9.719e−11 | 206-224 | BL00750 | Chaperonins TCP-1 |
| | | | | | | proteins. |
| 1281 | BL00750E | 24.59 | 2.406e−21 | 296-332 | BL00750 | Chaperonins TCP-1 |
| | | | | | | proteins. |
| 1281 | BL00750F | 18.40 | 4.938e−25 | 371-411 | BL00750 | Chaperonins TCP-1 |
| | | | | | | proteins. |
| 1281 | BL00750G | 20.12 | 2.324e−28 | 432-471 | BL00750 | Chaperonins TCP-1 |
| | | | | | | proteins. |
| 1281 | BL00750H | 21.44 | 2.875e−25 | 491-525 | BL00750 | Chaperonins TCP-1 |
| | | | | | | proteins. |
| 1281 | PR00304A | 9.20 | 5.737e−15 | 41-57 | PR00304 | TAILLESS COMPLEX |
| | | | | | | POLYPEPTIDE 1 |
| | | | | | | (CHAPERONE) SIGNATURE |
| 1281 | PR00304B | 11.60 | 9.700e−18 | 63-81 | PR00304 | TAILLESS COMPLEX |
| | | | | | | POLYPEPTIDE 1 |
| | | | | | | (CHAPERONE) SIGNATURE |
| 1281 | PR00304C | 8.69 | 2.575e−17 | 93-112 | PR00304 | TAILLESS COMPLEX |
| | | | | | | POLYPEPTIDE 1 |
| | | | | | | (CHAPERONE) SIGNATURE |
| 1281 | PR00304D | 11.04 | 4.405e−17 | 374-396 | PR00304 | TAILLESS COMPLEX |
| | | | | | | POLYPEPTIDE 1 |
| | | | | | | (CHAPERONE) SIGNATURE |
| 1281 | PR00304E | 7.79 | 9.217e−13 | 408-420 | PR00304 | TAILLESS COMPLEX |
| | | | | | | POLYPEPTIDE 1 |
| | | | | | | (CHAPERONE) SIGNATURE |
| 1282 | BL00194 | 12.16 | 3.813e−15 | 47-59 | BL00194 | Thioredoxin family |
| | | | | | | proteins. |
| 1282 | BL00194 | 12.16 | 4.857e−16 | 182-194 | BL00194 | Thioredoxin family |
| | | | | | | proteins. |
| 1282 | PR00421A | 10.15 | 4.000e−10 | 46-54 | PR00421 | THIOREDOXIN FAMILY |
| | | | | | | SIGNATURE |
| 1282 | PR00421A | 10.15 | 4.857e−10 | 181-189 | PR00421 | THIOREDOXIN FAMILY |
| | | | | | | SIGNATURE |
| 1282 | PR00421B | 11.40 | 3.348e−12 | 189-198 | PR00421 | THIOREDOXIN FAMILY |
| | | | | | | SIGNATURE |
| 1282 | PR00421B | 11.40 | 9.379e−11 | 54-63 | PR00421 | THIOREDOXIN FAMILY |
| | | | | | | SIGNATURE |
| 1282 | PR00421C | 13.60 | 5.714e−10 | 233-244 | PR00421 | THIOREDOXIN FAMILY |
| | | | | | | SIGNATURE |
| 1283 | BL00142 | 8.38 | 6.625e−10 | 559-569 | BL00142 | Neutral zinc |
| | | | | | | metallopeptidases, |
| | | | | | | zinc-binding region |
| | | | | | | proteins. |
| 1283 | PF00084B | 9.45 | 5.500e−09 | 1370-1381 | PF00084 | Sushi domain proteins |
| | | | | | | (SCR repeat proteins. |
| 1283 | PR00014A | 8.22 | 8.773e−09 | 687-696 | PR00014 | FIBRONECTIN TYPE III |
| | | | | | | REPEAT SIGNATURE |
| 1283 | PR00480B | 15.41 | 2.286e−09 | 554-572 | PR00480 | ASTACIN FAMILY |
| | | | | | | SIGNATURE |
| 1284 | BL00299 | 28.84 | 4.188e−19 | 92-143 | BL00299 | Ubiquitin domain |
| | | | | | | proteins. |
| 1285 | BL00036 | 9.02 | 4.214e−13 | 197-209 | BL00036 | bZIP transcription |
| | | | | | | factors basic domain |
| | | | | | | proteins. |
| 1285 | PR00042A | 10.04 | 2.500e−22 | 113-130 | PR00042 | FOS TRANSFORMING |
| | | | | | | PROTEIN SIGNATURE |
| 1285 | PR00042B | 10.70 | 1.191e−21 | 181-197 | PR00042 | FOS TRANSFORMING |
| | | | | | | PROTEIN SIGNATURE |
| 1285 | PR00042C | 8.29 | 1.273e−22 | 198-214 | PR00042 | FOS TRANSFORMING |
| | | | | | | PROTEIN SIGNATURE |
| 1285 | PR00042D | 8.97 | 2.500e−27 | 216-237 | PR00042 | FOS TRANSFORMING |
| | | | | | | PROTEIN SIGNATURE |
| 1285 | PR00042E | 9.69 | 8.200e−29 | 237-260 | PR00042 | FOS TRANSFORMING |
| | | | | | | PROTEIN SIGNATURE |
| 1285 | PR00043B | 8.73 | 5.652e−09 | 197-213 | PR00043 | JUN TRANSCRIPTION |
| | | | | | | FACTOR SIGNATURE |
| 1286 | BL00297A | 17.58 | 4.375e−37 | 31-67 | BL00297 | Heat shock hsp70 |
| | | | | | | proteins family |
| | | | | | | proteins. |
| 1286 | BL00297B | 22.91 | 4.316e−38 | 71-119 | BL00297 | Heat shock hsp70 |
| | | | | | | proteins family |
| | | | | | | proteins. |
| 1286 | BL00297C | 9.51 | 1.000e−40 | 160-211 | BL00297 | Heat shock hsp70 |
| | | | | | | proteins family |
| | | | | | | proteins. |
| 1286 | BL00297D | 11.95 | 1.000e−40 | 220-259 | BL00297 | Heat shock hsp70 |
| | | | | | | proteins family |
| | | | | | | proteins. |
| 1286 | BL00297E | 18.56 | 6.400e−35 | 316-359 | BL00297 | Heat shock hsp70 |
| | | | | | | proteins family |
| | | | | | | proteins |
| 1286 | BL00297F | 11.84 | 1.692e−30 | 380-407 | BL00297 | Heat shock hsp70 |
| | | | | | | proteins family |
| | | | | | | proteins. |
| 1286 | BL00297G | 21.87 | 1.000e−40 | 412-466 | BL00297 | Heat shock hsp70 |
| | | | | | | proteins family |
| | | | | | | proteins. |
| 1286 | BL00297H | 15.46 | 1.000e−40 | 475-528 | BL00297 | Heat shock hsp70 |
| | | | | | | proteins family |
| | | | | | | proteins. |
| 1286 | PR00301A | 14.84 | 5.846e−17 | 29-42 | PR00301 | 70 KD HEAT SHOCK |
| | | | | | | PROTEIN SIGNATURE |
| 1286 | PR00301B | 15.36 | 3.118e−16 | 57-69 | PR00301 | 70 KD HEAT SHOCK |
| | | | | | | PROTEIN SIGNATURE |
| 1286 | PR00301D | 15.51 | 2.227e−26 | 168-188 | PR00301 | 70 KD HEAT SHOCK |
| | | | | | | PROTEIN SIGNATURE |
| 1286 | PR00301E | 8.11 | 4.789e−13 | 228-238 | PR00301 | 70 KD HEAT SHOCK |
| | | | | | | PROTEIN SIGNATURE |
| 1286 | PR00301F | 13.98 | 1.857e−19 | 355-371 | PR00301 | 70 KD HEAT SHOCK |
| | | | | | | PROTEIN SIGNATURE |
| 1286 | PR00301G | 13.78 | 1.000e−25 | 387-407 | PR00301 | 70 KD HEAT SHOCK |
| | | | | | | PROTEIN SIGNATURE |
| 1286 | PR00301H | 8.81 | 5.909e−20 | 412-431 | PR00301 | 70 KD HEAT SHOCK |
| | | | | | | PROTEIN SIGNATURE |
| 1286 | PR00301I | 12.76 | 5.500e−18 | 493-509 | PR00301 | 70 KD HEAT SHOCK |
| | | | | | | PROTEIN SIGNATURE |
| 1287 | BL00194 | 12.16 | 3.813e−15 | 398-410 | BL00194 | Thioredoxin family |
| | | | | | | proteins. |
| 1287 | BL00194 | 12.16 | 5.091e−17 | 49-61 | BL00194 | Thioredoxin family |
| | | | | | | proteins. |
| 1287 | PR00421A | 10.15 | 1.429e−10 | 397-405 | PR00421 | THIOREDOXIN FAMILY |
| | | | | | | SIGNATURE |
| 1287 | PR00421A | 10.15 | 3.160e−09 | 48-56 | PR00421 | THIOREDOXIN FAMILY |
| | | | | | | SIGNATURE |
| 1287 | PR00421B | 11.40 | 1.000e−13 | 56-65 | PR00421 | THIOREDOXIN FAMILY |
| | | | | | | SIGNATURE |
| 1287 | PR00421B | 11.40 | 3.348e−12 | 405-414 | PR00421 | THIOREDOXIN FAMILY |
| | | | | | | SIGNATURE |
| 1287 | PR00421C | 13.60 | 5.286e−10 | 446-457 | PR00421 | THIOREDOXIN FAMILY |
| | | | | | | SIGNATURE |
| 1287 | PR00421C | 13.60 | 5.500e−09 | 96-107 | PR00421 | THIOREDOXIN FAMILY |
| | | | | | | SIGNATURE |
| 1288 | BL00251A | 14.27 | 1.383e−10 | 121-138 | BL00251 | TNF family proteins. |
| 1288 | BL00251B | 11.40 | 5.200e−17 | 171-190 | BL00251 | TNF family proteins. |
| 1288 | BL00251C | 13.97 | 5.250e−14 | 238-256 | BL00251 | TNF family proteins. |
| 1288 | BL00251D | 12.03 | 1.529e−09 | 269-280 | BL00251 | TNF family proteins. |
| 1289 | BL00387A | 14.69 | 3.423e−14 | 44-58 | BL00387 | Inorganic |
| | | | | | | pyrophosphatase |
| | | | | | | proteins. |
| 1289 | BL00387B | 27.02 | 4.103e−31 | 72-109 | BL00387 | Inorganic |
| | | | | | | pyrophosphatase |
| | | | | | | proteins. |
| 1289 | BL00387C | 20.60 | 1.310e−24 | 133-163 | BL00387 | Inorganic |
| | | | | | | pyrophosphatase |
| | | | | | | proteins. |
| 1289 | BL00387D | 21.31 | 6.786e−23 | 167-199 | BL00387 | Inorganic |
| | | | | | | pyrophosphatase |
| | | | | | | proteins. |
| 1290 | BL00115Z | 3.12 | 7.022e−09 | 255-303 | BL00115 | Eukaryotic RNA |
| | | | | | | polymerase II |
| | | | | | | heptapeptide repeat |
| | | | | | | proteins. |
| 1290 | BL00478B | 14.79 | 3.500e−12 | 405-419 | BL00478 | LIM domain proteins. |
| 1290 | BL00478B | 14.79 | 3.739e−14 | 463-477 | BL00478 | LIM domain proteins. |
| 1290 | BL00478B | 14.79 | 6.000e−12 | 530-544 | BL00478 | LIM domain proteins. |
| 1290 | DM00984B | 15.18 | 4.822e−25 | 420-474 | DM00984 | w MYOD MYOBLAST |
| | | | | | | DETERMINATION SHORT. |
| 1290 | DM00984C | 7.66 | 8.036e−11 | 475-488 | DM00984 | w MYOD MYOBLAST |
| | | | | | | DETERMINATION SHORT. |
| 1292 | BL00470A | 16.25 | 6.077e−11 | 57-77 | BL00470 | Isocitrate and |
| | | | | | | isopropylmalate |
| | | | | | | dehydrogenases |
| | | | | | | proteins. |
| 1292 | BL00470C | 15.43 | 4.375e−11 | 162-176 | BL00470 | Isocitrate and |
| | | | | | | isopropylmalate |
| | | | | | | dehydrogenases |
| | | | | | | proteins. |
| 1292 | BL00470D | 21.75 | 8.500e−13 | 269-299 | BL00470 | Isocitrate and |
| | | | | | | isopropylmalate |
| | | | | | | dehydrogenases |
| | | | | | | proteins. |
| 1293 | BL00325A | 24.83 | 2.125e−26 | 61-92 | BL00325 | Actin-depolymerizing |
| | | | | | | proteins. |
| 1293 | BL00325B | 21.66 | 1.000e−40 | 93-138 | BL00325 | Actin-depolymerizing |
| | | | | | | proteins. |
| 1293 | PR00006A | 13.46 | 2.000e−31 | 17-41 | PR00006 | COFILIN/DESTRIN FAMILY |
| | | | | | | SIGNATURE |
| 1293 | PR00006B | 4.38 | 1.391e−27 | 79-99 | PR00006 | COFILIN/DESTRIN FAMILY |
| | | | | | | SIGNATURE |
| 1293 | PR00006C | 9.30 | 1.500e−28 | 100-121 | PR00006 | COFILIN/DESTRIN FAMILY |
| | | | | | | SIGNATURE |
| 1293 | PR00006D | 14.99 | 9.750e−21 | 122-138 | PR00006 | COFILIN/DESTRIN FAMILY |
| | | | | | | SIGNATURE |
| 1293 | PR00006E | 9.61 | 1.462e−14 | 153-165 | PR00006 | COFILIN/DESTRIN FAMILY |
| | | | | | | SIGNATURE |
| 1294 | BL00183 | 28.97 | 6.586e−33 | 50-97 | BL00183 | Ubiquitin-conjugating |
| | | | | | | enzymes proteins. |
| 1295 | BL00113A | 12.74 | 7.508e−09 | 8-24 | BL00113 | Adenylate kinase |
| | | | | | | proteins. |
| 1295 | BL00211A | 12.23 | 1.000e−09 | 9-20 | BL00211 | ABC transporters family |
| | | | | | | proteins. |
| 1295 | BL00567A | 10.66 | 8.714e−09 | 6-24 | BL00567 | Phosphoribulokinase |
| | | | | | | proteins. |
| 1295 | BL00674B | 4.46 | 9.392e−09 | 4-25 | BL00674 | AAA-protein family |
| | | | | | | proteins. |
| 1295 | BL00856A | 17.25 | 4.176e−11 | 8-20 | BL00856 | Guanylate kinase |
| | | | | | | proteins. |
| 1295 | BL00856B | 9.61 | 2.565e−22 | 36-56 | BL00856 | Guanylate kinase |
| | | | | | | proteins. |
| 1295 | BL00856C | 29.21 | 1.409e−38 | 64-111 | BL00856 | Guanylate kinase |
| | | | | | | proteins. |
| 1295 | PR00449A | 13.20 | 3.596e−10 | 5-26 | PR00449 | TRANSFORMING PROTEIN |
| | | | | | | P21 RAS SIGNATURE |
| 1297 | BL00291A | 4.49 | 3.586e−09 | 55-89 | BL00291 | Prion protein. |
| 1297 | BL00309A | 19.16 | 5.065e−16 | 125-149 | BL00309 | Vertebrate galactoside- |
| | | | | | | binding lectin |
| | | | | | | proteins. |
| 1297 | BL00309B | 12.11 | 4.500e−16 | 150-164 | BL00309 | Vertebrate galactoside- |
| | | | | | | binding lectin |
| | | | | | | proteins. |
| 1297 | BL00309C | 18.65 | 1.000e−22 | 171-195 | BL00309 | Vertebrate galactoside- |
| | | | | | | binding lectin |
| | | | | | | proteins. |
| 1297 | BL00604F | 5.96 | 4.709e−09 | 23-67 | BL00604 | Synaptophysin/ |
| | | | | | | synaptoporin proteins. |
| 1297 | DM00250B | 13.84 | 3.593e−12 | 40-63 | DM00250 | kw ANNEXIN ANTIGEN |
| | | | | | | PROLINE TUMOR. |
| 1300 | BL01113A | 17.99 | 5.091e−11 | 94-120 | BL01113 | C1q domain proteins. |
| 1303 | BL00019A | 12.56 | 3.475e−13 | 45-55 | BL00019 | Actinin-type actin- |
| | | | | | | binding domain |
| | | | | | | proteins. |
| 1303 | BL00019B | 13.34 | 8.096e−10 | 70-92 | BL00019 | Actinin-type actin- |
| | | | | | | binding domain |
| | | | | | | proteins. |
| 1303 | BL00019B | 13.34 | 8.548e−16 | 1992-2014 | BL00019 | Actinin-type actin- |
| | | | | | | binding domain |
| | | | | | | proteins. |
| 1303 | BL00019C | 14.66 | 5.171e−32 | 118-153 | BL00019 | Actinin-type actin- |
| | | | | | | binding domain |
| | | | | | | proteins. |
| 1303 | BL00019D | 15.33 | 2.703e−23 | 2455-2484 | BL00019 | Actinin-type actin- |
| | | | | | | binding domain |
| | | | | | | proteins. |
| 1303 | BL00019F | 19.68 | 3.195e−15 | 154-175 | BL00019 | Actinin-type actin- |
| | | | | | | binding domain |
| | | | | | | proteins. |
| 1303 | PR00401C | 13.16 | 1.750e−09 | 1717-1728 | PR00401 | SH2 DOMAIN SIGNATURE |
| 1306 | BL01239 | 16.10 | 1.000e−40 | 17-70 | BL01239 | Dynein light chain type |
| | | | | | | 1 proteins. |
| 1307 | BL00463 | 8.22 | 5.071e−09 | 125-136 | BL00463 | Fungal Zn(2)-Cys(6) |
| | | | | | | binuclear cluster |
| | | | | | | domain proteins. |
| 1309 | BL01207A | 12.21 | 9.069e−18 | 66-81 | BL01207 | Glypicans proteins. |
| 1309 | BL01207B | 23.69 | 3.423e−37 | 193-238 | BL01207 | Glypicans proteins. |
| 1309 | BL01207C | 19.08 | 9.308e−39 | 252-287 | BL01207 | Glypicans proteins. |
| 1309 | BL01207D | 23.23 | 5.655e−29 | 423-457 | BL01207 | Glypicans proteins. |
| 1309 | BL01207E | 13.70 | 7.375e−16 | 496-512 | BL01207 | Glypicans proteins. |
| 1310 | BL00142 | 8.38 | 1.857e−09 | 210-220 | BL00142 | Neutral zinc |
| | | | | | | metallopeptidases, |
| | | | | | | zinc-binding region |
| | | | | | | proteins. |
| 1310 | BL01177C | 17.39 | 5.333e−11 | 712-730 | BL01177 | Anaphylatoxin domain |
| | | | | | | proteins. |
| 1310 | BL01180A | 15.41 | 4.130e−11 | 220-231 | BL01180 | CUB domain proteins |
| | | | | | | profile. |
| 1310 | BL01180B | 11.58 | 3.647e−11 | 488-498 | BL01180 | CUB domain proteins |
| | | | | | | profile. |
| 1310 | BL01180B | 11.58 | 4.000e−09 | 644-654 | BL01180 | CUB domain proteins |
| | | | | | | profile. |
| 1310 | BL01180B | 11.58 | 4.750e−09 | 800-810 | BL01180 | CUB domain proteins |
| | | | | | | profile. |
| 1310 | BL01180B | 11.58 | 6.625e−09 | 917-927 | BL01180 | CUB domain proteins |
| | | | | | | profile. |
| 1310 | BL01180B | 11.58 | 8.364e−13 | 375-385 | BL01180 | CUB domain proteins |
| | | | | | | profile. |
| 1310 | BL01180C | 17.69 | 1.000e−10 | 394-407 | BL01180 | CUB domain proteins |
| | | | | | | profile. |
| 1310 | BL01180C | 17.69 | 4.500e−09 | 936-949 | BL01180 | CUB domain proteins |
| | | | | | | profile. |
| 1310 | BL01180C | 17.69 | 8.000e−09 | 663-676 | BL01180 | CUB domain proteins |
| | | | | | | profile. |
| 1310 | BL01187B | 12.04 | 2.174e−13 | 718-733 | BL01187 | Calcium-binding EGF- |
| | | | | | | like domain proteins |
| | | | | | | pattern proteins. |
| 1310 | BL01187B | 12.04 | 6.250e−17 | 563-578 | BL01187 | Calcium-binding EGF- |
| | | | | | | like domain proteins |
| | | | | | | pattern proteins. |
| 1310 | PR00010C | 11.16 | 4.273e−10 | 723-733 | PR00010 | TYPE II EGF-LIKE |
| | | | | | | SIGNATURE |
| 1310 | PR00480A | 19.40 | 3.250e−17 | 151-169 | PR00480 | ASTACIN FAMILY |
| | | | | | | SIGNATURE |
| 1310 | PR00480B | 15.41 | 9.143e−21 | 205-223 | PR00480 | ASTACIN FAMILY |
| | | | | | | SIGNATURE |
| 1310 | PR00480C | 12.53 | 1.300e−17 | 224-241 | PR00480 | ASTACIN FAMILY |
| | | | | | | SIGNATURE |
| 1310 | PR00480D | 14.26 | 7.545e−17 | 263-278 | PR00480 | ASTACIN FAMILY |
| | | | | | | SIGNATURE |
| 1310 | PR00480E | 14.96 | 6.727e−12 | 305-318 | PR00480 | ASTACIN FAMILY |
| | | | | | | SIGNATURE |
| 1311 | BL00892A | 18.17 | 8.412e−30 | 27-57 | BL00892 | HIT family proteins. |
| 1311 | BL00892B | 16.86 | 1.964e−22 | 93-116 | BL00892 | HIT family proteins. |
| 1311 | PR00332A | 10.15 | 9.625e−18 | 18-34 | PR00332 | HISTIDINE TRIAD FAMILY |
| | | | | | | SIGNATURE |
| 1311 | PR00332B | 13.62 | 1.000e−23 | 39-57 | PR00332 | HISTIDINE TRIAD FAMILY |
| | | | | | | SIGNATURE |
| 1311 | PR00332C | 7.37 | 2.200e−13 | 106-116 | PR00332 | HISTIDINE TRIAD FAMILY |
| | | | | | | SIGNATURE |
| 1312 | BL00854A | 33.93 | 9.036e−29 | 64-109 | BL00854 | Proteasome B-type |
| | | | | | | subunits proteins. |
| 1312 | BL00854C | 29.92 | 1.794e−14 | 171-199 | BL00854 | Proteasome B-type |
| | | | | | | subunits proteins. |
| 1312 | BL00854D | 13.76 | 2.800e−09 | 222-231 | BL00854 | Proteasome B-type |
| | | | | | | subunits proteins. |
| 1312 | PR00141A | 11.36 | 3.613e−17 | 67-82 | PR00141 | PROTEASOME COMPONENT |
| | | | | | | SIGNATURE |
| 1312 | PR00141B | 11.15 | 5.304e−14 | 188-199 | PR00141 | PROTEASOME COMPONENT |
| | | | | | | SIGNATURE |
| 1312 | PR00141C | 11.15 | 3.368e−10 | 199-210 | PR00141 | PROTEASOME COMPONENT |
| | | | | | | SIGNATURE |
| 1312 | PR00141D | 12.45 | 1.923e−12 | 224-235 | PR00141 | PROTEASOME COMPONENT |
| | | | | | | SIGNATURE |
| 1313 | BL00226A | 12.77 | 1.360e−14 | 71-85 | BL00226 | Intermediate filaments |
| | | | | | | proteins. |
| 1313 | BL00226B | 23.86 | 7.545e−17 | 171-218 | BL00226 | Intermediate filaments |
| | | | | | | proteins. |
| 1313 | BL00226C | 13.23 | 5.800e−13 | 236-266 | BL00226 | Intermediate filaments |
| | | | | | | proteins. |
| 1313 | BL00226D | 19.10 | 1.500e−30 | 336-382 | BL00226 | Intermediate filaments |
| | | | | | | proteins. |
| 1314 | DM01753B | 6.47 | 1.247e−09 | 276-285 | DM01753 | 6 kw OSTEOBLAST MAJOR |
| | | | | | | IMMUNOGENIC MPB70. |
| 1314 | DM01753B | 6.47 | 1.750e−13 | 538-547 | DM01753 | 6 kw OSTEOBLAST MAJOR |
| | | | | | | IMMUNOGENIC MPB70. |
| 1314 | DM01753B | 6.47 | 8.767e−09 | 139-148 | DM01753 | 6 kw OSTEOBLAST MAJOR |
| | | | | | | IMMUNOGENIC MPB70. |
| 1314 | DM01753C | 17.64 | 1.735e−09 | 199-237 | DM01753 | 6 kw OSTEOBLAST MAJOR |
| | | | | | | IMMUNOGENIC MPB70. |
| 1315 | BL00046 | 12.95 | 1.000e−40 | 36-90 | BL00046 | Histone H2A proteins. |
| 1315 | PD01672F | 8.62 | 7.029e−09 | 35-68 | PD01672 | + TRANSPORT EXCHANGER |
| | | | | | | NA H TRANS. |
| 1315 | PR00620A | 11.03 | 1.429e−24 | 16-38 | PR00620 | HISTONE H2A SIGNATURE |
| 1315 | PR00620B | 8.47 | 8.909e−17 | 46-61 | PR00620 | HISTONE H2A SIGNATURE |
| 1315 | PR00620C | 10.19 | 2.862e−15 | 61-74 | PR00620 | HISTONE H2A SIGNATURE |
| 1315 | PR00620D | 11.39 | 3.172e−15 | 75-89 | PR00620 | HISTONE H2A SIGNATURE |
| 1315 | PR00620E | 8.91 | 3.025e−12 | 89-101 | PR00620 | HISTONE H2A SIGNATURE |
| 1315 | PR00620F | 7.29 | 6.226e−16 | 102-120 | PR00620 | HISTONE H2A SIGNATURE |
| 1317 | BL00188 | 30.29 | 9.036e−32 | 640-685 | BL00188 | Biotin-requiring |
| | | | | | | enzymes attachment site |
| | | | | | | proteins. |
| 1317 | BL00189A | 19.58 | 5.279e−12 | 651-685 | BL00189 | 2-oxo acid |
| | | | | | | dehydrogenases |
| | | | | | | acyltransferase |
| | | | | | | component lipoyl bi. |
| 1317 | BL00866B | 36.29 | 2.286e−31 | 234-279 | BL00866 | Carbamoyl-phosphate |
| | | | | | | synthase subdomain |
| | | | | | | proteins. |
| 1317 | BL00866C | 23.26 | 1.621e−18 | 320-354 | BL00866 | Carbamoyl-phosphate |
| | | | | | | synthase subdomain |
| | | | | | | proteins. |
| 1317 | BL00866C | 23.26 | 5.034e−18 | 9-43 | BL00866 | Carbamoyl-phosphate |
| | | | | | | synthase subdomain |
| | | | | | | proteins. |
| 1317 | PD00187 | 10.12 | 3.118e−15 | 188-203 | PD00187 | LIGASE BIOSYNTHESIS |
| | | | | | | SYNTHETASE. |
| 1318 | BL00226B | 23.86 | 6.128e−09 | 77-124 | BL00226 | Intermediate filaments |
| | | | | | | proteins. |
| 1318 | BL00326D | 8.76 | 1.000e−40 | 62-102 | BL00326 | Tropomyosins proteins. |
| 1318 | BL00326D | 8.76 | 7.729e−09 | 6-46 | BL00326 | Tropomyosins proteins. |
| 1318 | PR00194D | 9.57 | 1.300e−23 | 17-40 | PR00194 | TROPOMYOSIN SIGNATURE |
| 1318 | PR00194E | 8.74 | 3.250e−30 | 73-98 | PR00194 | TROPOMYOSIN SIGNATURE |
| 1323 | PD01485A | 12.50 | 7.250e−10 | 129-141 | PD01485 | INITIATION FACTOR |
| | | | | | | PROTEIN TRANSLATION |
| | | | | | | BIO. |
| 1323 | PD01485B | 23.41 | 1.333e−37 | 211-251 | PD01485 | INITIATION FACTOR |
| | | | | | | PROTEIN TRANSLATION |
| | | | | | | BIO. |
| 1323 | PD01485C | 20.40 | 4.600e−36 | 257-291 | PD01485 | INITIATION FACTOR |
| | | | | | | PROTEIN TRANSLATION |
| | | | | | | BIO. |
| 1325 | PR00308A | 5.90 | 6.918e−11 | 45-59 | PR00308 | TYPE I ANTIFREEZE |
| | | | | | | PROTEIN SIGNATURE |
| 1325 | PR00308C | 3.83 | 7.312e−09 | 48-57 | PR00308 | TYPE I ANTIFREEZE |
| | | | | | | PROTEIN SIGNATURE |
| 1325 | PR00456E | 3.06 | 9.316e−09 | 41-55 | PR00456 | RIBOSOMAL PROTEIN P2 |
| | | | | | | SIGNATURE |
| 1326 | BL00464A | 29.41 | 9.700e−23 | 17-53 | BL00464 | Ribosomal protein L22 |
| | | | | | | proteins. |
| 1326 | BL00464B | 28.48 | 4.960e−35 | 106-150 | BL00464 | Ribosomal protein L22 |
| | | | | | | proteins. |
| 1328 | BL00854A | 33.93 | 4.405e−24 | 48-93 | BL00854 | Proteasome B-type |
| | | | | | | subunits proteins. |
| 1328 | BL00854C | 29.92 | 5.615e−12 | 154-182 | BL00854 | Proteasome B-type |
| | | | | | | subunits proteins. |
| 1328 | PR00141A | 11.36 | 8.800e−11 | 51-66 | PR00141 | PROTEASOME COMPONENT |
| | | | | | | SIGNATURE |
| 1329 | BL00509A | 14.33 | 3.400e−12 | 520-530 | BL00509 | Ras GTPase-activating |
| | | | | | | proteins. |
| 1329 | BL00509B | 10.28 | 4.960e−11 | 771-781 | BL00509 | Ras GTPase-activating |
| | | | | | | proteins. |
| 1329 | PF00168C | 27.49 | 7.375e−09 | 653-678 | PF00168 | C2 domain proteins. |
| 1329 | PR00401A | 14.00 | 7.075e−09 | 20-34 | PR00401 | SH2 DOMAIN SIGNATURE |
| 1329 | PR00401E | 14.10 | 5.235e−09 | 84-98 | PR00401 | SH2 DOMAIN SIGNATURE |
| 1330 | BL00113A | 12.74 | 8.338e−09 | 223-239 | BL00113 | Adenylate kinase |
| | | | | | | proteins. |
| 1330 | BL00674A | 16.91 | 2.636e−17 | 184-204 | BL00674 | AAA-protein family |
| | | | | | | proteins. |
| 1330 | BL00674B | 4.46 | 6.294e−25 | 219-240 | BL00674 | AAA-protein family |
| | | | | | | proteins. |
| 1330 | BL00674C | 22.60 | 3.077e−35 | 252-294 | BL00674 | AAA-protein family |
| | | | | | | proteins. |
| 1330 | BL00674D | 23.41 | 1.000e−40 | 311-357 | BL00674 | AAA-protein family |
| | | | | | | proteins. |
| 1330 | BL00674E | 15.24 | 9.143e−17 | 389-408 | BL00674 | AAA-protein family |
| | | | | | | proteins. |
| 1330 | BL00675A | 24.86 | 4.488e−09 | 222-265 | BL00675 | Sigma-54 interaction |
| | | | | | | domain proteins ATP- |
| | | | | | | binding region A |
| | | | | | | proteins. |
| 1330 | PR00300A | 9.56 | 3.318e−11 | 222-240 | PR00300 | ATP-DEPENDENT CLP |
| | | | | | | PROTEASE ATP-BINDING |
| | | | | | | SUBUNIT SIGNATURE |
| 1330 | PR00819B | 10.83 | 9.100e−10 | 221-236 | PR00819 | CBXX/CFQX SUPERFAMILY |
| | | | | | | SIGNATURE |
| 1330 | PR00830A | 8.41 | 9.018e−13 | 226-245 | PR00830 | ENDOPEPTIDASE LA (LON) |
| | | | | | | SERINE PROTEASE (S16) |
| | | | | | | SIGNATURE |
| 1330 | PR00918A | 13.76 | 7.181e−10 | 216-236 | PR00918 | CALICIVIRUS NON- |
| | | | | | | STRUCTURAL POLYPROTEIN |
| | | | | | | FAMILY SIGNATURE |
| 1331 | BL00284A | 15.64 | 8.714e−16 | 77-100 | BL00284 | Serpins proteins. |
| 1331 | BL00284B | 17.99 | 8.091e−12 | 176-196 | BL00284 | Serpins proteins. |
| 1331 | BL00284C | 28.56 | 3.700e−26 | 203-244 | BL00284 | Serpins proteins. |
| 1331 | BL00284D | 16.34 | 7.279e−12 | 312-338 | BL00284 | Serpins proteins. |
| 1331 | BL00284E | 19.15 | 1.333e−17 | 391-415 | BL00284 | Serpins proteins. |
| 1332 | BL00250A | 21.24 | 6.000e−15 | 211-246 | BL00250 | TGF-beta family |
| | | | | | | proteins. |
| 1332 | BL00250B | 27.37 | 1.305e−09 | 272-307 | BL00250 | TGF-beta family |
| | | | | | | proteins. |
| 1339 | BL00831A | 16.12 | 5.598e−09 | 32-60 | BL00831 | Ribosomal protein L27 |
| | | | | | | proteins. |
| 1339 | BL00831B | 21.15 | 6.348e−19 | 61-100 | BL00831 | Ribosomal protein L27 |
| | | | | | | proteins. |
| 1339 | PR00063A | 11.71 | 1.614e−09 | 34-58 | PR00063 | RIBOSOMAL PROTEIN L27 |
| | | | | | | SIGNATURE |
| 1339 | PR00063B | 15.24 | 9.700e−11 | 59-83 | PR00063 | RIBOSOMAL PROTEIN L27 |
| | | | | | | SIGNATURE |
| 1342 | BL00652A | 3.16 | 4.000e−09 | 22-28 | BL00652 | TNFR/NGFR family |
| | | | | | | cysteine-rich region |
| | | | | | | proteins. |
| 1342 | PF00084B | 9.45 | 4.375e−10 | 122-133 | PF00084 | Sushi domain proteins |
| | | | | | | (SCR repeat proteins. |
| 1342 | PF00084C | 11.25 | 3.571e−10 | 274-283 | PF00084 | Sushi domain proteins |
| | | | | | | (SCR repeat proteins. |
| 1349 | BL00113A | 12.74 | 9.031e−09 | 187-203 | BL00113 | Adenylate kinase |
| | | | | | | proteins. |
| 1349 | BL00516B | 29.10 | 1.000e−08 | 314-356 | BL00516 | Alkylbase DNA |
| | | | | | | glycosidases alkA |
| | | | | | | family proteins. |
| 1349 | BL00674A | 16.91 | 7.000e−15 | 148-168 | BL00674 | AAA-protein family |
| | | | | | | proteins. |
| 1349 | BL00674B | 4.46 | 4.000e−27 | 183-204 | BL00674 | AAA-protein family |
| | | | | | | proteins. |
| 1349 | BL00674C | 22.60 | 4.273e−38 | 216-258 | BL00674 | AAA-protein family |
| | | | | | | proteins. |
| 1349 | BL00674D | 23.41 | 6.500e−39 | 275-321 | BL00674 | AAA-protein family |
| | | | | | | proteins. |
| 1349 | BL00674E | 15.24 | 6.478e−16 | 353-372 | BL00674 | AAA-protein family |
| | | | | | | proteins. |
| 1349 | BL00675A | 24.86 | 8.538e−09 | 186-229 | BL00675 | Sigma-54 interaction |
| | | | | | | domain proteins ATP- |
| | | | | | | binding region A |
| | | | | | | proteins. |
| 1349 | PR00300A | 9.56 | 4.409e−11 | 186-204 | PR00300 | ATP-DEPENDENT CLP |
| | | | | | | PROTEASE ATP-BINDING |
| | | | | | | SUBUNIT SIGNATURE |
| 1349 | PR00819B | 10.83 | 1.318e−09 | 185-200 | PR00819 | CBXX/CFQX SUPERFAMILY |
| | | | | | | SIGNATURE |
| 1349 | PR00830A | 8.41 | 5.810e−12 | 190-209 | PR00830 | ENDOPEPTIDASE LA (LON) |
| | | | | | | SERINE PROTEASE (S16) |
| | | | | | | SIGNATURE |
| 1349 | PR00918A | 13.76 | 5.988e−10 | 180-200 | PR00918 | CALICIVIRUS NON- |
| | | | | | | STRUCTURAL POLYPROTEIN |
| | | | | | | FAMILY SIGNATURE |
| 1352 | BL00904A | 8.30 | 9.936e−09 | 320-369 | BL00904 | Protein |
| | | | | | | prenyltransferases |
| | | | | | | alpha subunit repeat |
| | | | | | | proteins proteins. |
| 1352 | DM00215 | 19.43 | 6.464e−10 | 304-336 | DM00215 | PROLINE-RICH PROTEIN 3. |
| 1353 | BL00674A | 16.91 | 5.500e−13 | 174-194 | BL00674 | AAA-protein family |
| | | | | | | proteins. |
| 1353 | BL00674A | 16.91 | 5.696e−09 | 1-21 | BL00674 | AAA-protein family |
| | | | | | | proteins. |
| 1353 | BL00674B | 4.46 | 6.500e−24 | 209-230 | BL00674 | AAA-protein family |
| | | | | | | proteins. |
| 1353 | BL00674C | 22.60 | 5.846e−35 | 242-284 | BL00674 | AAA-protein family |
| | | | | | | proteins. |
| 1353 | BL00674D | 23.41 | 1.000e−40 | 301-347 | BL00674 | AAA-protein family |
| | | | | | | proteins. |
| 1353 | BL00674E | 15.24 | 8.826e−16 | 379-398 | BL00674 | AAA-protein family |
| | | | | | | proteins. |
| 1353 | BL00675A | 24.86 | 5.613e−09 | 212-255 | BL00675 | Sigma-54 interaction |
| | | | | | | domain proteins ATP- |
| | | | | | | binding region A |
| | | | | | | proteins. |
| 1353 | PR00300A | 9.56 | 1.887e−10 | 212-230 | PR00300 | ATP-DEPENDENT CLP |
| | | | | | | PROTEASE ATP-BINDING |
| | | | | | | SUBUNIT SIGNATURE |
| 1353 | PR00819B | 10.83 | 1.529e−09 | 211-226 | PR00819 | CBXX/CFQX SUPERFAMILY |
| | | | | | | SIGNATURE |
| 1353 | PR00830A | 8.41 | 2.714e−11 | 216-235 | PR00830 | ENDOPEPTIDASE LA (LON) |
| | | | | | | SERINE PROTEASE (S16) |
| | | | | | | SIGNATURE |
| 1353 | PR00887F | 12.74 | 7.889e−09 | 267-284 | PR00887 | STRUCTURE-SPECIFIC |
| | | | | | | RECOGNITION PROTEIN |
| | | | | | | SIGNATURE |
| 1354 | BL00678 | 9.67 | 1.000e−08 | 233-243 | BL00678 | Trp-Asp (WD) repeat |
| | | | | | | proteins proteins. |
| 1354 | BL00678 | 9.67 | 7.158e−09 | 184-194 | BL00678 | Trp-Asp (WD) repeat |
| | | | | | | proteins proteins. |
| 1354 | PR00320A | 16.74 | 2.853e−10 | 74-88 | PR00320 | G-PROTEIN BETA WD-40 |
| | | | | | | REPEAT SIGNATURE |
| 1354 | PR00320A | 16.74 | 4.706e−10 | 28-42 | PR00320 | G-PROTEIN BETA WD-40 |
| | | | | | | REPEAT SIGNATURE |
| 1354 | PR00320A | 16.74 | 6.049e−09 | 231-245 | PR00320 | G-PROTEIN BETA WD-40 |
| | | | | | | REPEAT SIGNATURE |
| 1354 | PR00320B | 12.19 | 8.875e−09 | 182-196 | PR00320 | G-PROTEIN BETA WD-40 |
| | | | | | | REPEAT SIGNATURE |
| 1354 | PR00320C | 13.01 | 5.320e−10 | 74-88 | PR00320 | G-PROTEIN BETA WD-40 |
| | | | | | | REPEAT SIGNATURE |
| 1354 | PR00320C | 13.01 | 5.680e−10 | 28-42 | PR00320 | G-PROTEIN BETA WD-40 |
| | | | | | | REPEAT SIGNATURE |
| 1354 | PR00320C | 13.01 | 9.500e−12 | 182-196 | PR00320 | G-PROTEIN BETA WD-40 |
| | | | | | | REPEAT SIGNATURE |
| 1357 | BL00115Z | 3.12 | 8.412e−09 | 172-220 | BL00115 | Eukaryotic RNA |
| | | | | | | polymerase II |
| | | | | | | heptapeptide repeat |
| | | | | | | proteins. |
| 1357 | BL00412C | 10.28 | 6.932e−09 | 183-216 | BL00412 | Neuromodulin (GAP-43) |
| | | | | | | proteins. |
| 1362 | BL01145A | 13.73 | 1.000e−40 | 3-44 | BL01145 | Ribosomal protein L34e |
| | | | | | | proteins. |
| 1362 | BL01145B | 14.65 | 2.636e−20 | 88-110 | BL01145 | Ribosomal protein L34e |
| | | | | | | proteins. |
| 1363 | PR00058A | 16.66 | 1.375e−26 | 20-39 | PR00058 | RIBOSOMAL PROTEIN L5 |
| | | | | | | SIGNATURE |
| 1363 | PR00058B | 8.75 | 1.529e−27 | 43-62 | PR00058 | RIBOSOMAL PROTEIN L5 |
| | | | | | | SIGNATURE |
| 1365 | BL00112A | 22.23 | 1.000e−40 | 94-135 | BL00112 | ATP: guanido |
| | | | | | | phosphotransferases |
| | | | | | | proteins. |
| 1365 | BL00112B | 15.87 | 9.217e−31 | 155-186 | BL00112 | ATP: guanido |
| | | | | | | phosphotransferases |
| | | | | | | proteins. |
| 1365 | BL00112C | 21.77 | 1.000e−40 | 187-240 | BL00112 | ATP: guanido |
| | | | | | | phosphotransferases |
| | | | | | | proteins. |
| 1365 | BL00112D | 12.22 | 1.000e−40 | 242-286 | BL00112 | ATP: guanido |
| | | | | | | phosphotransferases |
| | | | | | | proteins. |
| 1365 | BL00112E | 17.75 | 3.455e−37 | 304-333 | BL00112 | ATP: guanido |
| | | | | | | phosphotransferases |
| | | | | | | proteins. |
| 1365 | BL00112F | 21.37 | 1.000e−40 | 350-400 | BL00112 | ATP: guanido |
| | | | | | | phosphotransferases |
| | | | | | | proteins. |
| 1366 | PR00800A | 15.23 | 9.565e−09 | 99-118 | PR00800 | AROMATIC-L-AMINO-ACID |
| | | | | | | DECARBOXYLASE SIGNATURE |
| 1367 | BL00213A | 12.95 | 9.526e−10 | 37-50 | BL00213 | Lipocalin proteins. |
| 1367 | BL00213B | 8.78 | 8.000e−10 | 120-130 | BL00213 | Lipocalin proteins. |
| 1367 | PR00179A | 13.78 | 5.680e−10 | 37-49 | PR00179 | LIPOCALIN SIGNATURE |
| 1367 | PR00179B | 9.56 | 1.000e−12 | 120-132 | PR00179 | LIPOCALIN SIGNATURE |
| 1367 | PR00179C | 19.02 | 1.000e−10 | 148-163 | PR00179 | LIPOCALIN SIGNATURE |
| 1369 | PR00050A | 11.28 | 5.865e−09 | 65-80 | PR00050 | COLD SHOCK PROTEIN |
| | | | | | | SIGNATURE |
| 1370 | PR00456F | 5.86 | 6.400e−12 | 101-112 | PR00456 | RIBOSOMAL PROTEIN P2 |
| | | | | | | SIGNATURE |
| 1371 | BL00194 | 12.16 | 9.438e−15 | 24-36 | BL00194 | Thioredoxin family |
| | | | | | | proteins. |
| 1371 | PR00421A | 10.15 | 2.286e−10 | 23-31 | PR00421 | THIOREDOXIN FAMILY |
| | | | | | | SIGNATURE |
| 1371 | PR00421B | 11.40 | 6.625e−13 | 31-40 | PR00421 | THIOREDOXIN FAMILY |
| | | | | | | SIGNATURE |
| 1371 | PR00421C | 13.60 | 8.615e−12 | 70-81 | PR00421 | THIOREDOXIN FAMILY |
| | | | | | | SIGNATURE |
| 1372 | BL00478B | 14.79 | 3.348e−14 | 157-171 | BL00478 | LIM domain proteins. |
| 1372 | BL00478B | 14.79 | 4.913e−14 | 48-62 | BL00478 | LIM domain proteins. |
| 1374 | BL00030B | 7.03 | 8.105e−09 | 50-59 | BL00030 | Eukaryotic RNA-binding |
| | | | | | | region RNP-1 proteins. |
| 1377 | BL00154A | 11.86 | 5.500e−16 | 188-205 | BL00154 | E1-E2 ATPases |
| | | | | | | phosphorylation site |
| | | | | | | proteins. |
| 1377 | BL00154B | 15.44 | 2.800e−31 | 332-368 | BL00154 | E1-E2 ATPases |
| | | | | | | phosphorylation site |
| | | | | | | proteins. |
| 1377 | BL00154C | 12.38 | 6.000e−23 | 370-388 | BL00154 | E1-E2 ATPases |
| | | | | | | phosphorylation site |
| | | | | | | proteins. |
| 1377 | BL00154D | 12.57 | 3.769e−13 | 508-518 | BL00154 | E1-E2 ATPases |
| | | | | | | phosphorylation site |
| | | | | | | proteins. |
| 1377 | BL00154E | 20.37 | 8.615e−38 | 593-633 | BL00154 | E1-E2 ATPases |
| | | | | | | phosphorylation site |
| | | | | | | proteins. |
| 1377 | BL00154F | 8.23 | 3.813e−27 | 712-735 | BL00154 | E1-E2 ATPases |
| | | | | | | phosphorylation site |
| | | | | | | proteins. |
| 1377 | BL00154G | 21.18 | 9.526e−30 | 738-771 | BL00154 | E1-E2 ATPases |
| | | | | | | phosphorylation site |
| | | | | | | proteins. |
| 1377 | BL01047B | 19.73 | 8.000e−09 | 721-741 | BL01047 | Heavy-metal-associated |
| | | | | | | domain proteins. |
| 1377 | BL01228D | 17.44 | 3.684e−12 | 713-737 | BL01228 | Hypothetical cof family |
| | | | | | | proteins. |
| 1377 | PR00119A | 17.34 | 3.000e−15 | 214-228 | PR00119 | P-TYPE CATION- |
| | | | | | | TRANSPORTING ATPASE |
| | | | | | | SUPERFAMILY SIGNATURE |
| 1377 | PR00119B | 13.94 | 2.800e−20 | 374-388 | PR00119 | P-TYPE CATION- |
| | | | | | | TRANSPORTING ATPASE |
| | | | | | | SUPERFAMILY SIGNATURE |
| 1377 | PR00119C | 11.01 | 4.500e−12 | 587-598 | PR00119 | P-TYPE CATION- |
| | | | | | | TRANSPORTING ATPASE |
| | | | | | | SUPERFAMILY SIGNATURE |
| 1377 | PR00119D | 9.56 | 3.571e−13 | 609-619 | PR00119 | P-TYPE CATION- |
| | | | | | | TRANSPORTING ATPASE |
| | | | | | | SUPERFAMILY SIGNATURE |
| 1377 | PR00119E | 8.48 | 5.200e−24 | 715-734 | PR00119 | P-TYPE CATION- |
| | | | | | | TRANSPORTING ATPASE |
| | | | | | | SUPERFAMILY SIGNATURE |
| 1377 | PR00119F | 11.81 | 7.750e−13 | 739-751 | PR00119 | P-TYPE CATION- |
| | | | | | | TRANSPORTING ATPASE |
| | | | | | | SUPERFAMILY SIGNATURE |
| 1377 | PR00120C | 9.90 | 5.800e−19 | 715-731 | PR00120 | H+-TRANSPORTING ATPASE |
| | | | | | | (PROTON PUMP) SIGNATURE |
| 1377 | PR00121A | 6.71 | 9.053e−18 | 103-117 | PR00121 | SODIUM/POTASSIUM- |
| | | | | | | TRANSPORTING ATPASE |
| | | | | | | SIGNATURE |
| 1377 | PR00121B | 7.83 | 4.214e−26 | 130-150 | PR00121 | SODIUM/POTASSIUM- |
| | | | | | | TRANSPORTING ATPASE |
| | | | | | | SIGNATURE |
| 1377 | PR00121C | 9.40 | 1.000e−24 | 294-316 | PR00121 | SODIUM/POTASSIUM- |
| | | | | | | TRANSPORTING ATPASE |
| | | | | | | SIGNATURE |
| 1377 | PR00121D | 16.72 | 1.209e−28 | 367-388 | PR00121 | SODIUM/POTASSIUM- |
| | | | | | | TRANSPORTING ATPASE |
| | | | | | | SIGNATURE |
| 1377 | PR00121E | 13.97 | 4.667e−23 | 505-523 | PR00121 | SODIUM/POTASSIUM- |
| | | | | | | TRANSPORTING ATPASE |
| | | | | | | SIGNATURE |
| 1377 | PR00121F | 6.70 | 7.750e−27 | 787-808 | PR00121 | SODIUM/POTASSIUM- |
| | | | | | | TRANSPORTING ATPASE |
| | | | | | | SIGNATURE |
| 1377 | PR00121G | 6.89 | 8.875e−26 | 854-874 | PR00121 | SODIUM/POTASSIUM- |
| | | | | | | TRANSPORTING ATPASE |
| | | | | | | SIGNATURE |
| 1377 | PR00121H | 12.14 | 5.950e−26 | 916-936 | PR00121 | SODIUM/POTASSIUM- |
| | | | | | | TRANSPORTING ATPASE |
| | | | | | | SIGNATURE |
| 1377 | PR00121I | 15.47 | 8.500e−28 | 950-974 | PR00121 | SODIUM/POTASSIUM- |
| | | | | | | TRANSPORTING ATPASE |
| | | | | | | SIGNATURE |
| 1379 | PR00833H | 2.30 | 6.423e−09 | 329-343 | PR00833 | POLLEN ALLERGEN POA PI |
| | | | | | | SIGNATURE |
| 1381 | BL00478B | 14.79 | 2.800e−11 | 279-293 | BL00478 | LIM domain proteins. |
| 1382 | BL01294A | 5.15 | 1.571e−09 | 23-34 | BL01294 | Uncharacterized protein |
| | | | | | | family UPF0038 |
| | | | | | | proteins. |
| 1382 | PR00988A | 6.39 | 8.500e−17 | 20-37 | PR00988 | URIDINE KINASE |
| | | | | | | SIGNATURE |
| 1382 | PR00988B | 11.60 | 2.915e−09 | 57-68 | PR00988 | URIDINE KINASE |
| | | | | | | SIGNATURE |
| 1382 | PR00988C | 13.64 | 6.108e−14 | 104-119 | PR00988 | URIDINE KINASE |
| | | | | | | SIGNATURE |
| 1382 | PR00988D | 5.95 | 6.878e−10 | 160-170 | PR00988 | URIDINE KINASE |
| | | | | | | SIGNATURE |
| 1382 | PR00988E | 8.27 | 3.872e−11 | 174-185 | PR00988 | URIDINE KINASE |
| | | | | | | SIGNATURE |
| 1382 | PR00988F | 12.23 | 7.828e−15 | 196-209 | PR00988 | URIDINE KINASE |
| | | | | | | SIGNATURE |
| 1383 | BL01115A | 10.22 | 2.768e−10 | 60-103 | BL01115 | GTP-binding nuclear |
| | | | | | | protein ran proteins. |
| 1383 | BL01215A | 9.75 | 3.968e−09 | 57-83 | BL01215 | Mrp family proteins. |
| 1383 | PR00449A | 13.20 | 4.706e−19 | 60-81 | PR00449 | TRANSFORMING PROTEIN |
| | | | | | | P21 RAS SIGNATURE |
| 1383 | PR00449B | 14.34 | 7.000e−15 | 83-99 | PR00449 | TRANSFORMING PROTEIN |
| | | | | | | P21 RAS SIGNATURE |
| 1383 | PR00449C | 17.27 | 8.579e−18 | 100-122 | PR00449 | TRANSFORMING PROTEIN |
| | | | | | | P21 RAS SIGNATURE |
| 1383 | PR00449D | 10.79 | 3.769e−16 | 163-176 | PR00449 | TRANSFORMING PROTEIN |
| | | | | | | P21 RAS SIGNATURE |
| 1383 | PR00449E | 13.50 | 1.450e−16 | 199-221 | PR00449 | TRANSFORMING PROTEIN |
| | | | | | | P21 RAS SIGNATURE |
| 1384 | PR00495A | 9.18 | 3.700e−25 | 27-45 | PR00495 | OBESITY FACTOR (LEPTIN) |
| | | | | | | SIGNATURE |
| 1384 | PR00495B | 10.99 | 1.099e−24 | 47-65 | PR00495 | OBESITY FACTOR (LEPTIN) |
| | | | | | | SIGNATURE |
| 1384 | PR00495C | 10.22 | 7.492e−26 | 74-94 | PR00495 | OBESITY FACTOR (LEPTIN) |
| | | | | | | SIGNATURE |
| 1384 | PR00495D | 11.96 | 3.571e−24 | 97-115 | PR00495 | OBESITY FACTOR (LEPTIN) |
| | | | | | | SIGNATURE |
| 1384 | PR00495E | 13.09 | 5.114e−26 | 118-138 | PR00495 | OBESITY FACTOR (LEPTIN) |
| | | | | | | SIGNATURE |
| 1384 | PR00495F | 7.55 | 3.492e−24 | 147-167 | PR00495 | OBESITY FACTOR (LEPTIN) |
| | | | | | | SIGNATURE |
| 1384 | PR00495G | 6.74 | 1.529e−21 | 168-183 | PR00495 | OBESITY FACTOR (LEPTIN) |
| | | | | | | SIGNATURE |
| 1386 | BL00039A | 18.44 | 4.600e−30 | 57-95 | BL00039 | DEAD-box subfamily ATP- |
| | | | | | | dependent helicases |
| | | | | | | proteins. |
| 1386 | BL00039B | 19.19 | 2.200e−20 | 97-122 | BL00039 | DEAD-box subfamily ATP- |
| | | | | | | dependent helicases |
| | | | | | | proteins. |
| 1386 | BL00039C | 15.63 | 2.500e−21 | 181-204 | BL00039 | DEAD-box subfamily ATP- |
| | | | | | | dependent helicases |
| | | | | | | proteins. |
| 1386 | BL00039D | 21.67 | 1.000e−40 | 330-375 | BL00039 | DEAD-box subfamily ATP- |
| | | | | | | dependent helicases |
| | | | | | | proteins. |
| 1386 | DM01537B | 21.63 | 1.786e−11 | 304-350 | DM01537 | kw SKI2W SKI2 NUCLEOLAR |
| | | | | | | HELICASE. |
| 1386 | PF00271 | 7.99 | 1.000e−08 | 361-368 | PF00271 | Helicases conserved C- |
| | | | | | | terminal domain |
| | | | | | | proteins. |
| 1388 | PD00078B | 13.14 | 7.600e−12 | 141-153 | PD00078 | REPEAT PROTEIN ANK |
| | | | | | | NUCLEAR ANKYR. |
| 1388 | PF00023A | 16.03 | 1.750e−10 | 187-202 | PF00023 | Ank repeat proteins. |
| 1388 | PF00023A | 16.03 | 3.250e−09 | 148-163 | PF00023 | Ank repeat proteins. |
| 1388 | PF00023B | 14.20 | 9.100e−12 | 144-153 | PF00023 | Ank repeat proteins. |
| 1390 | BL00492D | 13.23 | 5.865e−09 | 315-351 | BL00492 | Clusterin proteins. |
| 1390 | PR00497A | 6.92 | 5.553e−10 | 554-571 | PR00497 | NEUTROPHIL CYTOSOL |
| | | | | | | FACTOR P40 SIGNATURE |
| 1391 | BL01118A | 12.46 | 4.000e−13 | 36-50 | BL01118 | Translation initiation |
| | | | | | | factor SUI1 proteins. |
| 1391 | BL01118B | 26.75 | 9.308e−33 | 53-90 | BL01118 | Translation initiation |
| | | | | | | factor SUI1 proteins. |
| 1395 | PF00429 | 31.08 | 7.300e−15 | 383-432 | PF00429 | ENV polyprotein (coat |
| | | | | | | polyprotein) |
| 1395 | PR00415D | 12.72 | 8.403e−09 | 328-343 | PR00415 | ACONITASE FAMILY |
| | | | | | | SIGNATURE |
| 1395 | PR00783F | 12.33 | 3.700e−09 | 446-466 | PR00783 | MAJOR INTRINSIC PROTEIN |
| | | | | | | FAMILY SIGNATURE |
| 1396 | DM01022C | 19.84 | 3.571e−09 | 103-122 | DM01022 | LRR REPEAT. |
| 1396 | PR00019A | 11.19 | 2.565e−10 | 131-144 | PR00019 | LEUCINE-RICH REPEAT |
| | | | | | | SIGNATURE |
| 1396 | PR00019B | 11.36 | 4.000e−11 | 268-281 | PR00019 | LEUCINE-RICH REPEAT |
| | | | | | | SIGNATURE |
| 1396 | PR00019B | 11.36 | 4.600e−10 | 220-233 | PR00019 | LEUCINE-RICH REPEAT |
| | | | | | | SIGNATURE |
| 1396 | PR00019B | 11.36 | 7.840e−09 | 128-141 | PR00019 | LEUCINE-RICH REPEAT |
| | | | | | | SIGNATURE |
| 1397 | BL00299 | 28.84 | 1.000e−40 | 16-67 | BL00299 | Ubiquitin domain |
| | | | | | | proteins. |
| 1397 | PD01457A | 16.51 | 1.000e−40 | 77-121 | PD01457 | RIBOSOMAL PROTEIN 40S |
| | | | | | | ZINC-FINGER METAL. |
| 1397 | PD01457B | 13.00 | 1.000e−31 | 124-148 | PD01457 | RIBOSOMAL PROTEIN 40S |
| | | | | | | ZINC-FINGER METAL. |
| 1397 | PR00348A | 7.86 | 2.000e−26 | 11-31 | PR00348 | UBIQUITIN SIGNATURE |
| 1397 | PR00348B | 5.78 | 2.800e−27 | 32-52 | PR00348 | UBIQUITIN SIGNATURE |
| 1397 | PR00348C | 20.03 | 1.643e−27 | 53-74 | PR00348 | UBIQUITIN SIGNATURE |
| 1398 | BL00280 | 24.61 | 3.000e−29 | 165-208 | BL00280 | Pancreatic trypsin |
| | | | | | | inhibitor (Kunitz) |
| | | | | | | family proteins. |
| 1398 | BL00280 | 24.61 | 4.857e−34 | 43-86 | BL00280 | Pancreatic trypsin |
| | | | | | | inhibitor (Kunitz) |
| | | | | | | family proteins. |
| 1398 | BL00280 | 24.61 | 5.215e−10 | 104-147 | BL00280 | Pancreatic trypsin |
| | | | | | | inhibitor (Kunitz) |
| | | | | | | family proteins. |
| 1398 | PR00759A | 14.51 | 3.045e−11 | 33-47 | PR00759 | BASIC PROTEASE (KUNITZ- |
| | | | | | | TYPE) INHIBITOR FAMILY |
| | | | | | | SIGNATURE |
| 1398 | PR00759A | 14.51 | 7.900e−09 | 155-169 | PR00759 | BASIC PROTEASE (KUNITZ- |
| | | | | | | TYPE) INHIBITOR FAMILY |
| | | | | | | SIGNATURE |
| 1398 | PR00759B | 11.26 | 1.231e−09 | 183-193 | PR00759 | BASIC PROTEASE (KUNITZ- |
| | | | | | | TYPE) INHIBITOR FAMILY |
| | | | | | | SIGNATURE |
| 1398 | PR00759B | 11.26 | 1.290e−10 | 61-71 | PR00759 | BASIC PROTEASE (KUNITZ- |
| | | | | | | TYPE) INHIBITOR FAMILY |
| | | | | | | SIGNATURE |
| 1398 | PR00759C | 14.15 | 3.483e−13 | 193-208 | PR00759 | BASIC PROTEASE (KUNITZ- |
| | | | | | | TYPE) INHIBITOR FAMILY |
| | | | | | | SIGNATURE |
| 1398 | PR00759C | 14.15 | 5.636e−12 | 71-86 | PR00759 | BASIC PROTEASE (KUNITZ- |
| | | | | | | TYPE) INHIBITOR FAMILY |
| | | | | | | SIGNATURE |
| 1399 | BL00388A | 23.14 | 5.875e−40 | 5-50 | BL00388 | Proteasome A-type |
| | | | | | | subunits proteins. |
| 1399 | BL00388B | 31.38 | 6.538e−29 | 64-105 | BL00388 | Proteasome A-type |
| | | | | | | subunits proteins. |
| 1399 | BL00388C | 18.79 | 2.000e−22 | 119-140 | BL00388 | Proteasome A-type |
| | | | | | | subunits proteins. |
| 1399 | BL00388D | 20.71 | 1.391e−26 | 147-177 | BL00388 | Proteasome A-type |
| | | | | | | subunits proteins. |
| 1399 | BL00854A | 33.93 | 9.000e−11 | 36-81 | BL00854 | Proteasome B-type |
| | | | | | | subunits proteins. |
| 1399 | PF00227 | 14.68 | 5.950e−09 | 12-23 | PF00227 | Proteasome A-type and |
| | | | | | | B-type. |
| 1401 | BL00113A | 12.74 | 9.031e−09 | 171-187 | BL00113 | Adenylate kinase |
| | | | | | | proteins. |
| 1401 | BL00674A | 16.91 | 4.857e−14 | 132-152 | BL00674 | AAA-protein family |
| | | | | | | proteins. |
| 1401 | BL00674B | 4.46 | 5.235e−25 | 167-188 | BL00674 | AAA-protein family |
| | | | | | | proteins. |
| 1401 | BL00674C | 22.60 | 9.308e−35 | 200-242 | BL00674 | AAA-protein family |
| | | | | | | proteins. |
| 1401 | BL00674D | 23.41 | 4.176e−40 | 259-305 | BL00674 | AAA-protein family |
| | | | | | | proteins. |
| 1401 | BL00674E | 15.24 | 8.200e−20 | 337-356 | BL00674 | AAA-protein family |
| | | | | | | proteins. |
| 1401 | PR00051A | 10.68 | 8.382e−09 | 167-187 | PR00051 | BACTERIAL CHROMOSOMAL |
| | | | | | | REPLICATION INITIATOR |
| | | | | | | (DNAA) SIGNATURE |
| 1401 | PR00300A | 9.56 | 4.682e−11 | 170-188 | PR00300 | ATP-DEPENDENT CLP |
| | | | | | | PROTEASE ATP-BINDING |
| | | | | | | SUBUNIT SIGNATURE |
| 1401 | PR00819B | 10.83 | 2.482e−09 | 169-184 | PR00819 | CBXX/CFQX SUPERFAMILY |
| | | | | | | SIGNATURE |
| 1401 | PR00830A | 8.41 | 9.673e−13 | 174-193 | PR00830 | ENDOPEPTIDASE LA (LON) |
| | | | | | | SERINE PROTEASE (S16) |
| | | | | | | SIGNATURE |
| 1403 | BL00282 | 16.88 | 5.800e−09 | 127-149 | BL00282 | Kazal serine protease |
| | | | | | | inhibitors family |
| | | | | | | proteins. |
| 1403 | BL00612B | 11.35 | 4.600e−09 | 169-201 | BL00612 | Osteonectin domain |
| | | | | | | proteins. |
| 1404 | BL00229A | 23.57 | 3.591e−09 | 60-98 | BL00229 | Tau and MAP proteins |
| | | | | | | tubulin-binding domain |
| | | | | | | proteins. |
| 1404 | PR00456F | 5.86 | 6.400e−12 | 102-113 | PR00456 | RIBOSOMAL PROTEIN P2 |
| | | | | | | SIGNATURE |
| 1408 | BL00989A | 11.66 | 4.000e−12 | 5-18 | BL00989 | Clathrin adaptor |
| | | | | | | complexes small chain |
| | | | | | | proteins. |
| 1408 | BL00989B | 26.51 | 1.000e−40 | 66-116 | BL00989 | Clathrin adaptor |
| | | | | | | complexes small chain |
| | | | | | | proteins. |
| 1408 | PR00317F | 10.90 | 5.935e−09 | 103-117 | PR00317 | EPENDYMIN SIGNATURE |
| 1409 | BL00194 | 12.16 | 3.813e−15 | 547-559 | BL00194 | Thioredoxin family |
| | | | | | | proteins. |
| 1409 | BL00194 | 12.16 | 6.727e−17 | 198-210 | BL00194 | Thioredoxin family |
| | | | | | | proteins. |
| 1409 | BL00194 | 12.16 | 8.071e−16 | 83-95 | BL00194 | Thioredoxin family |
| | | | | | | proteins. |
| 1409 | PR00421A | 10.15 | 1.429e−10 | 546-554 | PR00421 | THIOREDOXIN FAMILY |
| | | | | | | SIGNATURE |
| 1409 | PR00421A | 10.15 | 3.143e−10 | 82-90 | PR00421 | THIOREDOXIN FAMILY |
| | | | | | | SIGNATURE |
| 1409 | PR00421A | 10.15 | 6.571e−10 | 197-205 | PR00421 | THIOREDOXIN FAMILY |
| | | | | | | SIGNATURE |
| 1409 | PR00421B | 11.40 | 1.783e−12 | 205-214 | PR00421 | THIOREDOXIN FAMILY |
| | | | | | | SIGNATURE |
| 1409 | PR00421B | 11.40 | 7.000e−14 | 90-99 | PR00421 | THIOREDOXIN FAMILY |
| | | | | | | SIGNATURE |
| 1409 | PR00421B | 11.40 | 7.750e−13 | 554-563 | PR00421 | THIOREDOXIN FAMILY |
| | | | | | | SIGNATURE |
| 1409 | PR00421C | 13.60 | 1.346e−09 | 596-607 | PR00421 | THIOREDOXIN FAMILY |
| | | | | | | SIGNATURE |
| 1409 | PR00421C | 13.60 | 7.231e−09 | 248-259 | PR00421 | THIOREDOXIN FAMILY |
| | | | | | | SIGNATURE |
| 1409 | PR00421C | 13.60 | 9.308e−09 | 133-144 | PR00421 | THIOREDOXIN FAMILY |
| | | | | | | SIGNATURE |
| 1410 | BL00567A | 10.66 | 6.459e−11 | 21-39 | BL00567 | Phosphoribulokinase |
| | | | | | | proteins. |
| 1410 | BL01294A | 5.15 | 3.872e−12 | 22-33 | BL01294 | Uncharacterized protein |
| | | | | | | family UPF0038 |
| | | | | | | proteins. |
| 1410 | BL01294B | 7.90 | 5.065e−12 | 46-60 | BL01294 | Uncharacterized protein |
| | | | | | | family UPF0038 |
| | | | | | | proteins. |
| 1410 | BL01294C | 22.06 | 5.219e−26 | 71-108 | BL01294 | Uncharacterized protein |
| | | | | | | family UPF0038 |
| | | | | | | proteins. |
| 1410 | BL01294E | 20.47 | 3.800e−23 | 157-197 | BL01294 | Uncharacterized protein |
| | | | | | | family UPF0038 |
| | | | | | | proteins. |
| 1410 | PR00988A | 6.39 | 6.276e−12 | 19-36 | PR00988 | URIDINE KINASE |
| | | | | | | SIGNATURE |
| 1411 | BL00132A | 26.07 | 3.329e−09 | 50-90 | BL00132 | zinc carboxypeptidases, |
| | | | | | | zinc-binding region 1 |
| | | | | | | proteins. |
| 1411 | PR00765A | 12.09 | 2.500e−09 | 76-88 | PR00765 | CARBOXYPEPTIDASE A |
| | | | | | | METALLOPROTEASE (M14) |
| | | | | | | FAMILY SIGNATURE |
| 1411 | PR00765B | 15.57 | 2.800e−12 | 102-116 | PR00765 | CARBOXYPEPTIDASE A |
| | | | | | | METALLOPROTEASE (M14) |
| | | | | | | FAMILY SIGNATURE |
| 1411 | PR00765C | 12.55 | 3.659e−09 | 181-189 | PR00765 | CARBOXYPEPTIDASE A |
| | | | | | | METALLOPROTEASE (M14) |
| | | | | | | FAMILY SIGNATURE |
| 1411 | PR00765D | 14.16 | 9.053e−11 | 240-253 | PR00765 | CARBOXYPEPTIDASE A |
| | | | | | | METALLOPROTEASE (M14) |
| | | | | | | FAMILY SIGNATURE |
| 1412 | BL00203 | 13.94 | 5.979e−10 | 91-136 | BL00203 | Vertebrate |
| | | | | | | metallothioneins |
| | | | | | | proteins. |
| 1412 | BL00243I | 31.77 | 2.521e−09 | 503-545 | BL00243 | Integrins beta chain |
| | | | | | | cysteine-rich domain |
| | | | | | | proteins. |
| 1412 | BL01177B | 13.61 | 6.400e−16 | 200-215 | BL01177 | Anaphylatoxin domain |
| | | | | | | proteins. |
| 1412 | BL01177C | 17.39 | 2.875e−20 | 448-466 | BL01177 | Anaphylatoxin domain |
| | | | | | | proteins. |
| 1412 | BL01177C | 17.39 | 5.286e−09 | 492-510 | BL01177 | Anaphylatoxin domain |
| | | | | | | proteins. |
| 1412 | BL01177D | 17.50 | 3.739e−17 | 474-491 | BL01177 | Anaphylatoxin domain |
| | | | | | | proteins. |
| 1412 | BL01177E | 20.64 | 1.375e−26 | 496-522 | 8L01177 | Anaphylatoxin domain |
| | | | | | | proteins. |
| 1412 | BL01187A | 9.98 | 1.000e−12 | 439-450 | BL01187 | Calcium-binding EGF- |
| | | | | | | like domain proteins |
| | | | | | | pattern proteins. |
| 1412 | BL01187A | 9.98 | 4.789e−11 | 260-271 | BL01187 | Calcium-binding EGF- |
| | | | | | | like domain proteins |
| | | | | | | pattern proteins. |
| 1412 | BL01187A | 9.98 | 4.857e−10 | 479-490 | BL01187 | Calcium-binding EGF- |
| | | | | | | like domain proteins |
| | | | | | | pattern proteins. |
| 1412 | BL01187A | 9.98 | 6.625e−09 | 397-408 | BL01187 | Calcium-binding EGF- |
| | | | | | | like domain proteins |
| | | | | | | pattern proteins. |
| 1412 | BL01187A | 9.98 | 9.571e−10 | 523-534 | BL01187 | Calcium-binding EGF- |
| | | | | | | like domain proteins |
| | | | | | | pattern proteins. |
| 1412 | BL01187A | 9.98 | 9.625e−09 | 214-225 | BL01187 | Calcium-binding EGF- |
| | | | | | | like domain proteins |
| | | | | | | pattern proteins. |
| 1412 | BL01187B | 12.04 | 3.250e−14 | 415-430 | BL01187 | Calcium-binding EGF- |
| | | | | | | like domain proteins |
| | | | | | | pattern proteins. |
| 1412 | BL01187B | 12.04 | 4.600e−10 | 190-205 | BL01187 | Calcium-binding EGF- |
| | | | | | | like domain proteins |
| | | | | | | pattern proteins. |
| 1412 | BL01187B | 12.04 | 5.333e−12 | 373-388 | BL01187 | Calcium-binding EGF- |
| | | | | | | like domain proteins |
| | | | | | | pattern proteins. |
| 1412 | BL01187B | 12.04 | 5.500e−09 | 498-513 | BL01187 | Calcium-binding EGF- |
| | | | | | | like domain proteins |
| | | | | | | pattern proteins. |
| 1412 | BL01187B | 12.04 | 6.478e−13 | 454-469 | BL01187 | Calcium-binding EGF- |
| | | | | | | like domain proteins |
| | | | | | | pattern proteins. |
| 1412 | PR00010A | 11.79 | 9.308e−09 | 441-452 | PR00010 | TYPE II EGF-LIKE |
| | | | | | | SIGNATURE |
| 1412 | PR00010C | 11.16 | 5.714e−09 | 420-430 | PR00010 | TYPE II EGF-LIKE |
| | | | | | | SIGNATURE |
| 1412 | PR00538B | 10.45 | 8.688e−09 | 108-127 | PR00538 | MUSCARINIC M1 RECEPTOR |
| | | | | | | SIGNATURE |
| 1412 | PR00907B | 11.29 | 9.766e−10 | 494-510 | PR00907 | THROMBOMODULIN |
| | | | | | | SIGNATURE |
| 1413 | BL00030A | 14.39 | 6.143e−13 | 346-364 | BL00030 | Eukaryotic RNA-binding |
| | | | | | | region RNP-1 proteins. |
| 1413 | BL00030A | 14.39 | 9.000e−10 | 260-278 | BL00030 | Eukaryotic RNA-binding |
| | | | | | | region RNP-1 proteins. |
| 1413 | BL00030B | 7.03 | 6.211e−09 | 295-304 | BL00030 | Eukaryotic RNA-binding |
| | | | | | | region RNP-1 proteins. |
| 1413 | BL00030B | 7.03 | 8.800e−10 | 382-391 | BL00030 | Eukaryotic RNA-binding |
| | | | | | | region RNP-1 proteins. |
| 1413 | BL00291A | 4.49 | 7.506e−10 | 418-452 | BL00291 | Prion protein. |
| 1413 | BL00412D | 16.54 | 7.245e−09 | 130-180 | BL00412 | Neuromodulin (GAP-43) |
| | | | | | | proteins. |
| 1414 | BL00054A | 25.71 | 9.591e−34 | 29-69 | BL00054 | Ribosomal protein S11 |
| | | | | | | proteins. |
| 1414 | BL00054B | 16.72 | 1.000e−36 | 106-147 | BL00054 | Ribosomal protein S11 |
| | | | | | | proteins. |
| 1416 | BL01199 | 8.49 | 7.923e−12 | 124-137 | BL01199 | Ribosomal protein L1 |
| | | | | | | proteins. |
| 1418 | PR00019A | 11.19 | 7.261e−10 | 256-269 | PR00019 | LEUCINE-RICH REPEAT |
| | | | | | | SIGNATURE |
| 1418 | PR00019A | 11.19 | 7.600e−12 | 186-199 | PR00019 | LEUCINE-RICH REPEAT |
| | | | | | | SIGNATURE |
| 1418 | PR00019B | 11.36 | 3.880e−09 | 253-266 | PR00019 | LEUCINE-RICH REPEAT |
| | | | | | | SIGNATURE |
| 1418 | PR00019B | 11.36 | 5.000e−11 | 183-196 | PR00019 | LEUCINE-RICH REPEAT |
| | | | | | | SIGNATURE |
| 1419 | PD00210 | 15.25 | 3.400e−15 | 112-127 | PD00210 | PROTEIN ANTIOXIDANT |
| | | | | | | PEROXIDASE RED. |
| 1421 | BL00213A | 12.95 | 4.316e−10 | 40-53 | BL00213 | Lipocalin proteins. |
| 1421 | PR00179A | 13.78 | 2.080e−10 | 40-52 | PR00179 | LIPOCALIN SIGNATURE |
| 1421 | PR00179B | 9.56 | 7.375e−12 | 120-132 | PR00179 | LIPOCALIN SIGNATURE |
| 1422 | BL01171 | 19.94 | 1.000e−40 | 30-67 | BL01171 | Ribosomal protein L21e |
| | | | | | | proteins. |
| 1423 | BL00361A | 11.94 | 9.206e−13 | 52-67 | BL00361 | Ribosomal protein S10 |
| | | | | | | proteins. |
| 1423 | BL00361B | 18.34 | 5.750e−22 | 69-91 | BL00361 | Ribosomal protein S10 |
| | | | | | | proteins. |
| 1423 | PR00971A | 13.33 | 2.432e−09 | 19-32 | PR00971 | RIBOSOMAL PROTEIN S10 |
| | | | | | | FAMILY SIGNATURE |
| 1423 | PR00971B | 11.31 | 2.742e−13 | 54-69 | PR00971 | RIBOSOMAL PROTEIN S10 |
| | | | | | | FAMILY SIGNATURE |
| 1423 | PR00971C | 11.85 | 6.906e−16 | 76-90 | PR00971 | RIBOSOMAL PROTEIN S10 |
| | | | | | | FAMILY SIGNATURE |
| 1424 | BL00050A | 23.71 | 9.250e−27 | 94-126 | BL00050 | Ribosomal protein L23 |
| | | | | | | proteins. |
| 1424 | BL00050B | 14.81 | 8.125e−12 | 133-146 | BL00050 | Ribosomal protein L23 |
| | | | | | | proteins. |
| 1424 | PR00925B | 3.73 | 3.089e−10 | 12-24 | PR00925 | NONHISTONE CHROMOSOMAL |
| | | | | | | PROTEIN HMG17 FAMILY |
| | | | | | | SIGNATURE |
| 1427 | PR00326A | 8.75 | 5.979e−14 | 245-265 | PR00326 | GTP1/OBG GTP-BINDING |
| | | | | | | PROTEIN FAMILY |
| | | | | | | SIGNATURE |
| 1427 | PR00449A | 13.20 | 9.813e−11 | 243-264 | PR00449 | TRANSFORMING PROTEIN |
| | | | | | | P21 RAS SIGNATURE |
| 1429 | PR00776A | 10.77 | 1.844e−29 | 30-54 | PR00776 | HEMOGLOBINASE (C13) |
| | | | | | | CYSTEINE PROTEASE |
| | | | | | | SIGNATURE |
| 1429 | PR00776B | 15.39 | 5.154e−30 | 55-84 | PR00776 | HEMOGLOBINASE (C13) |
| | | | | | | CYSTEINE PROTEASE |
| | | | | | | SIGNATURE |
| 1429 | PR00776C | 11.51 | 9.357e−18 | 102-117 | PR00776 | HEMOGLOBINASE (C13) |
| | | | | | | CYSTEINE PROTEASE |
| | | | | | | SIGNATURE |
| 1429 | PR00776D | 11.56 | 7.231e−22 | 131-150 | PR00776 | HEMOGLOBINASE (C13) |
| | | | | | | CYSTEINE PROTEASE |
| | | | | | | SIGNATURE |
| 1429 | PR00776E | 12.29 | 1.375e−19 | 179-195 | PR00776 | HEMOGLOBINASE (C13) |
| | | | | | | CYSTEINE PROTEASE |
| | | | | | | SIGNATURE |
| 1430 | BL00951A | 15.10 | 7.750e−39 | 2-37 | BL00951 | ER lumen protein |
| | | | | | | retaining receptor |
| | | | | | | proteins. |
| 1430 | BL00951B | 14.23 | 3.100e−31 | 38-68 | BL00951 | ER lumen protein |
| | | | | | | retaining receptor |
| | | | | | | proteins. |
| 1430 | BL00951C | 19.35 | 1.000e−40 | 93-141 | BL00951 | ER lumen protein |
| | | | | | | retaining receptor |
| | | | | | | proteins. |
| 1430 | BL00951D | 13.94 | 6.000e−38 | 142-176 | BL00951 | ER lumen protein |
| | | | | | | retaining receptor |
| | | | | | | proteins. |
| 1430 | PR00660A | 13.28 | 9.591e−21 | 4-23 | PR00660 | ER LUMEN PROTEIN |
| | | | | | | RETAINING RECEPTOR |
| | | | | | | SIGNATURE |
| 1430 | PR00660B | 13.72 | 4.000e−24 | 31-51 | PR00660 | ER LUMEN PROTEIN |
| | | | | | | RETAINING RECEPTOR |
| | | | | | | SIGNATURE |
| 1430 | PR00660C | 11.32 | 6.211e−17 | 52-68 | PR00660 | ER LUMEN PROTEIN |
| | | | | | | RETAINING RECEPTOR |
| | | | | | | SIGNATURE |
| 1430 | PR00660D | 12.01 | 7.750e−26 | 120-140 | PR00660 | ER LUMEN PROTEIN |
| | | | | | | RETAINING RECEPTOR |
| | | | | | | SIGNATURE |
| 1430 | PR00660E | 11.35 | 3.625e−16 | 142-156 | PR00660 | ER LUMEN PROTEIN |
| | | | | | | RETAINING RECEPTOR |
| | | | | | | SIGNATURE |
| 1430 | PR00660F | 12.40 | 7.818e−22 | 156-174 | PR00660 | ER LUMEN PROTEIN |
| | | | | | | RETAINING RECEPTOR |
| | | | | | | SIGNATURE |
| 1430 | PR00660G | 11.77 | 8.500e−20 | 184-199 | PR00660 | ER LUMEN PROTEIN |
| | | | | | | RETAINING RECEPTOR |
| | | | | | | SIGNATURE |
| 1431 | BL00291A | 4.49 | 7.103e−09 | 42-76 | BL00291 | Prion protein. |
| 1431 | BL00420A | 20.42 | 1.000e−08 | 1000-1028 | BL00420 | Speract receptor repeat |
| | | | | | | proteins domain |
| | | | | | | proteins. |
| 1431 | BL00420A | 20.42 | 1.000e−09 | 241-269 | BL00420 | Speract receptor repeat |
| | | | | | | proteins domain |
| | | | | | | proteins. |
| 1431 | BL00420A | 20.42 | 1.000e−09 | 538-566 | BL00420 | Speract receptor repeat |
| | | | | | | proteins domain |
| | | | | | | proteins. |
| 1431 | BL00420A | 20.42 | 1.138e−09 | 667-695 | BL00420 | Speract receptor repeat |
| | | | | | | proteins domain |
| | | | | | | proteins. |
| 1431 | BL00420A | 20.42 | 1.138e−09 | 934-962 | BL00420 | Speract receptor repeat |
| | | | | | | proteins domain |
| | | | | | | proteins. |
| 1431 | BL00420A | 20.42 | 1.415e−09 | 166-194 | BL00420 | Speract receptor repeat |
| | | | | | | proteins domain |
| | | | | | | proteins. |
| 1431 | BL00420A | 20.42 | 1.590e−10 | 514-542 | BL00420 | Speract receptor repeat |
| | | | | | | proteins domain |
| | | | | | | proteins. |
| 1431 | BL00420A | 20.42 | 1.655e−11 | 685-713 | BL00420 | Speract receptor repeat |
| | | | | | | proteins domain |
| | | | | | | proteins. |
| 1431 | BL00420A | 20.42 | 1.692e−09 | 349-377 | BL00420 | Speract receptor repeat |
| | | | | | | proteins domain |
| | | | | | | proteins. |
| 1431 | BL00420A | 20.42 | 1.692e−09 | 616-644 | BL00420 | Speract receptor repeat |
| | | | | | | proteins domain |
| | | | | | | proteins. |
| 1431 | BL00420A | 20.42 | 1.692e−09 | 631-659 | BL00420 | Speract receptor repeat |
| | | | | | | proteins domain |
| | | | | | | proteins. |
| 1431 | BL00420A | 20.42 | 1.831e−09 | 688-716 | BL00420 | Speract receptor repeat |
| | | | | | | proteins domain |
| | | | | | | proteins. |
| 1431 | BL00420A | 20.42 | 1.885e−10 | 562-590 | BL00420 | Speract receptor repeat |
| | | | | | | proteins domain |
| | | | | | | proteins. |
| 1431 | BL00420A | 20.42 | 1.969e−09 | 682-710 | BL00420 | Speract receptor repeat |
| | | | | | | proteins domain |
| | | | | | | proteins. |
| 1431 | BL00420A | 20.42 | 2.108e−09 | 817-845 | BL00420 | Speract receptor repeat |
| | | | | | | proteins domain |
| | | | | | | proteins. |
| 1431 | BL00420A | 20.42 | 2.246e−09 | 451-479 | BL00420 | Speract receptor repeat |
| | | | | | | proteins domain |
| | | | | | | proteins. |
| 1431 | BL00420A | 20.42 | 2.662e−09 | 334-362 | BL00420 | Speract receptor repeat |
| | | | | | | proteins domain |
| | | | | | | proteins. |
| 1431 | BL00420A | 20.42 | 2.800e−09 | 424-452 | BL00420 | Speract receptor repeat |
| | | | | | | proteins domain |
| | | | | | | proteins. |
| 1431 | BL00420A | 20.42 | 2.964e−11 | 400-428 | BL00420 | Speract receptor repeat |
| | | | | | | proteins domain |
| | | | | | | proteins. |
| 1431 | BL00420A | 20.42 | 2.964e−11 | 919-947 | BL00420 | Speract receptor repeat |
| | | | | | | proteins domain |
| | | | | | | proteins. |
| 1431 | BL00420A | 20.42 | 3.077e−09 | 895-923 | BL00420 | Speract receptor repeat |
| | | | | | | proteins domain |
| | | | | | | proteins. |
| 1431 | BL00420A | 20.42 | 3.077e−09 | 94-122 | BL00420 | Speract receptor repeat |
| | | | | | | proteins domain |
| | | | | | | proteins. |
| 1431 | BL00420A | 20.42 | 3.215e−09 | 478-506 | BL00420 | Speract receptor repeat |
| | | | | | | proteins domain |
| | | | | | | proteins. |
| 1431 | BL00420A | 20.42 | 3.361e−10 | 163-191 | BL00420 | Speract receptor repeat |
| | | | | | | proteins domain |
| | | | | | | proteins. |
| 1431 | BL00420A | 20.42 | 3.361e−10 | 781-809 | BL00420 | Speract receptor repeat |
| | | | | | | proteins domain |
| | | | | | | proteins. |
| 1431 | BL00420A | 20.42 | 3.423e−12 | 328-356 | BL00420 | Speract receptor repeat |
| | | | | | | proteins domain |
| | | | | | | proteins. |
| 1431 | BL00420A | 20.42 | 3.508e−10 | 853-881 | BL00420 | Speract receptor repeat |
| | | | | | | proteins domain |
| | | | | | | proteins. |
| 1431 | BL00420A | 20.42 | 3.631e−09 | 304-332 | BL00420 | Speract receptor repeat |
| | | | | | | proteins domain |
| | | | | | | proteins. |
| 1431 | BL00420A | 20.42 | 3.769e−09 | 712-740 | BL00420 | Speract receptor repeat |
| | | | | | | proteins domain |
| | | | | | | proteins. |
| 1431 | BL00420A | 20.42 | 3.908e−09 | 487-515 | BL00420 | Speract receptor repeat |
| | | | | | | proteins domain |
| | | | | | | proteins. |
| 1431 | BL00420A | 20.42 | 4.323e−09 | 751-779 | BL00420 | Speract receptor repeat |
| | | | | | | proteins domain |
| | | | | | | proteins. |
| 1431 | BL00420A | 20.42 | 4.462e−09 | 640-668 | BL00420 | Speract receptor repeat |
| | | | | | | proteins domain |
| | | | | | | proteins. |
| 1431 | BL00420A | 20.42 | 4.541e−10 | 115-143 | BL00420 | Speract receptor repeat |
| | | | | | | proteins domain |
| | | | | | | proteins. |
| 1431 | BL00420A | 20.42 | 4.738e−09 | 415-443 | BL00420 | Speract receptor repeat |
| | | | | | | proteins domain |
| | | | | | | proteins. |
| 1431 | BL00420A | 20.42 | 4.877e−09 | 190-218 | BL00420 | Speract receptor repeat |
| | | | | | | proteins domain |
| | | | | | | proteins. |
| 1431 | BL00420A | 20.42 | 5.015e−09 | 319-347 | BL00420 | Speract receptor repeat |
| | | | | | | proteins domain |
| | | | | | | proteins. |
| 1431 | BL00420A | 20.42 | 5.091e−11 | 787-815 | BL00420 | Speract receptor repeat |
| | | | | | | proteins domain |
| | | | | | | proteins. |
| 1431 | BL00420A | 20.42 | 5.569e−09 | 322-350 | BL00420 | Speract receptor repeat |
| | | | | | | proteins domain |
| | | | | | | proteins. |
| 1431 | BL00420A | 20.42 | 5.582e−11 | 550-578 | BL00420 | Speract receptor repeat |
| | | | | | | proteins domain |
| | | | | | | proteins. |
| 1431 | BL00420A | 20.42 | 5.846e−09 | 244-272 | BL00420 | Speract receptor repeat |
| | | | | | | proteins domain |
| | | | | | | proteins. |
| 1431 | BL00420A | 20.42 | 6.016e−10 | 172-200 | BL00420 | Speract receptor repeat |
| | | | | | | proteins domain |
| | | | | | | proteins. |
| 1431 | BL00420A | 20.42 | 6.073e−11 | 208-236 | BL00420 | Speract receptor repeat |
| | | | | | | proteins domain |
| | | | | | | proteins. |
| 1431 | BL00420A | 20.42 | 6.400e−09 | 226-254 | BL00420 | Speract receptor repeat |
| | | | | | | proteins domain |
| | | | | | | proteins. |
| 1431 | BL00420A | 20.42 | 6.538e−09 | 448-476 | BL00420 | Speract receptor repeat |
| | | | | | | proteins domain |
| | | | | | | proteins. |
| 1431 | BL00420A | 20.42 | 6.607e−10 | 193-221 | BL00420 | Speract receptor repeat |
| | | | | | | proteins domain |
| | | | | | | proteins. |
| 1431 | BL00420A | 20.42 | 6.607e−10 | 628-656 | BL00420 | Speract receptor repeat |
| | | | | | | proteins domain |
| | | | | | | proteins. |
| 1431 | BL00420A | 20.42 | 6.677e−09 | 136-164 | BL00420 | Speract receptor repeat |
| | | | | | | proteins domain |
| | | | | | | proteins. |
| 1431 | BL00420A | 20.42 | 6.727e−11 | 256-284 | BL00420 | Speract receptor repeat |
| | | | | | | proteins domain |
| | | | | | | proteins. |
| 1431 | BL00420A | 20.42 | 6.754e−10 | 778-806 | BL00420 | Speract receptor repeat |
| | | | | | | proteins domain |
| | | | | | | proteins. |
| 1431 | BL00420A | 20.42 | 6.902e−10 | 901-929 | BL00420 | Speract receptor repeat |
| | | | | | | proteins domain |
| | | | | | | proteins. |
| 1431 | BL00420A | 20.42 | 7.369e−09 | 301-329 | BL00420 | Speract receptor repeat |
| | | | | | | proteins domain |
| | | | | | | proteins. |
| 1431 | BL00420A | 20.42 | 7.369e−09 | 493-521 | BL00420 | Speract receptor repeat |
| | | | | | | proteins domain |
| | | | | | | proteins. |
| 1431 | BL00420A | 20.42 | 7.508e−09 | 154-182 | BL00420 | Speract receptor repeat |
| | | | | | | proteins domain |
| | | | | | | proteins. |
| 1431 | BL00420A | 20.42 | 7.646e−09 | 439-467 | BL00420 | Speract receptor repeat |
| | | | | | | proteins domain |
| | | | | | | proteins. |
| 1431 | BL00420A | 20.42 | 7.646e−09 | 952-980 | BL00420 | Speract receptor repeat |
| | | | | | | proteins domain |
| | | | | | | proteins. |
| 1431 | BL00420A | 20.42 | 7.750e−12 | 460-488 | BL00420 | Speract receptor repeat |
| | | | | | | proteins domain |
| | | | | | | proteins. |
| 1431 | BL00420A | 20.42 | 7.873e−11 | 583-611 | BL00420 | Speract receptor repeat |
| | | | | | | proteins domain |
| | | | | | | proteins. |
| 1431 | BL00420A | 20.42 | 7.923e−09 | 48-76 | BL00420 | Speract receptor repeat |
| | | | | | | proteins domain |
| | | | | | | proteins. |
| 1431 | BL00420A | 20.42 | 7.923e−09 | 865-893 | BL00420 | Speract receptor repeat |
| | | | | | | proteins domain |
| | | | | | | proteins. |
| 1431 | BL00420A | 20.42 | 7.923e−09 | 922-950 | BL00420 | Speract receptor repeat |
| | | | | | | proteins domain |
| | | | | | | proteins. |
| 1431 | BL00420A | 20.42 | 8.062e−09 | 283-311 | BL00420 | Speract receptor repeat |
| | | | | | | proteins domain |
| | | | | | | proteins. |
| 1431 | BL00420A | 20.42 | 8.062e−09 | 637-665 | BL00420 | Speract receptor repeat |
| | | | | | | proteins domain |
| | | | | | | proteins. |
| 1431 | BL00420A | 20.42 | 8.062e−09 | 838-866 | BL00420 | Speract receptor repeat |
| | | | | | | proteins domain |
| | | | | | | proteins. |
| 1431 | BL00420A | 20.42 | 8.200e−11 | 595-623 | BL00420 | Speract receptor repeat |
| | | | | | | proteins domain |
| | | | | | | proteins. |
| 1431 | BL00420A | 20.42 | 8.377e−10 | 313-341 | BL00420 | Speract receptor repeat |
| | | | | | | proteins domain |
| | | | | | | proteins. |
| 1431 | BL00420A | 20.42 | 8.377e−10 | 397-425 | BL00420 | Speract receptor repeat |
| | | | | | | proteins domain |
| | | | | | | proteins. |
| 1431 | BL00420A | 20.42 | 8.377e−10 | 721-749 | BL00420 | Speract receptor repeat |
| | | | | | | proteins domain |
| | | | | | | proteins. |
| 1431 | BL00420A | 20.42 | 8.525e−10 | 517-545 | BL00420 | Speract receptor repeat |
| | | | | | | proteins domain |
| | | | | | | proteins. |
| 1431 | BL00420A | 20.42 | 8.615e−09 | 352-380 | BL00420 | Speract receptor repeat |
| | | | | | | proteins domain |
| | | | | | | proteins. |
| 1431 | BL00420A | 20.42 | 8.615e−09 | 406-434 | BL00420 | Speract receptor repeat |
| | | | | | | proteins domain |
| | | | | | | proteins. |
| 1431 | BL00420A | 20.42 | 8.691e−11 | 127-155 | BL00420 | Speract receptor repeat |
| | | | | | | proteins domain |
| | | | | | | proteins. |
| 1431 | BL00420A | 20.42 | 8.754e−09 | 373-401 | BL00420 | Speract receptor repeat |
| | | | | | | proteins domain |
| | | | | | | proteins. |
| 1431 | BL00420A | 20.42 | 8.754e−09 | 457-485 | BL00420 | Speract receptor repeat |
| | | | | | | proteins domain |
| | | | | | | proteins. |
| 1431 | BL00420A | 20.42 | 8.754e−09 | 475-503 | BL00420 | Speract receptor repeat |
| | | | | | | proteins domain |
| | | | | | | proteins. |
| 1431 | BL00420A | 20.42 | 8.820e−10 | 331-359 | BL00420 | Speract receptor repeat |
| | | | | | | proteins domain |
| | | | | | | proteins. |
| 1431 | BL00420A | 20.42 | 8.855e−11 | 913-941 | BL00420 | Speract receptor repeat |
| | | | | | | proteins domain |
| | | | | | | proteins. |
| 1431 | BL00420A | 20.42 | 8.892e−09 | 292-320 | BL00420 | Speract receptor repeat |
| | | | | | | proteins domain |
| | | | | | | proteins. |
| 1431 | BL00420A | 20.42 | 9.031e−09 | 427-455 | BL00420 | Speract receptor repeat |
| | | | | | | proteins domain |
| | | | | | | proteins. |
| 1431 | BL00420A | 20.42 | 9.031e−09 | 565-593 | BL00420 | Speract receptor repeat |
| | | | | | | proteins domain |
| | | | | | | proteins. |
| 1431 | BL00420A | 20.42 | 9.031e−09 | 910-938 | BL00420 | Speract receptor repeat |
| | | | | | | proteins domain |
| | | | | | | proteins. |
| 1431 | BL00420A | 20.42 | 9.262e−10 | 253-281 | BL00420 | Speract receptor repeat |
| | | | | | | proteins domain |
| | | | | | | proteins. |
| 1431 | BL00420A | 20.42 | 9.446e−09 | 856-884 | BL00420 | Speract receptor repeat |
| | | | | | | proteins domain |
| | | | | | | proteins. |
| 1431 | BL00420A | 20.42 | 9.509e−11 | 100-128 | BL00420 | Speract receptor repeat |
| | | | | | | proteins domain |
| | | | | | | proteins. |
| 1431 | BL00420A | 20.42 | 9.509e−11 | 874-902 | BL00420 | Speract receptor repeat |
| | | | | | | proteins domain |
| | | | | | | proteins. |
| 1431 | BL00420A | 20.42 | 9.585e−09 | 799-827 | BL00420 | Speract receptor repeat |
| | | | | | | proteins domain |
| | | | | | | proteins. |
| 1431 | BL00420A | 20.42 | 9.723e−09 | 376-404 | BL00420 | Speract receptor repeat |
| | | | | | | proteins domain |
| | | | | | | proteins. |
| 1431 | BL00420A | 20.42 | 9.723e−09 | 481-509 | BL00420 | Speract receptor repeat |
| | | | | | | proteins domain |
| | | | | | | proteins. |
| 1431 | BL00420A | 20.42 | 9.852e−10 | 106-134 | BL00420 | Speract receptor repeat |
| | | | | | | proteins domain |
| | | | | | | proteins. |
| 1431 | BL00420A | 20.42 | 9.852e−10 | 238-266 | BL00420 | Speract receptor repeat |
| | | | | | | proteins domain |
| | | | | | | proteins. |
| 1431 | BL00420A | 20.42 | 9.852e−10 | 91-119 | BL00420 | Speract receptor repeat |
| | | | | | | proteins domain |
| | | | | | | proteins. |
| 1431 | BL01113A | 17.99 | 1.000e−08 | 397-423 | BL01113 | C1q domain proteins. |
| 1431 | BL01113A | 17.99 | 1.000e−09 | 898-924 | BL01113 | C1q domain proteins. |
| 1431 | BL01113A | 17.99 | 1.173e−09 | 145-171 | BL01113 | C1q domain proteins. |
| 1431 | BL01113A | 17.99 | 1.243e−13 | 313-339 | BL01113 | C1q domain proteins. |
| 1431 | BL01113A | 17.99 | 1.519e−09 | 418-444 | BL01113 | C1q domain proteins. |
| 1431 | BL01113A | 17.99 | 1.692e−09 | 136-162 | BL01113 | C1q domain proteins. |
| 1431 | BL01113A | 17.99 | 1.923e−12 | 493-519 | BL01113 | C1q domain proteins. |
| 1431 | BL01113A | 17.99 | 2.227e−11 | 391-417 | BL01113 | C1q domain proteins. |
| 1431 | BL01113A | 17.99 | 2.340e−10 | 39-65 | BL01113 | C1q domain proteins. |
| 1431 | BL01113A | 17.99 | 2.385e−09 | 1009-1035 | BL01113 | C1q domain proteins. |
| 1431 | BL01113A | 17.99 | 2.385e−09 | 910-936 | BL01113 | C1q domain proteins. |
| 1431 | BL01113A | 17.99 | 2.532e−10 | 304-330 | BL01113 | C1q domain proteins. |
| 1431 | BL01113A | 17.99 | 2.558e−09 | 289-315 | BL01113 | C1q domain proteins. |
| 1431 | BL01113A | 17.99 | 2.846e−12 | 45-71 | BL01113 | C1q domain proteins. |
| 1431 | BL01113A | 17.99 | 3.077e−12 | 190-216 | BL01113 | C1q domain proteins. |
| 1431 | BL01113A | 17.99 | 3.250e−09 | 382-408 | BL01113 | C1q domain proteins. |
| 1431 | BL01113A | 17.99 | 3.250e−09 | 478-504 | BL01113 | C1q domain proteins. |
| 1431 | BL01113A | 17.99 | 3.423e−09 | 51-77 | BL01113 | C1q domain proteins. |
| 1431 | BL01113A | 17.99 | 3.423e−09 | 799-825 | BL01113 | C1q domain proteins. |
| 1431 | BL01113A | 17.99 | 3.769e−09 | 808-834 | BL01113 | C1q domain proteins. |
| 1431 | BL01113A | 17.99 | 3.769e−09 | 94-120 | BL01113 | C1q domain proteins. |
| 1431 | BL01113A | 17.99 | 4.064e−10 | 127-153 | BL01113 | C1q domain proteins. |
| 1431 | BL01113A | 17.99 | 4.068e−11 | 48-74 | BL01113 | C1q domain proteins. |
| 1431 | BL01113A | 17.99 | 4.115e−09 | 634-660 | BL01113 | C1q domain proteins. |
| 1431 | BL01113A | 17.99 | 4.255e−10 | 460-486 | BL01113 | C1q domain proteins. |
| 1431 | BL01113A | 17.99 | 4.273e−11 | 208-234 | BL01113 | C1q domain proteins. |
| 1431 | BL01113A | 17.99 | 4.288e−09 | 172-198 | BL01113 | C1q domain proteins. |
| 1431 | BL01113A | 17.99 | 4.447e−10 | 295-321 | BL01113 | C1q domain proteins. |
| 1431 | BL01113A | 17.99 | 4.447e−10 | 781-807 | BL01113 | C1q domain proteins. |
| 1431 | BL01113A | 17.99 | 4.447e−10 | 922-948 | BL01113 | C1q domain proteins. |
| 1431 | BL01113A | 17.99 | 4.462e−09 | 433-459 | BL01113 | C1q domain proteins. |
| 1431 | BL01113A | 17.99 | 4.462e−09 | 805-831 | BL01113 | C1q domain proteins. |
| 1431 | BL01113A | 17.99 | 4.635e−09 | 121-147 | BL01113 | C1q domain proteins. |
| 1431 | BL01113A | 17.99 | 4.682e−11 | 286-312 | BL01113 | C1q domain proteins. |
| 1431 | BL01113A | 17.99 | 4.808e−09 | 250-276 | BL01113 | C1q domain proteins. |
| 1431 | BL01113A | 17.99 | 4.808e−09 | 445-471 | BL01113 | C1q domain proteins. |
| 1431 | BL01113A | 17.99 | 4.981e−09 | 163-189 | BL01113 | C1q domain proteins. |
| 1431 | BL01113A | 17.99 | 4.981e−09 | 166-192 | BL01113 | C1q domain proteins. |
| 1431 | BL01113A | 17.99 | 4.981e−09 | 667-693 | BL01113 | C1q domain proteins. |
| 1431 | BL01113A | 17.99 | 5.021e−10 | 1000-1026 | BL01113 | C1q domain proteins. |
| 1431 | BL01113A | 17.99 | 5.021e−10 | 520-546 | BL01113 | C1q domain proteins. |
| 1431 | BL01113A | 17.99 | 5.091e−11 | 97-123 | BL01113 | C1q domain proteins. |
| 1431 | BL01113A | 17.99 | 5.327e−09 | 151-177 | BL01113 | C1q domain proteins. |
| 1431 | BL01113A | 17.99 | 5.327e−09 | 352-378 | BL01113 | C1q domain proteins. |
| 1431 | BL01113A | 17.99 | 5.404e−10 | 184-210 | BL01113 | C1q domain proteins. |
| 1431 | BL01113A | 17.99 | 5.596e−10 | 1081-1107 | BL01113 | C1q domain proteins. |
| 1431 | BL01113A | 17.99 | 5.596e−10 | 469-495 | BL01113 | C1q domain proteins. |
| 1431 | BL01113A | 17.99 | 5.596e−10 | 856-882 | BL01113 | C1q domain proteins. |
| 1431 | BL01113A | 17.99 | 5.615e−12 | 640-666 | BL01113 | C1q domain proteins. |
| 1431 | BL01113A | 17.99 | 5.673e−09 | 148-174 | BL01113 | C1q domain proteins. |
| 1431 | BL01113A | 17.99 | 5.673e−09 | 865-891 | BL01113 | C1q domain proteins. |
| 1431 | BL01113A | 17.99 | 5.705e−11 | 106-132 | BL01113 | C1q domain proteins. |
| 1431 | BL01113A | 17.99 | 5.865e−13 | 193-219 | BL01113 | C1q domain proteins. |
| 1431 | BL01113A | 17.99 | 5.979e−10 | 1054-1080 | BL01113 | C1q domain proteins. |
| 1431 | BL01113A | 17.99 | 6.019e−09 | 847-873 | BL01113 | C1q domain proteins. |
| 1431 | BL01113A | 17.99 | 6.192e−09 | 142-168 | BL01113 | C1q domain proteins. |
| 1431 | BL01113A | 17.99 | 6.192e−09 | 310-336 | BL01113 | C1q domain proteins. |
| 1431 | BL01113A | 17.99 | 6.365e−09 | 583-609 | BL01113 | C1q domain proteins. |
| 1431 | BL01113A | 17.99 | 6.365e−09 | 850-876 | BL01113 | C1q domain proteins. |
| 1431 | BL01113A | 17.99 | 6.538e−09 | 541-567 | BL01113 | C1q domain proteins. |
| 1431 | BL01113A | 17.99 | 6.538e−09 | 57-83 | BL01113 | C1q domain proteins. |
| 1431 | BL01113A | 17.99 | 6.538e−12 | 547-573 | BL01113 | C1q domain proteins. |
| 1431 | BL01113A | 17.99 | 6.538e−12 | 796-822 | BL01113 | C1q domain proteins. |
| 1431 | BL01113A | 17.99 | 6.712e−09 | 370-396 | BL01113 | C1q domain proteins. |
| 1431 | BL01113A | 17.99 | 6.712e−09 | 853-879 | BL01113 | C1q domain proteins. |
| 1431 | BL01113A | 17.99 | 6.745e−10 | 631-657 | BL01113 | C1q domain proteins. |
| 1431 | BL01113A | 17.99 | 6.885e−09 | 256-282 | BL01113 | C1q domain proteins. |
| 1431 | BL01113A | 17.99 | 6.936e−10 | 199-225 | BL01113 | C1q domain proteins. |
| 1431 | BL01113A | 17.99 | 6.936e−10 | 337-363 | BL01113 | C1q domain proteins. |
| 1431 | BL01113A | 17.99 | 7.000e−12 | 1090-1116 | BL01113 | C1q domain proteins. |
| 1431 | BL01113A | 17.99 | 7.058e−09 | 322-348 | BL01113 | C1q domain proteins. |
| 1431 | BL01113A | 17.99 | 7.128e−10 | 139-165 | BL01113 | C1q domain proteins. |
| 1431 | BL01113A | 17.99 | 7.319e−10 | 328-354 | BL01113 | C1q domain proteins. |
| 1431 | BL01113A | 17.99 | 7.319e−10 | 874-900 | BL01113 | C1q domain proteins. |
| 1431 | BL01113A | 17.99 | 7.511e−10 | 658-684 | BL01113 | C1q domain proteins. |
| 1431 | BL01113A | 17.99 | 7.750e−09 | 100-126 | BL01113 | C1q domain proteins. |
| 1431 | BL01113A | 17.99 | 7.750e−09 | 472-498 | BL01113 | C1q domain proteins. |
| 1431 | BL01113A | 17.99 | 7.750e−11 | 451-477 | BL01113 | C1q domain proteins. |
| 1431 | BL01113A | 17.99 | 7.923e−12 | 892-918 | BL01113 | C1q domain proteins. |
| 1431 | BL01113A | 17.99 | 8.054e−13 | 649-675 | BL01113 | C1q domain proteins. |
| 1431 | BL01113A | 17.99 | 8.096e−09 | 793-819 | BL01113 | C1q domain proteins. |
| 1431 | BL01113A | 17.99 | 8.269e−09 | 532-558 | BL01113 | C1q domain proteins. |
| 1431 | BL01113A | 17.99 | 8.468e−10 | 130-156 | BL01113 | C1q domain proteins. |
| 1431 | BL01113A | 17.99 | 8.773e−11 | 904-930 | BL01113 | C1q domain proteins. |
| 1431 | BL01113A | 17.99 | 8.788e−09 | 394-420 | BL01113 | C1q domain proteins. |
| 1431 | BL01113A | 17.99 | 8.851e−10 | 925-951 | BL01113 | C1q domain proteins. |
| 1431 | BL01113A | 17.99 | 8.962e−09 | 118-144 | BL01113 | C1q domain proteins. |
| 1431 | BL01113A | 17.99 | 8.977e−11 | 613-639 | BL01113 | C1q domain proteins. |
| 1431 | BL01113A | 17.99 | 9.043e−10 | 556-582 | BL01113 | C1q domain proteins. |
| 1431 | BL01113A | 17.99 | 9.077e−12 | 919-945 | BL01113 | C1q domain proteins. |
| 1431 | BL01113A | 17.99 | 9.135e−09 | 1087-1113 | BL01113 | C1q domain proteins. |
| 1431 | BL01113A | 17.99 | 9.135e−09 | 175-201 | BL01113 | C1q domain proteins. |
| 1431 | BL01113A | 17.99 | 9.135e−09 | 901-927 | BL01113 | C1q domain proteins. |
| 1431 | BL01113A | 17.99 | 9.182e−11 | 868-894 | BL01113 | C1q domain proteins. |
| 1431 | BL01113A | 17.99 | 9.234e−10 | 787-813 | BL01113 | C1q domain proteins. |
| 1431 | BL01113A | 17.99 | 9.308e−09 | 346-372 | BL01113 | C1q domain proteins. |
| 1431 | BL01113A | 17.99 | 9.308e−09 | 928-954 | BL01113 | C1q domain proteins. |
| 1431 | BL01113A | 17.99 | 9.308e−12 | 883-909 | BL01113 | C1q domain proteins. |
| 1431 | BL01113A | 17.99 | 9.426e−10 | 319-345 | BL01113 | C1q domain proteins. |
| 1431 | BL01113A | 17.99 | 9.591e−11 | 859-885 | BL01113 | C1q domain proteins. |
| 1431 | BL01113A | 17.99 | 9.795e−11 | 484-510 | BL01113 | C1q domain proteins. |
| 1431 | BL01113A | 17.99 | 9.809e−10 | 406-432 | BL01113 | C1q domain proteins. |
| 1431 | BL01113A | 17.99 | 9.827e−09 | 241-267 | BL01113 | C1q domain proteins. |
| 1431 | DM01418A | 20.83 | 1.000e−40 | 1156-1203 | DM01418 | 352 FIBRILLAR COLLAGEN |
| | | | | | | CARBOXYL-TERMINAL. |
| 1431 | DM01418B | 22.51 | 1.000e−40 | 1253-1294 | DM01418 | 352 FIBRILLAR COLLAGEN |
| | | | | | | CARBOXYL-TERMINAL. |
| 1431 | DM01418C | 20.48 | 6.276e−39 | 1324-1365 | DM01418 | 352 FIBRILLAR COLLAGEN |
| | | | | | | CARBOXYL-TERMINAL. |
| 1431 | PR00049D | 0.00 | 1.571e−10 | 1086-1100 | PR00049 | WILM'S TUMOUR PROTEIN |
| | | | | | | SIGNATURE |
| 1431 | PR00049D | 0.00 | 9.571e−10 | 56-70 | PR00049 | WILM'S TUMOUR PROTEIN |
| | | | | | | SIGNATURE |
| 1433 | BL00259 | 9.80 | 9.400e−14 | 93-103 | BL00259 | Gastrin/ |
| | | | | | | cholecystokinin family |
| | | | | | | proteins. |
| 1433 | PD01115A | 12.27 | 9.750e−12 | 1-23 | PD01115 | PRECURSOR AMPHIBIAN |
| | | | | | | SKIN SIGNAL. |
| 1435 | PR00019B | 11.36 | 5.950e−10 | 179-192 | PR00019 | LEUCINE-RICH REPEAT |
| | | | | | | SIGNATURE |
| 1437 | BL00141A | 12.10 | 2.636e−19 | 110-125 | BL00141 | Eukaryotic and viral |
| | | | | | | aspartyl proteases |
| | | | | | | proteins. |
| 1437 | BL00141B | 12.14 | 7.231e−11 | 214-225 | BL00141 | Eukaryotic and viral |
| | | | | | | aspartyl proteases |
| | | | | | | proteins. |
| 1437 | BL00141C | 9.74 | 9.471e−09 | 266-275 | BL00141 | Eukaryotic and viral |
| | | | | | | aspartyl proteases |
| | | | | | | proteins. |
| 1437 | BL00141D | 6.28 | 5.154e−10 | 310-319 | BL00141 | Eukaryotic and viral |
| | | | | | | aspartyl proteases |
| | | | | | | proteins. |
| 1437 | BL00141E | 14.32 | 1.900e−23 | 402-425 | BL00141 | Eukaryotic and viral |
| | | | | | | aspartyl proteases |
| | | | | | | proteins. |
| 1437 | PR00792A | 11.54 | 4.273e−24 | 103-123 | PR00792 | PEPSIN (A1) ASPARTIC |
| | | | | | | PROTEASE FAMILY |
| | | | | | | SIGNATURE |
| 1437 | PR00792B | 12.78 | 4.682e−11 | 261-274 | PR00792 | PEPSIN (A1) ASPARTIC |
| | | | | | | PROTEASE FAMILY |
| | | | | | | SIGNATURE |
| 1437 | PR00792C | 9.10 | 1.000e−11 | 310-321 | PR00792 | PEPSIN (A1) ASPARTIC |
| | | | | | | PROTEASE FAMILY |
| | | | | | | SIGNATURE |
| 1437 | PR00792D | 12.74 | 5.000e−17 | 401-416 | PR00792 | PEPSIN (A1) ASPARTIC |
| | | | | | | PROTEASE FAMILY |
| | | | | | | SIGNATURE |
| 1438 | BL00420A | 20.42 | 1.000e−08 | 48-76 | BL00420 | Speract receptor repeat |
| | | | | | | proteins domain |
| | | | | | | proteins. |
| 1438 | BL00420A | 20.42 | 1.415e−09 | 72-100 | BL00420 | Speract receptor repeat |
| | | | | | | proteins domain |
| | | | | | | proteins. |
| 1438 | BL00420A | 20.42 | 1.590e−10 | 75-103 | BL00420 | Speract receptor repeat |
| | | | | | | proteins domain |
| | | | | | | proteins. |
| 1438 | BL00420A | 20.42 | 2.180e−10 | 45-73 | BL00420 | Speract receptor repeat |
| | | | | | | proteins domain |
| | | | | | | proteins. |
| 1438 | BL00420A | 20.42 | 4.109e−11 | 33-61 | BL00420 | Speract receptor repeat |
| | | | | | | proteins domain |
| | | | | | | proteins. |
| 1438 | BL00420A | 20.42 | 7.055e−11 | 84-112 | BL00420 | Speract receptor repeat |
| | | | | | | proteins domain |
| | | | | | | proteins. |
| 1438 | BL00420A | 20.42 | 8.082e−10 | 36-64 | BL00420 | Speract receptor repeat |
| | | | | | | proteins domain |
| | | | | | | proteins. |
| 1438 | BL00420A | 20.42 | 9.410e−10 | 87-115 | BL00420 | Speract receptor repeat |
| | | | | | | proteins domain |
| | | | | | | proteins. |
| 1438 | BL01113A | 17.99 | 1.000e−13 | 45-71 | BL01113 | C1q domain proteins. |
| 1438 | BL01113A | 17.99 | 1.519e−09 | 78-104 | BL01113 | C1q domain proteins. |
| 1438 | BL01113A | 17.99 | 4.405e−13 | 54-80 | BL01113 | C1q domain proteins. |
| 1438 | BL01113A | 17.99 | 5.050e−21 | 36-62 | BL01113 | C1q domain proteins. |
| 1438 | BL01113A | 17.99 | 5.154e−12 | 81-107 | BL01113 | C1q domain proteins. |
| 1438 | BL01113A | 17.99 | 5.655e−16 | 33-59 | BL01113 | C1q domain proteins. |
| 1438 | BL01113A | 17.99 | 6.538e−09 | 30-56 | BL01113 | C1q domain proteins. |
| 1438 | BL01113A | 17.99 | 7.818e−14 | 39-65 | BL01113 | C1q domain proteins. |
| 1438 | BL01113A | 17.99 | 8.085e−10 | 75-101 | BL01113 | C1q domain proteins. |
| 1438 | BL01113A | 17.99 | 8.154e−12 | 42-68 | BL01113 | C1q domain proteins. |
| 1438 | BL01113A | 17.99 | 8.851e−10 | 84-110 | BL01113 | C1q domain proteins. |
| 1438 | BL01113A | 17.99 | 9.481e−09 | 90-116 | BL01113 | C1q domain proteins. |
| 1438 | BL01113B | 18.26 | 6.400e−33 | 139-174 | BL01113 | C1q domain proteins. |
| 1438 | BL01113C | 13.18 | 1.462e−15 | 206-225 | BL01113 | C1q domain proteins. |
| 1438 | BL01113D | 7.47 | 1.000e−11 | 240-249 | BL01113 | C1q domain proteins. |
| 1438 | PR00007A | 19.33 | 4.938e−19 | 133-159 | PR00007 | COMPLEMENT C1Q DOMAIN |
| | | | | | | SIGNATURE |
| 1438 | PR00007B | 14.16 | 7.429e−20 | 160-179 | PR00007 | COMPLEMENT C1Q DOMAIN |
| | | | | | | SIGNATURE |
| 1438 | PR00007C | 15.60 | 1.225e−15 | 206-227 | PR00007 | COMPLEMENT C1Q DOMAIN |
| | | | | | | SIGNATURE |
| 1438 | PR00007D | 9.64 | 6.885e−11 | 238-248 | PR00007 | COMPLEMENT C1Q DOMAIN |
| | | | | | | SIGNATURE |
| 1439 | BL01115A | 10.22 | 6.786e−10 | 6-49 | BL01115 | GTP-binding nuclear |
| | | | | | | protein ran proteins. |
| 1439 | PR00449A | 13.20 | 3.045e−17 | 6-27 | PR00449 | TRANSFORMING PROTEIN |
| | | | | | | P21 RAS SIGNATURE |
| 1439 | PR00449B | 14.34 | 1.000e−10 | 29-45 | PR00449 | TRANSFORMING PROTEIN |
| | | | | | | P21 RAS SIGNATURE |
| 1439 | PR00449C | 17.27 | 2.895e−18 | 46-68 | PR00449 | TRANSFORMING PROTEIN |
| | | | | | | P21 RAS SIGNATURE |
| 1439 | PR00449D | 10.79 | 2.800e−15 | 108-121 | PR00449 | TRANSFORMING PROTEIN |
| | | | | | | P21 RAS SIGNATURE |
| 1439 | PR00449E | 13.50 | 4.240e−14 | 156-178 | PR00449 | TRANSFORMING PROTEIN |
| | | | | | | P21 RAS SIGNATURE |
| 1440 | PR00492A | 11.92 | 5.714e−18 | 57-72 | PR00492 | RHO PROTEIN GDP |
| | | | | | | DISSOCIATION INHIBITOR |
| | | | | | | SIGNATURE |
| 1440 | PR00492B | 9.77 | 6.684e−23 | 73-91 | PR00492 | RHO PROTEIN GDP |
| | | | | | | DISSOCIATION INHIBITOR |
| | | | | | | SIGNATURE |
| 1440 | PR00492C | 9.68 | 7.107e−21 | 119-135 | PR00492 | RHO PROTEIN GDP |
| | | | | | | DISSOCIATION INHIBITOR |
| | | | | | | SIGNATURE |
| 1440 | PR00492D | 14.82 | 2.350e−19 | 136-151 | PR00492 | RHO PROTEIN GDP |
| | | | | | | DISSOCIATION INHIBITOR |
| | | | | | | SIGNATURE |
| 1440 | PR00492E | 13.98 | 1.000e−16 | 152-164 | PR00492 | RHO PROTEIN GDP |
| | | | | | | DISSOCIATION INHIBITOR |
| | | | | | | SIGNATURE |
| 1440 | PR00492F | 13.70 | 7.943e−24 | 178-195 | PR00492 | RHO PROTEIN GDP |
| | | | | | | DISSOCIATION INHIBITOR |
| | | | | | | SIGNATURE |
| 1441 | BL00224A | 7.42 | 4.600e−25 | 26-47 | BL00224 | Clathrin light chain |
| | | | | | | proteins. |
| 1441 | BL00224B | 16.94 | 1.000e−40 | 106-158 | BL00224 | Clathrin light chain |
| | | | | | | proteins. |
| 1441 | BL00224C | 16.60 | 1.000e−40 | 163-216 | BL00224 | Clathrin light chain |
| | | | | | | proteins. |
| 1442 | PR00759B | 11.26 | 8.385e−09 | 74-84 | PR00759 | BASIC PROTEASE (KUNITZ- |
| | | | | | | TYPE) INHIBITOR FAMILY |
| | | | | | | SIGNATURE |
| 1443 | BL00353A | 9.60 | 1.000e−40 | 2-50 | BL00353 | HMG1/2 proteins. |
| 1443 | BL00353A | 9.60 | 5.661e−11 | 3-51 | BL00353 | HMG1/2 proteins. |
| 1443 | BL00353B | 11.47 | 1.000e−40 | 78-127 | BL00353 | HMG1/2 proteins. |
| 1443 | BL00353C | 14.83 | 1.000e−40 | 128-174 | BL00353 | HMG1/2 proteins. |
| 1443 | BL00412D | 16.54 | 3.939e−09 | 165-215 | BL00412 | Neuromodulin (GAP-43) |
| | | | | | | proteins. |
| 1443 | BL00412D | 16.54 | 4.620e−10 | 160-210 | BL00412 | Neuromodulin (GAP-43) |
| | | | | | | proteins. |
| 1443 | BL00412D | 16.54 | 5.776e−09 | 162-212 | BL00412 | Neuromodulin (GAP-43) |
| | | | | | | proteins. |
| 1443 | BL00412D | 16.54 | 6.283e−10 | 161-211 | BL00412 | Neuromodulin (GAP-43) |
| | | | | | | proteins. |
| 1443 | BL00412D | 16.54 | 7.061e−09 | 159-209 | BL00412 | Neuromodulin (GAP-43) |
| | | | | | | proteins. |
| 1443 | BL00412D | 16.54 | 7.648e−11 | 164-214 | BL00412 | Neuromodulin (GAP-43) |
| | | | | | | proteins. |
| 1443 | PR00886A | 10.08 | 1.643e−30 | 40-62 | PR00886 | HIGH MOBILITY GROUP |
| | | | | | | (HMG1/HMG2) PROTEIN |
| | | | | | | SIGNATURE |
| 1443 | PR00886B | 9.88 | 3.250e−26 | 63-83 | PR00886 | HIGH MOBILITY GROUP |
| | | | | | | (HMG1/HMG2) PROTEIN |
| | | | | | | SIGNATURE |
| 1443 | PR00886C | 11.84 | 3.250e−23 | 110-128 | PR00886 | HIGH MOBILITY GROUP |
| | | | | | | (HMG1/HMG2) PROTEIN |
| | | | | | | SIGNATURE |
| 1443 | PR00886D | 15.72 | 6.786e−24 | 128-147 | PR00886 | HIGH MOBILITY GROUP |
| | | | | | | (HMG1/HMG2) PROTEIN |
| | | | | | | SIGNATURE |
| 1443 | PR00886E | 8.85 | 5.101e−09 | 63-83 | PR00886 | HIGH MOBILITY GROUP |
| | | | | | | (HMG1/HMG2) PROTEIN |
| | | | | | | SIGNATURE |
| 1443 | PR00886E | 8.85 | 9.182e−26 | 147-167 | PR00886 | HIGH MOBILITY GROUP |
| | | | | | | (HMG1/HMG2) PROTEIN |
| | | | | | | SIGNATURE |
| 1444 | PR00690A | 10.86 | 9.866e−09 | 782-800 | PR00690 | ADHESIN FAMILY |
| | | | | | | SIGNATURE |
| 1446 | BL00048 | 6.39 | 6.625e−09 | 11-37 | BL00048 | Protamine P1 proteins. |
| 1449 | DM00179 | 13.97 | 7.158e−10 | 107-116 | DM00179 | w KINASE ALPHA ADHESION |
| | | | | | | T-CELL. |
| 1453 | BL00056A | 28.90 | 3.769e−32 | 75-114 | BL00056 | Ribosomal protein S17 |
| | | | | | | proteins. |
| 1453 | BL00056B | 20.86 | 6.727e−23 | 123-146 | BL00056 | Ribosomal protein S17 |
| | | | | | | proteins. |
| 1453 | PR00973A | 20.76 | 2.565e−20 | 89-112 | PR00973 | RIBOSOMAL PROTEIN S17 |
| | | | | | | FAMILY SIGNATURE |
| 1453 | PR00973B | 13.27 | 6.625e−12 | 123-133 | PR00973 | RIBOSOMAL PROTEIN S17 |
| | | | | | | FAMILY SIGNATURE |
| 1453 | PR00973C | 10.86 | 1.300e−09 | 133-140 | PR00973 | RIBOSOMAL PROTEIN S17 |
| | | | | | | FAMILY SIGNATURE |
| 1454 | BL01019A | 13.20 | 9.520e−13 | 46-85 | BL01019 | ADP-ribosylation |
| | | | | | | factors family |
| | | | | | | proteins. |
| 1454 | BL0115A | 10.22 | 5.075e−11 | 12-55 | BL01115 | GTP-binding nuclear |
| | | | | | | protein ran proteins. |
| 1454 | PR00449A | 13.20 | 5.846e−21 | 12-33 | PR00449 | TRANSFORMING PROTEIN |
| | | | | | | P21 RAS SIGNATURE |
| 1454 | PR00449B | 14.34 | 5.500e−13 | 35-51 | PR00449 | TRANSFORMING PROTEIN |
| | | | | | | P21 RAS SIGNATURE |
| 1454 | PR00449C | 17.27 | 3.700e−24 | 53-75 | PR00449 | TRANSFORMING PROTEIN |
| | | | | | | P21 RAS SIGNATURE |
| 1454 | PR00449D | 10.79 | 3.368e−13 | 115-128 | PR00449 | TRANSFORMING PROTEIN |
| | | | | | | P21 RAS SIGNATURE |
| 1454 | PR00449E | 13.50 | 6.684e−17 | 150-172 | PR00449 | TRANSFORMING PROTEIN |
| | | | | | | P21 RAS SIGNATURE |
| 1458 | BL00284A | 15.64 | 2.742e−15 | 166-189 | BL00284 | Serpins proteins. |
| 1458 | BL00284B | 17.99 | 6.182e−12 | 258-278 | BL00284 | Serpins proteins. |
| 1458 | BL00284C | 28.56 | 6.400e−25 | 285-326 | BL00284 | Serpins proteins. |
| 1458 | BL00284D | 16.34 | 7.070e−12 | 396-422 | BL00284 | Serpins proteins. |
| 1458 | BL00284E | 19.15 | 7.968e−16 | 474-498 | BL00284 | Serpins proteins. |
| 1458 | PD02080A | 10.03 | 9.750e−10 | 1-16 | PD02080 | T-CELL GLYCOPROTEIN CD8 |
| | | | | | | CHAIN SURFACE ALPHA |
| | | | | | | PRE. |
| 1458 | PR00743B | 14.95 | 8.831e−09 | 206-226 | PR00743 | GLYCOSYL HYDROLASE |
| | | | | | | FAMILY 36 SIGNATURE |
| 1459 | BL00192A | 11.90 | 4.857e−30 | 5-44 | BL00192 | Cytochrome b/b6 heme- |
| | | | | | | ligand proteins. |
| 1459 | BL00192B | 9.13 | 1.000e−40 | 62-107 | BL00192 | Cytochrome b/b6 heme- |
| | | | | | | ligand proteins. |
| 1459 | BL00192C | 7.84 | 9.325e−40 | 124-171 | BL00192 | Cytochrome b/b6 heme- |
| | | | | | | ligand proteins. |
| 1459 | BL00192D | 10.29 | 4.176e−36 | 196-231 | BL00192 | Cytochrome b/b6 heme- |
| | | | | | | ligand proteins. |
| 1459 | BL00192E | 13.29 | 1.000e−40 | 247-294 | BL00192 | Cytochrome b/b6 heme- |
| | | | | | | ligand proteins. |
| 1459 | BL00192F | 14.83 | 1.900e−32 | 318-367 | BL00192 | Cytochrome b/b6 heme- |
| | | | | | | ligand proteins. |
| 1460 | BL00580A | 17.63 | 7.652e−37 | 14-49 | BL00580 | Ribosomal protein L32e |
| | | | | | | proteins. |
| 1460 | BL00580B | 19.83 | 6.850e−40 | 50-86 | BL00580 | Ribosomal protein L32e |
| | | | | | | proteins. |
| 1462 | BL00166A | 14.82 | 7.429e−10 | 66-77 | BL00166 | Enoyl-CoA |
| | | | | | | hydratase/isomerase |
| | | | | | | proteins. |
| 1462 | BL00166B | 16.92 | 3.348e−17 | 104-125 | BL00166 | Enoyl-CoA |
| | | | | | | hydratase/isomerase |
| | | | | | | proteins. |
| 1462 | BL00166C | 18.93 | 9.129e−23 | 161-187 | BL00166 | Enoyl-CoA |
| | | | | | | hydratase/isomerase |
| | | | | | | proteins. |
| 1462 | BL00166D | 22.87 | 4.375e−22 | 213-248 | BL00166 | Enoyl-CoA |
| | | | | | | hydratase/isomerase |
| | | | | | | proteins. |
| 1463 | BL00226A | 12.77 | 2.080e−14 | 83-97 | BL00226 | Intermediate filaments |
| | | | | | | proteins. |
| 1463 | BL00226B | 23.86 | 5.050e−38 | 183-230 | BL00226 | Intermediate filaments |
| | | | | | | proteins. |
| 1463 | BL00226C | 13.23 | 6.850e−25 | 248-278 | BL00226 | Intermediate filaments |
| | | | | | | proteins. |
| 1463 | BL00226D | 19.10 | 1.000e−40 | 349-395 | BL00226 | Intermediate filaments |
| | | | | | | proteins. |
| 1463 | BL00226D | 19.10 | 9.100e−09 | 296-342 | BL00226 | Intermediate filaments |
| | | | | | | proteins. |
| 1464 | BL00039A | 18.44 | 1.871e−23 | 21-59 | BL00039 | DEAD-box subfamily ATP- |
| | | | | | | dependent helicases |
| | | | | | | proteins. |
| 1464 | BL00039B | 19.19 | 4.064e−11 | 277-302 | BL00039 | DEAD-box subfamily ATP- |
| | | | | | | dependent helicases |
| | | | | | | proteins. |
| 1464 | BL00039C | 15.63 | 1.720e−11 | 364-387 | BL00039 | DEAD-box subfamily ATP- |
| | | | | | | dependent helicases |
| | | | | | | proteins. |
| 1464 | BL00039D | 21.67 | 1.900e−29 | 568-613 | BL00039 | DEAD-box subfamily ATP- |
| | | | | | | dependent helicases |
| | | | | | | proteins. |
| 1465 | BL00222B | 11.09 | 4.420e−10 | 60-75 | BL00222 | Insulin-like growth |
| | | | | | | factor binding |
| | | | | | | proteins. |
| 1465 | BL00273 | 12.24 | 8.286e−09 | 64-76 | BL00273 | Heat-stable |
| | | | | | | enterotoxins proteins. |
| 1465 | BL00282 | 16.88 | 4.234e−12 | 111-133 | BL00282 | Kazal serine protease |
| | | | | | | inhibitors family |
| | | | | | | proteins. |
| 1465 | PR00290B | 9.78 | 4.326e−09 | 122-133 | PR00290 | KAZAL-TYPE SERINE |
| | | | | | | PROTEASE INHIBITOR |
| | | | | | | SIGNATURE |
| 1465 | PR00834A | 9.80 | 3.659e−11 | 213-225 | PR00834 | HTRA/DEGQ PROTEASE |
| | | | | | | FAMILY SIGNATURE |
| 1465 | PR00834B | 10.09 | 5.500e−14 | 234-254 | PR00834 | HTRA/DEGQ PROTEASE |
| | | | | | | FAMILY SIGNATURE |
| 1465 | PR00834C | 15.43 | 3.613e−20 | 275-299 | PR00834 | HTRA/DEGQ PROTEASE |
| | | | | | | FAMILY SIGNATURE |
| 1465 | PR00834D | 12.14 | 6.455e−18 | 313-330 | PR00834 | HTRA/DEGQ PROTEASE |
| | | | | | | FAMILY SIGNATURE |
| 1465 | PR00834E | 13.63 | 5.355e−13 | 335-352 | PR00834 | HTRA/DEGQ PROTEASE |
| | | | | | | FAMILY SIGNATURE |
| 1465 | PR00834F | 10.91 | 9.526e−12 | 427-439 | PR00834 | HTRA/DEGQ PROTEASE |
| | | | | | | FAMILY SIGNATURE |
| 1466 | PR00939A | 8.95 | 2.636e−09 | 135-144 | PR00939 | C2HC-TYPE ZINC-FINGER |
| | | | | | | SIGNATURE |
| 1466 | PR00939A | 8.95 | 8.714e−11 | 96-105 | PR00939 | C2HC-TYPE ZINC-FINGER |
| | | | | | | SIGNATURE |
| 1466 | PR00939B | 13.27 | 2.588e−09 | 81-89 | PR00939 | C2HC-TYPE ZINC-FINGER |
| | | | | | | SIGNATURE |
| 1467 | BL00288A | 17.47 | 3.333e−34 | 17-46 | BL00288 | Tissue inhibitors of |
| | | | | | | metalloproteinases |
| | | | | | | proteins. |
| 1467 | BL00288B | 9.44 | 5.500e−14 | 62-72 | BL00288 | Tissue inhibitors of |
| | | | | | | metalloproteinases |
| | | | | | | proteins. |
| 1467 | BL00288C | 14.62 | 3.829e−16 | 78-92 | BL00288 | Tissue inhibitors of |
| | | | | | | metalloproteinases |
| | | | | | | proteins. |
| 1467 | BL00288D | 25.76 | 1.000e−40 | 100-144 | BL00288 | Tissue inhibitors of |
| | | | | | | metalloproteinases |
| | | | | | | proteins. |
| 1467 | BL00288E | 17.24 | 4.333e−26 | 145-167 | BL00288 | Tissue inhibitors of |
| | | | | | | metalloproteinases |
| | | | | | | proteins. |
| 1468 | PR00450C | 12.22 | 4.214e−11 | 98-119 | PR00450 | RECOVERIN FAMILY |
| | | | | | | SIGNATURE |
| 1469 | DM01282A | 17.37 | 7.179e−10 | 62-83 | DM01282 | w INTEGRASE CP4-57 SYT |
| | | | | | | P4. |
| 1470 | BL00359A | 20.66 | 4.000e−21 | 106-141 | BL00359 | Ribosomal protein L11 |
| | | | | | | proteins. |
| 1470 | BL00359B | 23.07 | 4.231e−24 | 142-182 | BL00359 | Ribosomal protein L11 |
| | | | | | | proteins. |
| 1470 | BL00359C | 22.18 | 6.586e−22 | 197-230 | BL00359 | Ribosomal protein L11 |
| | | | | | | proteins. |
| 1470 | BL01108A | 20.33 | 1.000e−08 | 126-158 | BL01108 | Ribosomal protein L24 |
| | | | | | | proteins. |
| 1472 | BL00390 | 27.44 | 1.000e−40 | 16-70 | BL00390 | Sodium and potassium |
| | | | | | | ATPases beta subunits |
| | | | | | | proteins. |
| 1473 | BL00536A | 14.17 | 1.000e−40 | 449-490 | BL00536 | Ubiquitin-activating |
| | | | | | | enzyme proteins. |
| 1473 | BL00536A | 14.17 | 9.647e−11 | 53-94 | BL00536 | Ubiquitin-activating |
| | | | | | | enzyme proteins. |
| 1473 | BL00536B | 18.17 | 1.000e−40 | 498-541 | BL00536 | Ubiquitin-activating |
| | | | | | | enzyme proteins. |
| 1473 | BL00536B | 18.17 | 3.947e−09 | 97-140 | BL00536 | Ubiquitin-activating |
| | | | | | | enzyme proteins. |
| 1473 | BL00536C | 15.91 | 1.000e−40 | 559-597 | BL00536 | Ubiquitin-activating |
| | | | | | | enzyme proteins. |
| 1473 | BL00536D | 22.91 | 1.000e−40 | 621-664 | BL00536 | Ubiquitin-activating |
| | | | | | | enzyme proteins. |
| 1473 | BL00536E | 16.94 | 3.753e−09 | 744-774 | BL00536 | Ubiquitin-activating |
| | | | | | | enzyme proteins. |
| 1473 | BL00536E | 16.94 | 8.435e−34 | 841-871 | BL00536 | Ubiquitin-activating |
| | | | | | | enzyme proteins. |
| 1473 | BL00536F | 13.65 | 1.000e−40 | 872-910 | BL00536 | Ubiquitin-activating |
| | | | | | | enzyme proteins. |
| 1476 | BL00227A | 24.55 | 3.250e−39 | 1-34 | BL00227 | Tubulin subunits alpha, |
| | | | | | | beta, and gamma |
| | | | | | | proteins. |
| 1476 | BL00227B | 19.29 | 1.000e−40 | 50-104 | BL00227 | Tubulin subunits alpha, |
| | | | | | | beta, and gamma |
| | | | | | | proteins. |
| 1476 | BL00227C | 25.48 | 1.000e−40 | 111-162 | BL00227 | Tubulin subunits alpha, |
| | | | | | | beta, and gamma |
| | | | | | | proteins. |
| 1476 | BL00227D | 18.46 | 1.000e−40 | 220-273 | BL00227 | Tubulin subunits alpha, |
| | | | | | | beta, and gamma |
| | | | | | | proteins. |
| 1476 | BL00227E | 24.15 | 8.500e−34 | 324-358 | BL00227 | Tubulin subunits alpha, |
| | | | | | | beta, and gamma |
| | | | | | | proteins. |
| 1476 | BL00227F | 21.16 | 1.000e−40 | 372-425 | BL00227 | Tubulin subunits alpha, |
| | | | | | | beta, and gamma |
| | | | | | | proteins. |
| 1477 | PD01443B | 15.02 | 1.000e−40 | 20-70 | PD01443 | INHIBITOR CALPAIN |
| | | | | | | CALPASTATIN REPEAT |
| | | | | | | THIOL PROT. |
| 1477 | PD01443C | 9.45 | 3.455e−40 | 78-112 | PD01443 | INHIBITOR CALPAIN |
| | | | | | | CALPASTATIN REPEAT |
| | | | | | | THIOL PROT. |
| 1477 | PD01443D | 8.36 | 8.031e−26 | 113-134 | PD01443 | INHIBITOR CALPAIN |
| | | | | | | CALPASTATIN REPEAT |
| | | | | | | THIOL PROT. |
| 1477 | PD01443E | 9.22 | 1.273e−34 | 136-162 | PD01443 | INHIBITOR CALPAIN |
| | | | | | | CALPASTATIN REPEAT |
| | | | | | | THIOL PROT. |
| 1477 | PD01443F | 13.86 | 1.000e−40 | 163-213 | PD01443 | INHIBITOR CALPAIN |
| | | | | | | CALPASTATIN REPEAT |
| | | | | | | THIOL PROT. |
| 1477 | PD01443G | 11.15 | 1.000e−40 | 228-272 | PD01443 | INHIBITOR CALPAIN |
| | | | | | | CALPASTATIN REPEAT |
| | | | | | | THIOL PROT. |
| 1477 | PD01443H | 11.91 | 3.032e−31 | 273-298 | PD01443 | INHIBITOR CALPAIN |
| | | | | | | CALPASTATIN REPEAT |
| | | | | | | THIOL PROT. |
| 1477 | PD01443H | 11.91 | 6.032e−11 | 552-577 | PD01443 | INHIBITOR CALPAIN |
| | | | | | | CALPASTATIN REPEAT |
| | | | | | | THIOL PROT. |
| 1477 | PD01443H | 11.91 | 8.835e−13 | 415-440 | PD01443 | INHIBITOR CALPAIN |
| | | | | | | CALPASTATIN REPEAT |
| | | | | | | THIOL PROT. |
| 1477 | PD01443I | 10.25 | 1.000e−40 | 299-335 | PD01443 | INHIBITOR CALPAIN |
| | | | | | | CALPASTATIN REPEAT |
| | | | | | | THIOL PROT. |
| 1477 | PD01443J | 4.11 | 1.545e−15 | 523-556 | PD01443 | INHIBITOR CALPAIN |
| | | | | | | CALPASTATIN REPEAT |
| | | | | | | THIOL PROT. |
| 1477 | PD01443J | 4.11 | 2.756e−40 | 386-419 | PD01443 | INHIBITOR CALPAIN |
| | | | | | | CALPASTATIN REPEAT |
| | | | | | | THIOL PROT. |
| 1477 | PD01443J | 4.11 | 5.425e−10 | 243-276 | PD01443 | INHIBITOR CALPAIN |
| | | | | | | CALPASTATIN REPEAT |
| | | | | | | THIOL PROT. |
| 1477 | PD01443K | 9.19 | 1.000e−40 | 420-458 | PD01443 | INHIBITOR CALPAIN |
| | | | | | | CALPASTATIN REPEAT |
| | | | | | | THIOL PROT. |
| 1477 | PD01443K | 9.19 | 3.571e−23 | 278-316 | PD01443 | INHIBITOR CALPAIN |
| | | | | | | CALPASTATIN REPEAT |
| | | | | | | THIOL PROT. |
| 1477 | PD01443K | 9.19 | 9.914e−15 | 557-595 | PD01443 | INHIBITOR CALPAIN |
| | | | | | | CALPASTATIN REPEAT |
| | | | | | | THIOL PROT. |
| 1477 | PD01443L | 14.60 | 1.000e−40 | 459-501 | PD01443 | INHIBITOR CALPAIN |
| | | | | | | CALPASTATIN REPEAT |
| | | | | | | THIOL PROT. |
| 1477 | PD01443M | 11.28 | 1.000e−40 | 521-554 | PD01443 | INHIBITOR CALPAIN |
| | | | | | | CALPASTATIN REPEAT |
| | | | | | | THIOL PROT. |
| 1477 | PD01443M | 11.28 | 7.387e−09 | 241-274 | PD01443 | INHIBITOR CALPAIN |
| | | | | | | CALPASTATIN REPEAT |
| | | | | | | THIOL PROT. |
| 1477 | PD01443M | 11.28 | 7.861e−14 | 384-417 | PD01443 | INHIBITOR CALPAIN |
| | | | | | | CALPASTATIN REPEAT |
| | | | | | | THIOL PROT. |
| 1477 | PD01443N | 11.76 | 1000e−40 | 555-592 | PD01443 | INHIBITOR CALPAIN |
| | | | | | | CALPASTATIN REPEAT |
| | | | | | | THIOL PROT. |
| 1477 | PD01443N | 11.76 | 4.744e−09 | 142-179 | PD01443 | INHIBITOR CALPAIN |
| | | | | | | CALPASTATIN REPEAT |
| | | | | | | THIOL PROT. |
| 1477 | PD01443N | 11.76 | 7.341e−19 | 418-455 | PD01443 | INHIBITOR CALPAIN |
| | | | | | | CALPASTATIN REPEAT |
| | | | | | | THIOL PROT. |
| 1477 | PD01443N | 11.76 | 9.563e−14 | 276-313 | PD01443 | INHIBITOR CALPAIN |
| | | | | | | CALPASTATIN REPEAT |
| | | | | | | THIOL PROT. |
| 1477 | PD01443O | 6.25 | 4.600e−33 | 640-667 | PD01443 | INHIBITOR CALPAIN |
| | | | | | | CALPASTATIN REPEAT |
| | | | | | | THIOL PROT. |
| 1479 | PR00318C | 12.09 | 8.254e−09 | 268-285 | PR00318 | ALPHA G-PROTEIN |
| | | | | | | (TRANSDUCIN) SIGNATURE |
| 1479 | PR00440C | 9.54 | 7.000e−09 | 268-285 | PR00440 | G-PROTEIN ALPHA SUBUNIT |
| | | | | | | GROUP 12 SIGNATURE |
| 1480 | BL00719A | 16.66 | 6.885e−12 | 32-45 | BL00719 | Glycosyl hydrolases |
| | | | | | | family 2 proteins. |
| 1480 | BL00719B | 17.24 | 5.333e−22 | 207-231 | BL00719 | Glycosyl hydrolases |
| | | | | | | family 2 proteins. |
| 1480 | BL00719C | 30.44 | 3.000e−37 | 324-368 | BL00719 | Glycosyl hydrolases |
| | | | | | | family 2 proteins. |
| 1480 | BL00719D | 22.90 | 4.103e−37 | 369-406 | BL00719 | Glycosyl hydrolases |
| | | | | | | family 2 proteins. |
| 1480 | BL00719E | 16.22 | 2.909e−18 | 436-451 | BL00719 | Glycosyl hydrolases |
| | | | | | | family 2 proteins. |
| 1480 | BL00719F | 17.71 | 5.765e−14 | 533-548 | BL00719 | Glycosyl hydrolases |
| | | | | | | family 2 proteins. |
| 1480 | BL00719G | 25.30 | 4.000e−23 | 588-617 | BL00719 | Glycosyl hydrolases |
| | | | | | | family 2 proteins. |
| 1480 | PR00132A | 13.45 | 8.541e−13 | 126-141 | PR00132 | GLYCOSYL HYDROLASE |
| | | | | | | FAMILY 2 SIGNATURE |
| 1480 | PR00132B | 10.72 | 2.688e−18 | 338-352 | PR00132 | GLYCOSYL HYDROLASE |
| | | | | | | FAMILY 2 SIGNATURE |
| 1480 | PR00132C | 18.68 | 5.500e−20 | 369-387 | PR00132 | GLYCOSYL HYDROLASE |
| | | | | | | FAMILY 2 SIGNATURE |
| 1480 | PR00132D | 16.76 | 9.036e−19 | 437-452 | PR00132 | GLYCOSYL HYDROLASE |
| | | | | | | FAMILY 2 SIGNATURE |
| 1480 | PR00132E | 20.16 | 8.054e−14 | 534-549 | PR00132 | GLYCOSYL HYDROLASE |
| | | | | | | FAMILY 2 SIGNATURE |
| 1481 | BL00678 | 9.67 | 1.947e−09 | 423-433 | BL00678 | Trp-Asp (WD) repeat |
| | | | | | | proteins proteins. |
| 1481 | PF00646A | 14.37 | 8.594e−09 | 237-250 | PF00646 | F-box domain proteins. |
| 1481 | PR00320A | 16.74 | 2.059e−10 | 421-435 | PR00320 | G-PROTEIN BETA WD-40 |
| | | | | | | REPEAT SIGNATURE |
| 1481 | PR00320A | 16.74 | 3.382e−10 | 513-527 | PR00320 | G-PROTEIN BETA WD-40 |
| | | | | | | REPEAT SIGNATURE |
| 1481 | PR00320B | 12.19 | 4.857e−10 | 421-435 | PR00320 | G-PROTEIN BETA WD-40 |
| | | | | | | REPEAT SIGNATURE |
| 1481 | PR00320C | 13.01 | 7.480e−10 | 421-435 | PR00320 | G-PROTEIN BETA WD-40 |
| | | | | | | REPEAT SIGNATURE |
| 1481 | PR00320C | 13.01 | 7.900e−09 | 513-527 | PR00320 | G-PROTEIN BETA WD-40 |
| | | | | | | REPEAT SIGNATURE |
| 1483 | BL01115A | 10.22 | 1.000e−40 | 11-54 | BL01115 | GTP-binding nuclear |
| | | | | | | protein ran proteins. |
| 1483 | BL01115B | 10.81 | 1.000e−40 | 91-134 | BL01115 | GTP-binding nuclear |
| | | | | | | protein ran proteins. |
| 1483 | BL01115C | 10.52 | 2.200e−39 | 140-170 | BL01115 | GTP-binding nuclear |
| | | | | | | protein ran proteins. |
| 1483 | BL01115D | 14.49 | 1.360e−28 | 184-215 | BL01115 | GTP-binding nuclear |
| | | | | | | protein ran proteins. |
| 1483 | PR00442A | 6.46 | 8.013e−09 | 12-27 | PR00442 | G-PROTEIN ALPHA SUBUNIT |
| | | | | | | GROUP Q SIGNATURE |
| 1483 | PR00449A | 13.20 | 1.000e−16 | 11-32 | PR00449 | TRANSFORMING PROTEIN |
| | | | | | | P21 RAS SIGNATURE |
| 1483 | PR00449B | 14.34 | 5.320e−10 | 34-50 | PR00449 | TRANSFORMING PROTEIN |
| | | | | | | P21 RAS SIGNATURE |
| 1483 | PR00449C | 17.27 | 4.750e−16 | 52-74 | PR00449 | TRANSFORMING PROTEIN |
| | | | | | | P21 RAS SIGNATURE |
| 1483 | PR00449D | 10.79 | 9.053e−13 | 113-126 | PR00449 | TRANSFORMING PROTEIN |
| | | | | | | P21 RAS SIGNATURE |
| 1483 | PR00449E | 13.50 | 1.391e−15 | 146-168 | PR00449 | TRANSFORMING PROTEIN |
| | | | | | | P21 RAS SIGNATURE |
| 1483 | PR00627A | 10.81 | 1.265e−19 | 24-38 | PR00627 | GTP-BINDING NUCLEAR |
| | | | | | | PROTEIN RAN/TC4 FAMILY |
| | | | | | | SIGNATURE |
| 1483 | PR00627B | 11.05 | 6.538e−25 | 71-89 | PR00627 | GTP-BINDING NUCLEAR |
| | | | | | | PROTEIN RAN/TC4 FAMILY |
| | | | | | | SIGNATURE |
| 1483 | PR00627C | 11.68 | 9.400e−29 | 91-112 | PR00627 | GTP-BINDING NUCLEAR |
| | | | | | | PROTEIN RAN/TC4 FAMILY |
| | | | | | | SIGNATURE |
| 1483 | PR00627D | 12.54 | 1.000e−21 | 127-145 | PR00627 | GTP-BINDING NUCLEAR |
| | | | | | | PROTEIN RAN/TC4 FAMILY |
| | | | | | | SIGNATURE |
| 1483 | PR00627E | 14.59 | 1.529e−24 | 165-187 | PR00627 | GTP-BINDING NUCLEAR |
| | | | | | | PROTEIN RAN/TC4 FAMILY |
| | | | | | | SIGNATURE |
| 1484 | BL00290A | 20.89 | 6.143e−17 | 140-162 | BL00290 | Immunoglobulins and |
| | | | | | | major |
| | | | | | | histocompatibility |
| | | | | | | complex proteins. |
| 1484 | BL00290B | 13.17 | 4.750e−16 | 197-214 | BL00290 | Immunoglobulins and |
| | | | | | | major |
| | | | | | | histocompatibility |
| | | | | | | complex proteins. |
| 1484 | PF00969A | 22.07 | 9.719e−33 | 11-53 | PF00969 | Class II |
| | | | | | | histocompatibility |
| | | | | | | antigen, beta domain |
| | | | | | | proteins. |
| 1484 | PF00969B | 9.97 | 1.000e−40 | 55-90 | PF00969 | Class II |
| | | | | | | histocompatibility |
| | | | | | | antigen, beta domain |
| | | | | | | proteins. |
| 1484 | PF00969C | 27.72 | 1.000e−40 | 94-143 | PF00969 | Class II |
| | | | | | | histocompatibility |
| | | | | | | antigen, beta domain |
| | | | | | | proteins. |
| 1484 | PF00969D | 14.02 | 7.375e−35 | 151-180 | PF00969 | Class II |
| | | | | | | histocompatibility |
| | | | | | | antigen, beta domain |
| | | | | | | proteins. |
| 1484 | PF00969E | 11.49 | 7.686e−35 | 209-243 | PF00969 | Class II |
| | | | | | | histocompatibility |
| | | | | | | antigen, beta domain |
| | | | | | | proteins. |
| 1486 | BL00309C | 18.65 | 2.241e−09 | 62-86 | BL00309 | Vertebrate galactoside- |
| | | | | | | binding lectin |
| | | | | | | proteins. |
| 1487 | BL00824B | 9.21 | 3.676e−09 | 349-368 | BL00824 | Elongation factor 1 |
| | | | | | | beta/beta′/delta chain |
| | | | | | | proteins. |
| 1487 | PF00956A | 11.88 | 1.000e−13 | 121-131 | PF00956 | Nuclesosome assembly |
| | | | | | | protein (NAP). |
| 1487 | PF00956B | 23.14 | 1.000e−40 | 162-202 | PF00956 | Nuclesosome assembly |
| | | | | | | protein (NAP). |
| 1487 | PF00956C | 7.72 | 6.850e−22 | 216-233 | PF00956 | Nuclesosome assembly |
| | | | | | | protein (NAP). |
| 1487 | PF00956D | 7.51 | 3.700e−12 | 295-305 | PF00956 | Nuclesosome assembly |
| | | | | | | protein (NAP). |
| 1488 | BL00284A | 15.64 | 1.000e−18 | 50-73 | BL00284 | Serpins proteins. |
| 1488 | BL00284B | 17.99 | 1.273e−12 | 149-169 | BL00284 | Serpins proteins. |
| 1488 | BL00284C | 28.56 | 5.821e−27 | 179-220 | BL00284 | Serpins proteins. |
| 1488 | BL00284D | 16.34 | 1.500e−14 | 291-317 | BL00284 | Serpins proteins. |
| 1488 | BL00284E | 19.15 | 3.842e−21 | 374-398 | BL00284 | Serpins proteins. |
| 1489 | BL00420B | 22.67 | 3.951e−34 | 28-82 | BL00420 | Speract receptor repeat |
| | | | | | | proteins domain |
| | | | | | | proteins. |
| 1489 | BL00420C | 11.90 | 3.864e−10 | 113-123 | BL00420 | Speract receptor repeat |
| | | | | | | proteins domain |
| | | | | | | proteins. |
| 1489 | PR00258A | 11.46 | 8.054e−16 | 24-40 | PR00258 | SPERACT RECEPTOR |
| | | | | | | SIGNATURE |
| 1489 | PR00258B | 9.63 | 3.531e−15 | 43-54 | PR00258 | SPERACT RECEPTOR |
| | | | | | | SIGNATURE |
| 1489 | PR00258C | 9.05 | 4.643e−11 | 58-68 | PR00258 | SPERACT RECEPTOR |
| | | | | | | SIGNATURE |
| 1489 | PR00258D | 14.41 | 7.968e−15 | 89-103 | PR00258 | SPERACT RECEPTOR |
| | | | | | | SIGNATURE |
| 1489 | PR00258E | 13.33 | 1.486e−13 | 112-124 | PR00258 | SPERACT RECEPTOR |
| | | | | | | SIGNATURE |
| 1490 | BL00474A | 9.96 | 2.800e−15 | 46-56 | BL00474 | Ribosomal protein L3 |
| | | | | | | proteins. |
| 1490 | BL00474B | 21.72 | 7.500e−24 | 80-109 | BL00474 | Ribosomal protein L3 |
| | | | | | | proteins. |
| 1490 | BL00474C | 21.74 | 6.571e−34 | 211-245 | BL00474 | Ribosomal protein L3 |
| | | | | | | proteins. |
| 1490 | BL00474D | 29.47 | 8.650e−36 | 252-288 | BL00474 | Ribosomal protein L3 |
| | | | | | | proteins. |
| 1491 | BL00227A | 24.55 | 8.200e−36 | 1-34 | BL00227 | Tubulin subunits alpha, |
| | | | | | | beta, and gamma |
| | | | | | | proteins. |
| 1491 | BL00227B | 19.29 | 1.000e−40 | 52-106 | BL00227 | Tubulin subunits alpha, |
| | | | | | | beta, and gamma |
| | | | | | | proteins. |
| 1491 | BL00227C | 25.48 | 1.000e−40 | 113-164 | BL00227 | Tubulin subunits alpha, |
| | | | | | | beta, and gamma |
| | | | | | | proteins. |
| 1491 | BL00227D | 18.46 | 1.000e−40 | 222-275 | BL00227 | Tubulin subunits alpha, |
| | | | | | | beta, and gamma |
| | | | | | | proteins. |
| 1491 | BL00227E | 24.15 | 5.000e−37 | 326-360 | BL00227 | Tubulin subunits alpha, |
| | | | | | | beta, and gamma |
| | | | | | | proteins. |
| 1491 | BL00227F | 21.16 | 1.000e−40 | 382-435 | BL00227 | Tubulin subunits alpha, |
| | | | | | | beta, and gamma |
| | | | | | | proteins. |
| 1493 | BL00018 | 7.41 | 6.870e−09 | 172-184 | BL00018 | EF-hand calcium-binding |
| | | | | | | domain proteins. |
| 1493 | PR00049D | 0.00 | 9.214e−10 | 63-77 | PR00049 | WILM'S TUMOUR PROTEIN |
| | | | | | | SIGNATURE |
| 1494 | DM01111A | 10.80 | 5.500e−34 | 7-35 | DM01111 | 4 kw PHOSPHATASE |
| | | | | | | TRANSFORMING 61K PDF1. |
| 1494 | DM01111B | 9.44 | 1.000e−40 | 36-72 | DM01111 | 4 kw PHOSPHATASE |
| | | | | | | TRANSFORMING 61K PDF1. |
| 1494 | DM01111C | 9.35 | 9.100e−35 | 93-121 | DM01111 | 4 kw PHOSPHATASE |
| | | | | | | TRANSFORMING 61K PDF1. |
| 1494 | DM01111D | 16.76 | 1.000e−40 | 152-197 | DM01111 | 4 kw PHOSPHATASE |
| | | | | | | TRANSFORMING 61K PDF1. |
| 1494 | DM01111E | 17.28 | 1.000e−40 | 238-286 | DM01111 | 4 kw PHOSPHATASE |
| | | | | | | TRANSFORMING 61K PDF1. |
| 1494 | DM01111E | 17.28 | 7.632e−10 | 398-446 | DM01111 | 4 kw PHOSPHATASE |
| | | | | | | TRANSFORMING 61K PDF1. |
| 1494 | DM01111F | 18.22 | 6.684e−40 | 305-340 | DM01111 | 4 kw PHOSPHATASE |
| | | | | | | TRANSFORMING 61K PDF1. |
| 1494 | DM01111G | 10.39 | 1.000e−40 | 341-381 | DM01111 | 4 kw PHOSPHATASE |
| | | | | | | TRANSFORMING 61K PDF1. |
| 1494 | DM01111G | 10.39 | 5.376e−11 | 181-221 | DM01111 | 4 kw PHOSPHATASE |
| | | | | | | TRANSFORMING 61K PDF1. |
| 1494 | DM01111G | 10.39 | 9.622e−09 | 259-299 | DM01111 | 4 kw PHOSPHATASE |
| | | | | | | TRANSFORMING 61K PDF1. |
| 1494 | DM01111H | 12.57 | 1.000e−40 | 382-423 | DM01111 | 4 kw PHOSPHATASE |
| | | | | | | TRANSFORMING 61K PDF1. |
| 1494 | DM01111I | 15.32 | 5.846e−36 | 424-453 | DM01111 | 4 kw PHOSPHATASE |
| | | | | | | TRANSFORMING 61K PDF1. |
| 1494 | DM01111J | 19.19 | 8.941e−40 | 454-487 | DM01111 | 4 kw PHOSPHATASE |
| | | | | | | TRANSFORMING 61K PDF1. |
| 1494 | DM01111K | 19.10 | 4.000e−38 | 494-523 | DM01111 | 4 kw PHOSPHATASE |
| | | | | | | TRANSFORMING 61K PDF1. |
| 1494 | DM01111L | 11.93 | 3.500e−33 | 524-551 | DM01111 | 4 kw PHOSPHATASE |
| | | | | | | TRANSFORMING 61K PDF1. |
| 1494 | DM01111M | 10.67 | 8.500e−30 | 560-583 | DM01111 | 4 kw PHOSPHATASE |
| | | | | | | TRANSFORMING 61K PDF1. |
| 1495 | BL01310 | 14.74 | 2.432e−29 | 133-168 | BL01310 | ATP1G1/PLM/MAT8 |
| | | | | | | family proteins. |
| 1496 | BL01221A | 17.26 | 1.000e−22 | 1-28 | BL01221 | PMP-22/EMP/MP20 |
| | | | | | | family proteins. |
| 1496 | BL01221B | 13.29 | 4.818e−12 | 34-47 | BL01221 | PMP-22/EMP/MP20 |
| | | | | | | family proteins. |
| 1496 | BL01221C | 26.20 | 2.303e−12 | 56-100 | BL01221 | PMP-22/EMP/MP20 |
| | | | | | | family proteins. |
| 1496 | BL01221C | 26.20 | 5.500e−33 | 59-103 | BL01221 | PMP-22/EMP/MP20 |
| | | | | | | family proteins. |
| 1496 | BL01221D | 13.99 | 6.276e−27 | 139-165 | BL01221 | PMP-22/EMP/MP20 |
| | | | | | | family proteins. |
| 1497 | BL00094A | 13.03 | 6.192e−16 | 1139-1159 | BL00094 | C-5 cytosine-specific |
| | | | | | | DNA methylases |
| | | | | | | proteins. |
| 1497 | BL00094B | 16.39 | 1.000e−14 | 1218-1233 | BL00094 | C-5 cytosine-specific |
| | | | | | | DNA methylases |
| | | | | | | proteins. |
| 1497 | BL00094C | 9.14 | 2.800e−11 | 1260-1271 | BL00094 | C-5 cytosine-specific |
| | | | | | | DNA methylases |
| | | | | | | proteins. |
| 1497 | BL00094D | 14.24 | 8.636e−14 | 1298-1317 | BL00094 | C-5 cytosine-specific |
| | | | | | | DNA methylases |
| | | | | | | proteins. |
| 1497 | BL00094E | 14.45 | 8.920e−15 | 1546-1561 | BL00094 | C-5 cytosine-specific |
| | | | | | | DNA methylases |
| | | | | | | proteins. |
| 1497 | BL00094F | 13.12 | 9.280e−10 | 1573-1582 | BL00094 | C-5 cytosine-specific |
| | | | | | | DNA methylases |
| | | | | | | proteins. |
| 1497 | PF01140D | 15.54 | 3.407e−09 | 212-246 | PF01140 | Matrix protein (MA), |
| | | | | | | p15. |
| 1497 | PR00105A | 10.36 | 4.900e−13 | 1140-1156 | PR00105 | CYTOSINE-SPECIFIC DNA |
| | | | | | | METHYLTRANSFERASE |
| | | | | | | SIGNATURE |
| 1497 | PR00105B | 12.32 | 2.800e−12 | 1259-1273 | PR00105 | CYTOSINE-SPECIFIC DNA |
| | | | | | | METHYLTRANSFERASE |
| | | | | | | SIGNATURE |
| 1497 | PR00105C | 10.86 | 1.000e−10 | 1305-1318 | PR001015 | CYTOSINE-SPECIFIC DNA |
| | | | | | | METHYLTRANSFERASE |
| | | | | | | SIGNATURE |
| 1498 | PR00801A | 10.74 | 4.913e−25 | 2-22 | PR00801 | ADRENOMEDULLIN |
| | | | | | | SIGNATURE |
| 1498 | PR00801B | 11.34 | 1.094e−22 | 30-46 | PR00801 | ADRENOMEDULLIN |
| | | | | | | SIGNATURE |
| 1498 | PR00801C | 10.94 | 8.258e−22 | 49-67 | PR00801 | ADRENOMEDULLIN |
| | | | | | | SIGNATURE |
| 1498 | PR00801D | 13.48 | 8.463e−22 | 83-100 | PR00801 | ADRENOMEDULLIN |
| | | | | | | SIGNATURE |
| 1498 | PR00801E | 9.31 | 5.829e−26 | 103-122 | PR00801 | ADRENOMEDULLIN |
| | | | | | | SIGNATURE |
| 1498 | PR00801F | 17.66 | 3.596e−25 | 122-141 | PR00801 | ADRENOMEDULLIN |
| | | | | | | SIGNATURE |
| 1498 | PR00801G | 10.72 | 1.000e−21 | 141-157 | PR00801 | ADRENOMEDULLIN |
| | | | | | | SIGNATURE |
| 1498 | PR00801H | 10.32 | 3.512e−19 | 161-178 | PR00801 | ADRENOMEDULLIN |
| | | | | | | SIGNATURE |
| 1499 | BL00303A | 21.77 | 5.000e−26 | 4-40 | BL00303 | S-100/ICaBP type |
| | | | | | | calcium binding |
| | | | | | | protein. |
| 1499 | BL00303B | 26.15 | 1.900e−29 | 48-84 | BL00303 | S-100/ICaBP type |
| | | | | | | calcium binding |
| | | | | | | protein. |
| 1503 | BL00027 | 26.43 | 4.000e−11 | 27-69 | BL00027 | ‘Homeobox’ domain |
| | | | | | | proteins. |
| 1504 | BL00913B | 10.94 | 7.706e−11 | 86-101 | BL00913 | Iron-containing alcohol |
| | | | | | | dehydrogenases |
| | | | | | | proteins. |
| 1504 | BL00913C | 7.62 | 4.375e−11 | 136-145 | BL00913 | Iron-containing alcohol |
| | | | | | | dehydrogenases |
| | | | | | | proteins. |
| 1504 | BL00913D | 24.20 | 8.981e−17 | 170-203 | BL00913 | Iron-containing alcohol |
| | | | | | | dehydrogenases |
| | | | | | | proteins. |
| 1504 | BL00913E | 21.38 | 9.203e−09 | 269-302 | BL00913 | Iron-containing alcohol |
| | | | | | | dehydrogenases |
| | | | | | | proteins. |
| 1506 | BL00298A | 10.97 | 1.000e−40 | 13-57 | BL00298 | Heat shock hsp90 |
| | | | | | | proteins family |
| | | | | | | proteins. |
| 1506 | BL00298B | 15.64 | 1.000e−40 | 73-119 | BL00298 | Heat shock hsp90 |
| | | | | | | proteins family |
| | | | | | | proteins. |
| 1506 | BL00298C | 16.40 | 1.000e−40 | 120-163 | BL00298 | Heat shock hsp90 |
| | | | | | | proteins family |
| | | | | | | proteins. |
| 1506 | BL00298D | 17.97 | 1.000e−40 | 176-215 | BL00298 | Heat shock hsp90 |
| | | | | | | proteins family |
| | | | | | | proteins. |
| 1506 | BL00298E | 27.30 | 1.000e−40 | 267-321 | BL00298 | Heat shock hsp90 |
| | | | | | | proteins family |
| | | | | | | proteins. |
| 1506 | BL00298F | 11.21 | 1.000e−40 | 353-407 | BL00298 | Heat shock hsp90 |
| | | | | | | proteins family |
| | | | | | | proteins. |
| 1506 | BL00298G | 24.57 | 1.000e−40 | 410-464 | BL00298 | Heat shock hsp90 |
| | | | | | | proteins family |
| | | | | | | proteins. |
| 1506 | BL00298H | 20.50 | 1.000e−40 | 498-551 | BL00298 | Heat shock hsp90 |
| | | | | | | proteins family |
| | | | | | | proteins. |
| 1506 | BL00298I | 30.07 | 1.000e−40 | 602-655 | BL00298 | Heat shock hsp90 |
| | | | | | | proteins family |
| | | | | | | proteins. |
| 1506 | PR00775A | 9.90 | 1.692e−24 | 13-33 | PR00775 | 90 KD HEAT SHOCK |
| | | | | | | PROTEIN SIGNATURE |
| 1506 | PR00775B | 3.52 | 2.286e−29 | 34-56 | PR00775 | 90 KD HEAT SHOCK |
| | | | | | | PROTEIN SIGNATURE |
| 1506 | PR00775C | 10.68 | 1.474e−19 | 83-100 | PR00775 | 90 KD HEAT SHOCK |
| | | | | | | PROTEIN SIGNATURE |
| 1506 | PR00775D | 8.91 | 1.000e−22 | 101-118 | PR00775 | 90 KD HEAT SHOCK |
| | | | | | | PROTEIN SIGNATURE |
| 1506 | PR00775E | 8.06 | 1.000e−27 | 126-148 | PR00775 | 90 KD HEAT SHOCK |
| | | | | | | PROTEIN SIGNATURE |
| 1506 | PR00775F | 12.76 | 7.188e−21 | 177-194 | PR00775 | 90 KD HEAT SHOCK |
| | | | | | | PROTEIN SIGNATURE |
| 1506 | PR00775G | 10.64 | 5.800e−22 | 195-213 | PR00775 | 90 KD HEAT SHOCK |
| | | | | | | PROTEIN SIGNATURE |
| 1507 | BL00223A | 15.59 | 7.158e−12 | 270-303 | BL00223 | Annexins repeat |
| | | | | | | proteins domain |
| | | | | | | proteins. |
| 1507 | BL00223A | 15.59 | 8.113e−16 | 38-71 | BL00223 | Annexins repeat |
| | | | | | | proteins domain |
| | | | | | | proteins. |
| 1507 | BL00223A | 15.59 | 9.625e−32 | 110-143 | BL00223 | Annexins repeat |
| | | | | | | proteins domain |
| | | | | | | proteins. |
| 1507 | BL00223B | 28.47 | 1.000e−40 | 180-229 | BL00223 | Annexins repeat |
| | | | | | | proteins domain |
| | | | | | | proteins. |
| 1507 | BL00223C | 24.79 | 1.000e−40 | 257-311 | BL00223 | Annexins repeat |
| | | | | | | proteins domain |
| | | | | | | proteins. |
| 1507 | BL00223C | 24.79 | 6.760e−18 | 97-151 | BL00223 | Annexins repeat |
| | | | | | | proteins domain |
| | | | | | | proteins. |
| 1507 | PR00196A | 11.16 | 3.423e−15 | 119-141 | PR00196 | ANNEXIN FAMILY |
| | | | | | | SIGNATURE |
| 1507 | PR00196A | 11.16 | 7.136e−23 | 47-69 | PR00196 | ANNEXIN FAMILY |
| | | | | | | SIGNATURE |
| 1507 | PR00196B | 10.68 | 7.300e−17 | 87-103 | PR00196 | ANNEXIN FAMILY |
| | | | | | | SIGNATURE |
| 1507 | PR00196C | 10.36 | 6.870e−23 | 114-135 | PR00196 | ANNEXIN FAMILY |
| | | | | | | SIGNATURE |
| 1507 | PR00196C | 10.36 | 7.750e−12 | 274-295 | PR00196 | ANNEXIN FAMILY |
| | | | | | | SIGNATURE |
| 1507 | PR00196D | 21.86 | 4.103e−25 | 198-224 | PR00196 | ANNEXIN FAMILY |
| | | | | | | SIGNATURE |
| 1507 | PR00196E | 9.19 | 1.333e−23 | 278-298 | PR00196 | ANNEXIN FAMILY |
| | | | | | | SIGNATURE |
| 1507 | PR00196E | 9.19 | 7.353e−12 | 118-138 | PR00196 | ANNEXIN FAMILY |
| | | | | | | SIGNATURE |
| 1507 | PR00196F | 13.89 | 2.714e−15 | 306-321 | PR00196 | ANNEXIN FAMILY |
| | | | | | | SIGNATURE |
| 1507 | PR00196G | 11.72 | 4.353e−09 | 162-175 | PR00196 | ANNEXIN FAMILY |
| | | | | | | SIGNATURE |
| 1507 | PR00196G | 11.72 | 6.000e−16 | 322-335 | PR00196 | ANNEXIN FAMILY |
| | | | | | | SIGNATURE |
| 1507 | PR00197B | 7.56 | 7.652e−17 | 47-69 | PR00197 | ANNEXIN TYPE I |
| | | | | | | SIGNATURE |
| 1507 | PR00197C | 7.50 | 2.394e−10 | 87-103 | PR00197 | ANNEXIN TYPE I |
| | | | | | | SIGNATURE |
| 1507 | PR00197D | 7.50 | 2.500e−09 | 274-295 | PR00197 | ANNEXIN TYPE I |
| | | | | | | SIGNATURE |
| 1507 | PR00197D | 7.50 | 6.906e−18 | 114-135 | PR00197 | ANNEXIN TYPE I |
| | | | | | | SIGNATURE |
| 1507 | PR00197E | 11.89 | 9.077e−15 | 198-224 | PR00197 | ANNEXIN TYPE I |
| | | | | | | SIGNATURE |
| 1507 | PR00197F | 9.03 | 2.561e−09 | 118-138 | PR00197 | ANNEXIN TYPE I |
| | | | | | | SIGNATURE |
| 1507 | PR00197F | 9.03 | 9.690e−21 | 278-298 | PR00197 | ANNEXIN TYPE I |
| | | | | | | SIGNATURE |
| 1507 | PR00197H | 11.98 | 1.988e−09 | 322-335 | PR00197 | ANNEXIN TYPE I |
| | | | | | | SIGNATURE |
| 1507 | PR00198A | 10.33 | 1.818e−17 | 3-15 | PR00198 | ANNEXIN TYPE II |
| | | | | | | SIGNATURE |
| 1507 | PR00198B | 8.71 | 3.842e−29 | 47-69 | PR00198 | ANNEXIN TYPE II |
| | | | | | | SIGNATURE |
| 1507 | PR00198C | 14.32 | 9.679e−20 | 87-103 | PR00198 | ANNEXIN TYPE II |
| | | | | | | SIGNATURE |
| 1507 | PR00198D | 7.65 | 2.206e−10 | 274-295 | PR00198 | ANNEXIN TYPE II |
| | | | | | | SIGNATURE |
| 1507 | PR00198D | 7.65 | 4.000e−28 | 114-135 | PR00198 | ANNEXIN TYPE II |
| | | | | | | SIGNATURE |
| 1507 | PR00198E | 14.67 | 8.364e−35 | 198-224 | PR00198 | ANNEXIN TYPE II |
| | | | | | | SIGNATURE |
| 1507 | PR00198F | 7.98 | 1.082e−10 | 254-261 | PR00198 | ANNEXIN TYPE II |
| | | | | | | SIGNATURE |
| 1507 | PR00198G | 8.09 | 6.250e−27 | 278-298 | PR00198 | ANNEXIN TYPE II |
| | | | | | | SIGNATURE |
| 1507 | PR00198G | 8.09 | 8.319e−10 | 118-138 | PR00198 | ANNEXIN TYPE II |
| | | | | | | SIGNATURE |
| 1507 | PR00198H | 12.05 | 1.429e−18 | 322-335 | PR00198 | ANNEXIN TYPE II |
| | | | | | | SIGNATURE |
| 1507 | PR00199B | 6.86 | 1.971e−11 | 119-141 | PR00199 | ANNEXIN TYPE III |
| | | | | | | SIGNATURE |
| 1507 | PR00199B | 6.86 | 5.605e−15 | 47-69 | PR00199 | ANNEXIN TYPE III |
| | | | | | | SIGNATURE |
| 1507 | PR00199B | 6.86 | 8.634e−09 | 204-226 | PR00199 | ANNEXIN TYPE III |
| | | | | | | SIGNATURE |
| 1507 | PR00199C | 13.84 | 9.786e−09 | 87-103 | PR00199 | ANNEXIN TYPE III |
| | | | | | | SIGNATURE |
| 1507 | PR00199D | 5.65 | 1.281e−17 | 114-135 | PR00199 | ANNEXIN TYPE III |
| | | | | | | SIGNATURE |
| 1507 | PR00199D | 5.65 | 4.931e−10 | 274-295 | PR00199 | ANNEXIN TYPE III |
| | | | | | | SIGNATURE |
| 1507 | PR00199F | 16.19 | 5.862e−09 | 113-139 | PR00199 | ANNEXIN TYPE III |
| | | | | | | SIGNATURE |
| 1507 | PR00199F | 16.19 | 7.750e−12 | 198-224 | PR00199 | ANNEXIN TYPE III |
| | | | | | | SIGNATURE |
| 1507 | PR00199G | 9.09 | 5.860e−10 | 119-144 | PR00199 | ANNEXIN TYPE III |
| | | | | | | SIGNATURE |
| 1507 | PR00199G | 9.09 | 9.645e−17 | 279-304 | PR00199 | ANNEXIN TYPE III |
| | | | | | | SIGNATURE |
| 1507 | PR00199H | 12.62 | 4.044e−09 | 322-335 | PR00199 | ANNEXIN TYPE III |
| | | | | | | SIGNATURE |
| 1507 | PR00200B | 7.39 | 5.099e−11 | 47-69 | PR00200 | ANNEXIN TYPE IV |
| | | | | | | SIGNATURE |
| 1507 | PR00200B | 7.39 | 9.465e−11 | 119-141 | PR00200 | ANNEXIN TYPE IV |
| | | | | | | SIGNATURE |
| 1507 | PR00200D | 10.01 | 7.554e−11 | 87-103 | PR00200 | ANNEXIN TYPE IV |
| | | | | | | SIGNATURE |
| 1507 | PR00200E | 10.00 | 2.111e−14 | 114-135 | PR00200 | ANNEXIN TYPE IV |
| | | | | | | SIGNATURE |
| 1507 | PR00200E | 10.00 | 5.825e−10 | 274-295 | PR00200 | ANNEXIN TYPE IV |
| | | | | | | SIGNATURE |
| 1507 | PR00200F | 13.72 | 9.100e−10 | 198-224 | PR00200 | ANNEXIN TYPE IV |
| | | | | | | SIGNATURE |
| 1507 | PR00200G | 9.43 | 4.038e−20 | 278-304 | PR00200 | ANNEXIN TYPE IV |
| | | | | | | SIGNATURE |
| 1507 | PR00200G | 9.43 | 6.143e−12 | 118-144 | PR00200 | ANNEXIN TYPE IV |
| | | | | | | SIGNATURE |
| 1507 | PR00200H | 13.68 | 2.753e−11 | 322-335 | PR00200 | ANNEXIN TYPE IV |
| | | | | | | SIGNATURE |
| 1507 | PR00200H | 13.68 | 3.118e−09 | 162-175 | PR00200 | ANNEXIN TYPE IV |
| | | | | | | SIGNATURE |
| 1507 | PR00201A | 6.05 | 3.069e−12 | 119-141 | PR00201 | ANNEXIN TYPE V |
| | | | | | | SIGNATURE |
| 1507 | PR00201A | 6.05 | 6.838e−16 | 47-69 | PR00201 | ANNEXIN TYPE V |
| | | | | | | SIGNATURE |
| 1507 | PR00201D | 10.49 | 1.495e−12 | 114-135 | PR00201 | ANNEXIN TYPE V |
| | | | | | | SIGNATURE |
| 1507 | PR00201D | 10.49 | 6.940e−10 | 274-295 | PR00201 | ANNEXIN TYPE V |
| | | | | | | SIGNATURE |
| 1507 | PR00201E | 12.37 | 8.129e−11 | 198-224 | PR00201 | ANNEXIN TYPE V |
| | | | | | | SIGNATURE |
| 1507 | PR00201G | 11.02 | 1.231e−19 | 278-304 | PR00201 | ANNEXIN TYPE V |
| | | | | | | SIGNATURE |
| 1507 | PR00201G | 11.02 | 7.888e−12 | 118-144 | PR00201 | ANNEXIN TYPE V |
| | | | | | | SIGNATURE |
| 1507 | PR00201H | 12.04 | 7.413e−13 | 322-335 | PR00201 | ANNEXIN TYPE V |
| | | | | | | SIGNATURE |
| 1507 | PR00202B | 11.44 | 1.287e−12 | 118-141 | PR00202 | ANNEXIN TYPE VI |
| | | | | | | SIGNATURE |
| 1507 | PR00202B | 11.44 | 7.680e−11 | 46-69 | PR00202 | ANNEXIN TYPE VI |
| | | | | | | SIGNATURE |
| 1507 | PR00202D | 5.58 | 7.028e−09 | 274-295 | PR00202 | ANNEXIN TYPE VI |
| | | | | | | SIGNATURE |
| 1507 | PR00202D | 5.58 | 9.242e−12 | 114-135 | PR00202 | ANNEXIN TYPE VI |
| | | | | | | SIGNATURE |
| 1507 | PR00202E | 13.00 | 9.400e−10 | 198-224 | PR00202 | ANNEXIN TYPE VI |
| | | | | | | SIGNATURE |
| 1507 | PR00202G | 8.01 | 5.417e−11 | 118-144 | PR00202 | ANNEXIN TYPE VI |
| | | | | | | SIGNATURE |
| 1507 | PR00202G | 8.01 | 8.606e−25 | 278-304 | PR00202 | ANNEXIN TYPE VI |
| | | | | | | SIGNATURE |
| 1507 | PR00202H | 9.20 | 5.050e−10 | 322-335 | PR00202 | ANNEXIN TYPE VI |
| | | | | | | SIGNATURE |
| 1508 | BL01144 | 25.07 | 1.000e−40 | 22-73 | BL01144 | Ribosomal protein L31e |
| | | | | | | proteins. |
| 1509 | PR00738A | 16.27 | 2.500e−20 | 158-178 | PR00738 | GLYCOSYL HYDROLASE |
| | | | | | | FAMILY 20 SIGNATURE |
| 1509 | PR00738B | 11.01 | 2.241e−18 | 194-211 | PR00738 | GLYCOSYL HYDROLASE |
| | | | | | | FAMILY 20 SIGNATURE |
| 1509 | PR00738C | 11.37 | 7.500e−26 | 223-244 | PR00738 | GLYCOSYL HYDROLASE |
| | | | | | | FAMILY 20 SIGNATURE |
| 1509 | PR00738D | 14.00 | 4.000e−21 | 277-294 | PR00738 | GLYCOSYL HYDROLASE |
| | | | | | | FAMILY 20 SIGNATURE |
| 1509 | PR00738E | 14.48 | 8.364e−16 | 322-340 | PR00738 | GLYCOSYL HYDROLASE |
| | | | | | | FAMILY 20 SIGNATURE |
| 1509 | PR00738F | 11.93 | 6.500e−15 | 344-357 | PR00738 | GLYCOSYL HYDROLASE |
| | | | | | | FAMILY 20 SIGNATURE |
| 1509 | PR00738G | 15.05 | 1.000e−19 | 481-497 | PR00738 | GLYCOSYL HYDROLASE |
| | | | | | | FAMILY 20 SIGNATURE |
| 1509 | PR00738H | 11.43 | 5.846e−18 | 498-515 | PR00738 | GLYCOSYL HYDROLASE |
| | | | | | | FAMILY 20 SIGNATURE |
| 1510 | BL00854A | 33.93 | 1.818e−26 | 58-103 | BL00854 | Proteasome B-type |
| | | | | | | subunits proteins. |
| 1510 | BL00854C | 29.92 | 8.435e−19 | 168-196 | BL00854 | Proteasome B-type |
| | | | | | | subunits proteins. |
| 1511 | BL00487A | 8.84 | 2.125e−12 | 30-39 | BL00487 | IMP dehydrogenase/GMP |
| | | | | | | reductase proteins. |
| 1511 | BL00487B | 16.59 | 1.000e−40 | 61-98 | BL00487 | IMP dehydrogenase/GMP |
| | | | | | | reductase proteins. |
| 1511 | BL00487C | 10.90 | 8.043e−13 | 153-165 | BL00487 | IMP dehydrogenase/GMP |
| | | | | | | reductase proteins. |
| 1511 | BL00487D | 26.53 | 1.000e−40 | 242-294 | BL00487 | IMP dehydrogenase/GMP |
| | | | | | | reductase proteins. |
| 1511 | BL00487E | 16.12 | 1.000e−40 | 299-343 | BL00487 | IMP dehydrogenase/GMP |
| | | | | | | reductase proteins. |
| 1511 | BL00487F | 18.79 | 1.000e−40 | 380-420 | BL00487 | IMP dehydrogenase/GMP |
| | | | | | | reductase proteins. |
| 1511 | BL00487G | 26.82 | 9.500e−38 | 439-480 | BL00487 | IMP dehydrogenase/GMP |
| | | | | | | reductase proteins. |
| 1511 | BL00487H | 15.21 | 3.368e−17 | 490-506 | BL00487 | IMP dehydrogenase/GMP |
| | | | | | | reductase proteins. |
| 1511 | BL00557D | 17.76 | 1.297e−12 | 361-402 | BL00557 | FMN-dependent alpha- |
| | | | | | | hydroxy acid |
| | | | | | | dehydrogenases |
| | | | | | | proteins. |
| 1511 | BL00911G | 19.64 | 3.654e−09 | 359-389 | BL00911 | Dihydroorotate |
| | | | | | | dehydrogenase proteins. |
| 1513 | PR00019A | 11.19 | 4.000e−09 | 207-220 | PR00019 | LEUCINE-RICH REPEAT |
| | | | | | | SIGNATURE |
| 1513 | PR00019B | 11.36 | 1.720e−09 | 230-243 | PR00019 | LEUCINE-RICH REPEAT |
| | | | | | | SIGNATURE |
| 1513 | PR00019B | 11.36 | 9.640e−09 | 204-217 | PR00019 | LEUCINE-RICH REPEAT |
| | | | | | | SIGNATURE |
| 1514 | BL00019D | 15.33 | 3.520e−17 | 818-847 | BL00019 | Actinin-type actin- |
| | | | | | | binding domain |
| | | | | | | proteins. |
| 1514 | PD01351B | 13.72 | 4.981e−11 | 233-258 | PD01351 | PROTEIN REPEAT |
| | | | | | | NEUROFILAMENT TRIPL. |
| 1514 | PF00992A | 16.67 | 2.895e−09 | 607-641 | PF00992 | Troponin. |
| 1516 | BL00417A | 7.74 | 6.704e−13 | 5-32 | BL00417 | Synaptobrevin proteins. |
| 1516 | BL00417B | 18.48 | 2.414e−19 | 33-86 | BL00417 | Synaptobrevin proteins. |
| 1516 | PR00219A | 8.98 | 9.156e−13 | 10-29 | PR00219 | SYNAPTOBREVIN SIGNATURE |
| 1518 | BL00191J | 11.37 | 6.447e−17 | 128-149 | BL00191 | Cytochrome b5 family, |
| | | | | | | heme-binding domain |
| | | | | | | proteins. |
| 1518 | BL00191K | 17.38 | 4.951e−27 | 184-227 | BL00191 | Cytochrome b5 family, |
| | | | | | | heme-binding domain |
| | | | | | | proteins. |
| 1518 | BL00559I | 13.63 | 7.366e−21 | 58-86 | BL00559 | Eukaryotic |
| | | | | | | molybdopterin |
| | | | | | | oxidoreductases |
| | | | | | | proteins. |
| 1518 | BL00559J | 19.63 | 9.348e−16 | 128-179 | BL00559 | Eukaryotic |
| | | | | | | molybdopterin |
| | | | | | | oxidoreductases |
| | | | | | | proteins. |
| 1518 | BL00559K | 13.17 | 7.563e−17 | 201-227 | BL00559 | Eukaryotic |
| | | | | | | molybdopterin |
| | | | | | | oxidoreductases |
| | | | | | | proteins. |
| 1518 | BL00559L | 13.60 | 1.514e−14 | 270-287 | BL00559 | Eukaryotic |
| | | | | | | molybdopterin |
| | | | | | | oxidoreductases |
| | | | | | | proteins. |
| 1518 | PR00371D | 14.55 | 2.313e−13 | 180-199 | PR00371 | FLAVOPROTEIN PYRIDINE |
| | | | | | | NUCLEOTIDE CYTOCHROME |
| | | | | | | REDUCTASE SIGNATURE |
| 1518 | PR00406A | 11.92 | 4.375e−13 | 75-86 | PR00406 | CYTOCHROME B5 REDUCTASE |
| | | | | | | SIGNATURE |
| 1518 | PR00406C | 13.10 | 7.750e−12 | 141-155 | PR00406 | CYTOCHROME B5 REDUCTASE |
| | | | | | | SIGNATURE |
| 1518 | PR00406D | 10.02 | 7.387e−19 | 180-199 | PR00406 | CYTOCHROME B5 REDUCTASE |
| | | | | | | SIGNATURE |
| 1518 | PR00406E | 8.37 | 9.400e−09 | 218-229 | PR00406 | CYTOCHROME B5 REDUCTASE |
| | | | | | | SIGNATURE |
| 1518 | PR00406F | 3.97 | 4.240e−10 | 274-282 | PR00406 | CYTOCHROME B5 REDUCTASE |
| | | | | | | SIGNATURE |
| 1518 | PR00409F | 12.70 | 6.612e−10 | 180-199 | PR00409 | PHTHALATE DIOXYGENASE |
| | | | | | | REDUCTASE FAMILY |
| | | | | | | SIGNATURE |
| 1518 | PR00410D | 12.97 | 4.676e−09 | 180-199 | PR00410 | PHENOL HYDROXYLASE |
| | | | | | | REDUCTASE FAMILY |
| | | | | | | SIGNATURE |
| 1519 | BL00297A | 17.58 | 1.000e−40 | 7-43 | BL00297 | Heat shock hsp70 |
| | | | | | | proteins family |
| | | | | | | proteins. |
| 1519 | BL00297B | 22.91 | 1.000e−40 | 46-94 | BL00297 | Heat shock hsp70 |
| | | | | | | proteins family |
| | | | | | | proteins. |
| 1519 | BL00297C | 9.51 | 1.000e−40 | 134-185 | BL00297 | Heat shock hsp70 |
| | | | | | | proteins family |
| | | | | | | proteins. |
| 1519 | BL00297D | 11.95 | 1.000e−40 | 195-234 | BL00297 | Heat shock hsp70 |
| | | | | | | proteins family |
| | | | | | | proteins. |
| 1519 | BL00297E | 18.56 | 8.800e−40 | 292-335 | BL00297 | Heat shock hsp70 |
| | | | | | | proteins family |
| | | | | | | proteins. |
| 1519 | BL00297F | 11.84 | 6.400e−29 | 356-383 | BL00297 | Heat shock hsp70 |
| | | | | | | proteins family |
| | | | | | | proteins. |
| 1519 | BL00297G | 21.87 | 1.000e−40 | 390-444 | BL00297 | Heat shock hsp70 |
| | | | | | | proteins family |
| | | | | | | proteins. |
| 1519 | BL00297H | 15.46 | 1.000e−40 | 453-506 | BL00297 | Heat shock hsp70 |
| | | | | | | proteins family |
| | | | | | | proteins. |
| 1519 | PR00301A | 14.84 | 3.368e−16 | 5-18 | PR00301 | 70 KD HEAT SHOCK |
| | | | | | | PROTEIN SIGNATURE |
| 1519 | PR00301B | 15.36 | 1.692e−17 | 33-45 | PR00301 | 70 KD HEAT SHOCK |
| | | | | | | PROTEIN SIGNATURE |
| 1519 | PR00301C | 8.62 | 9.609e−10 | 55-63 | PR00301 | 70 KD HEAT SHOCK |
| | | | | | | PROTEIN SIGNATURE |
| 1519 | PR00301D | 15.51 | 5.500e−27 | 142-162 | PR00301 | 70 KD HEAT SHOCK |
| | | | | | | PROTEIN SIGNATURE |
| 1519 | PR00301E | 8.11 | 2.286e−14 | 203-213 | PR00301 | 70 KD HEAT SHOCK |
| | | | | | | PROTEIN SIGNATURE |
| 1519 | PR00301F | 13.98 | 1.429e−19 | 331-347 | PR00301 | 70 KD HEAT SHOCK |
| | | | | | | PROTEIN SIGNATURE |
| 1519 | PR00301G | 13.78 | 6.143e−25 | 363-383 | PR00301 | 70 KD HEAT SHOCK |
| | | | | | | PROTEIN SIGNATURE |
| 1519 | PR00301H | 8.81 | 2.421e−21 | 390-409 | PR00301 | 70 KD HEAT SHOCK |
| | | | | | | PROTEIN SIGNATURE |
| 1519 | PR00301I | 12.76 | 2.125e−22 | 471-487 | PR00301 | 70 KD HEAT SHOCK |
| | | | | | | PROTEIN SIGNATURE |
| 1520 | BL00960B | 24.47 | 9.471e−09 | 195-239 | BL00960 | BTG1 family proteins. |
| 1520 | PR00738A | 16.27 | 6.538e−17 | 125-145 | PR00738 | GLYCOSYL HYDROLASE |
| | | | | | | FAMILY 20 SIGNATURE |
| 1520 | PR00738B | 11.01 | 1.000e−18 | 161-178 | PR00738 | GLYCOSYL HYDROLASE |
| | | | | | | FAMILY 20 SIGNATURE |
| 1520 | PR00738C | 11.37 | 3.483e−23 | 190-211 | PR00738 | GLYCOSYL HYDROLASE |
| | | | | | | FAMILY 20 SIGNATURE |
| 1520 | PR00738D | 14.00 | 4.194e−19 | 245-262 | PR00738 | GLYCOSYL HYDROLASE |
| | | | | | | FAMILY 20 SIGNATURE |
| 1520 | PR00738E | 14.48 | 5.500e−16 | 290-308 | PR00738 | GLYCOSYL HYDROLASE |
| | | | | | | FAMILY 20 SIGNATURE |
| 1520 | PR00738F | 11.93 | 3.455e−14 | 312-325 | PR00738 | GLYCOSYL HYDROLASE |
| | | | | | | FAMILY 20 SIGNATURE |
| 1520 | PR00738G | 15.05 | 1.000e−20 | 452-468 | PR00738 | GLYCOSYL HYDROLASE |
| | | | | | | FAMILY 20 SIGNATURE |
| 1520 | PR00738H | 11.43 | 9.308e−18 | 469-486 | PR00738 | GLYCOSYL HYDROLASE |
| | | | | | | FAMILY 20 SIGNATURE |
| 1521 | BL00030B | 7.03 | 2.200e−10 | 103-112 | BL00030 | Eukaryotic RNA-binding |
| | | | | | | region RNP-1 proteins. |
| 1522 | BL00540A | 15.06 | 8.636e−40 | 5-45 | BL00540 | Ferritin iron-binding |
| | | | | | | regions proteins. |
| 1522 | BL00540B | 18.82 | 1.000e−40 | 96-150 | BL00540 | Ferritin iron-binding |
| | | | | | | regions proteins. |
| 1522 | BL00540C | 13.00 | 4.649e−12 | 161-172 | BL00540 | Ferritin iron-binding |
| | | | | | | regions proteins. |
| 1524 | BL00362 | 24.67 | 3.348e−35 | 88-130 | BL00362 | Ribosomal protein S15 |
| | | | | | | proteins. |
| 1525 | BL00406A | 9.95 | 1.000e−40 | 9-43 | BL00406 | Actins proteins. |
| 1525 | BL00406B | 5.47 | 1.000e−40 | 85-139 | BL00406 | Actins proteins. |
| 1525 | BL00406C | 6.75 | 1.000e−40 | 144-198 | BL00406 | Actins proteins. |
| 1525 | BL00406D | 12.58 | 1.000e−40 | 271-325 | BL00406 | Actins proteins. |
| 1525 | BL00406E | 8.44 | 1.000e−40 | 328-377 | BL00406 | Actins proteins. |
| 1525 | PR00190A | 7.24 | 1.375e−13 | 28-37 | PR00190 | ACTIN SIGNATURE |
| 1525 | PR00190B | 9.98 | 1.000e−15 | 51-62 | PR00190 | ACTIN SIGNATURE |
| 1525 | PR00190C | 11.49 | 4.789e−30 | 63-85 | PR00190 | ACTIN SIGNATURE |
| 1525 | PR00150D | 19.23 | 3.520e−24 | 86-104 | PR00190 | ACTIN SIGNATURE |
| 1525 | PR00190E | 7.16 | 1.450e−19 | 117-130 | PR00190 | ACTIN SIGNATURE |
| 1525 | PR00190F | 7.80 | 1.321e−24 | 142-161 | PR00190 | ACTIN SIGNATURE |
| 1525 | PR00190G | 12.62 | 1.600e−21 | 238-254 | PR00190 | ACTIN SIGNATURE |
| 1526 | BL00798A | 14.97 | 5.200e−17 | 7-21 | BL00798 | Aldo/keto reductase |
| | | | | | | family proteins. |
| 1526 | BL00798B | 16.01 | 5.500e−28 | 35-59 | BL00798 | Aldo/keto reductase |
| | | | | | | family proteins. |
| 1526 | BL00798C | 11.15 | 7.480e−15 | 68-80 | BL00798 | Aldo/keto reductase |
| | | | | | | family proteins. |
| 1526 | BL00798D | 7.65 | 5.235e−17 | 92-108 | BL00798 | Aldo/keto reductase |
| | | | | | | family proteins. |
| 1526 | BL00798E | 20.32 | 1.000e−40 | 177-214 | BL00798 | Aldo/keto reductase |
| | | | | | | family proteins. |
| 1526 | BL00798F | 23.30 | 1.000e−40 | 238-286 | BL00798 | Aldo/keto reductase |
| | | | | | | family proteins. |
| 1526 | PR00069A | 16.01 | 8.364e−29 | 35-59 | PR00069 | ALDO-KETO REDUCTASE |
| | | | | | | SIGNATURE |
| 1526 | PR00069B | 11.33 | 1.000e−21 | 95-113 | PR00069 | ALDO-KETO REDUCTASE |
| | | | | | | SIGNATURE |
| 1526 | PR00069C | 16.03 | 4.000e−19 | 145-162 | PR00069 | ALDO-KETO REDUCTASE |
| | | | | | | SIGNATURE |
| 1526 | PR00069D | 19.36 | 1.529e−32 | 181-210 | PR00069 | ALDO-KETO REDUCTASE |
| | | | | | | SIGNATURE |
| 1526 | PR00069E | 18.14 | 6.870e−25 | 228-252 | PR00069 | ALDO-KETO REDUCTASE |
| | | | | | | SIGNATURE |
| 1527 | BL00086 | 20.87 | 2.421e−21 | 427-458 | BL00086 | Cytochrome P450 |
| | | | | | | cysteine heme-iron |
| | | | | | | ligand proteins. |
| 1527 | PR00385A | 14.97 | 8.448e−11 | 306-323 | PR00385 | P450 SUPERFAMILY |
| | | | | | | SIGNATURE |
| 1527 | PR00385B | 10.22 | 4.300e−09 | 324-337 | PR00385 | P450 SUPERFAMILY |
| | | | | | | SIGNATURE |
| 1527 | PR00385D | 13.11 | 4.000e−09 | 428-437 | PR00385 | P450 SUPERFAMILY |
| | | | | | | SIGNATURE |
| 1527 | PR00385E | 12.66 | 6.571e−09 | 437-448 | PR00385 | P450 SUPERFAMILY |
| | | | | | | SIGNATURE |
| 1527 | PR00463E | 17.37 | 9.542e−11 | 315-341 | PR00463 | E-CLASS P450 GROUP I |
| | | | | | | SIGNATURE |
| 1527 | PR00464E | 18.28 | 4.696e−09 | 352-372 | PR00464 | E-CLASS P450 GROUP II |
| | | | | | | SIGNATURE |
| 1527 | PR00464I | 14.64 | 9.654e−09 | 437-460 | PR00464 | E-CLASS P450 GROUP II |
| | | | | | | SIGNATURE |
| 1528 | PR00049D | 0.00 | 9.929e−10 | 180-194 | PR00049 | WILM'S TUMOUR PROTEIN |
| | | | | | | SIGNATURE |
| 1529 | BL00678 | 9.67 | 1.692e−11 | 80-90 | BL00678 | Trp-Asp (WD) repeat |
| | | | | | | proteins proteins. |
| 1529 | BL00678 | 9.67 | 1.947e−09 | 167-177 | BL00678 | Trp-Asp (WD) repeat |
| | | | | | | proteins proteins. |
| 1529 | BL00678 | 9.67 | 8.615e−11 | 122-132 | BL00678 | Trp-Asp (WD) repeat |
| | | | | | | proteins proteins. |
| 1529 | PR00320A | 16.74 | 1.439e−09 | 207-221 | PR00320 | G-PROTEIN BETA WD-40 |
| | | | | | | REPEAT SIGNATURE |
| 1529 | PR00320A | 16.74 | 3.143e−13 | 78-92 | PR00320 | G-PROTEIN BETA WD-40 |
| | | | | | | REPEAT SIGNATURE |
| 1529 | PR00320A | 16.74 | 3.382e−10 | 31-45 | PR00320 | G-PROTEIN BETA WD-40 |
| | | | | | | REPEAT SIGNATURE |
| 1529 | PR00320A | 16.74 | 7.207e−11 | 165-179 | PR00320 | G-PROTEIN BETA WD-40 |
| | | | | | | REPEAT SIGNATURE |
| 1529 | PR00320A | 16.74 | 8.560e−12 | 120-134 | PR00320 | G-PROTEIN BETA WD-40 |
| | | | | | | REPEAT SIGNATURE |
| 1529 | PR00320B | 12.19 | 1.257e−10 | 31-45 | PR00320 | G-PROTEIN BETA WD-40 |
| | | | | | | REPEAT SIGNATURE |
| 1529 | PR00320B | 12.19 | 2.174e−13 | 120-134 | PR00320 | G-PROTEIN BETA WD-40 |
| | | | | | | REPEAT SIGNATURE |
| 1529 | PR00320B | 12.19 | 4.484e−11 | 165-179 | PR00320 | G-PROTEIN BETA WD-40 |
| | | | | | | REPEAT SIGNATURE |
| 1529 | PR00320B | 12.19 | 4.825e−09 | 207-221 | PR00320 | G-PROTEIN BETA WD-40 |
| | | | | | | REPEAT SIGNATURE |
| 1529 | PR00320B | 12.19 | 7.231e−12 | 78-92 | PR00320 | G-PROTEIN BETA WD-40 |
| | | | | | | REPEAT SIGNATURE |
| 1529 | PR00320C | 13.01 | 1.000e−10 | 78-92 | PR00320 | G-PROTEIN BETA WD-40 |
| | | | | | | REPEAT SIGNATURE |
| 1529 | PR00320C | 13.01 | 2.800e−10 | 120-134 | PR00320 | G-PROTEIN BETA WD-40 |
| | | | | | | REPEAT SIGNATURE |
| 1529 | PR00320C | 13.01 | 7.000e−12 | 207-221 | PR00320 | G-PROTEIN BETA WD-40 |
| | | | | | | REPEAT SIGNATURE |
| 1529 | PR00320C | 13.01 | 8.043e−11 | 165-179 | PR00320 | G-PROTEIN BETA WD-40 |
| | | | | | | REPEAT SIGNATURE |
| 1529 | PR00320C | 13.01 | 9.700e−09 | 31-45 | PR00320 | G-PROTEIN BETA WD-40 |
| | | | | | | REPEAT SIGNATURE |
| 1530 | BL01082 | 20.37 | 5.000e−34 | 51-90 | BL01082 | Ribosomal protein L7Ae |
| | | | | | | proteins. |
| 1530 | PR00881A | 9.94 | 3.455e−12 | 35-49 | PR00881 | RIBOSOMAL PROTEIN |
| | | | | | | L7A/RS6 FAMILY |
| | | | | | | SIGNATURE |
| 1530 | PR00881B | 9.01 | 4.484e−12 | 54-67 | PR00881 | RIBOSOMAL PROTEIN |
| | | | | | | L7A/RS6 FAMILY |
| | | | | | | SIGNATURE |
| 1530 | PR00881C | 12.76 | 9.526e−13 | 70-80 | PR00881 | RIBOSOMAL PROTEIN |
| | | | | | | L7A/RS6 FAMILY |
| | | | | | | SIGNATURE |
| 1530 | PR00881D | 11.60 | 2.440e−14 | 80-94 | PR00881 | RIBOSOMAL PROTEIN |
| | | | | | | L7A/RS6 FAMILY |
| | | | | | | SIGNATURE |
| 1530 | PR00883A | 6.49 | 5.500e−18 | 8-21 | PR00883 | HIGH MOBILITY GROUP- |
| | | | | | | LIKE NUCLEAR PROTEIN |
| | | | | | | SIGNATURE |
| 1530 | PR00883B | 8.76 | 8.364e−19 | 21-36 | PR00883 | HIGH MOBILITY GROUP- |
| | | | | | | LIKE NUCLEAR PROTEIN |
| | | | | | | SIGNATURE |
| 1530 | PR00883C | 8.52 | 2.000e−14 | 38-48 | PR00883 | HIGH MOBILITY GROUP- |
| | | | | | | LIKE NUCLEAR PROTEIN |
| | | | | | | SIGNATURE |
| 1530 | PR00883D | 13.33 | 2.200e−16 | 82-1694 | PR00883 | HIGH MOBILITY GROUP- |
| | | | | | | LIKE NUCLEAR PROTEIN |
| | | | | | | SIGNATURE |
| 1530 | PR00884D | 11.07 | 9.217e−10 | 80-90 | PR00884 | RIBOSOMAL PROTEIN HS6 |
| | | | | | | SIGNATURE |
| 1531 | BL00296A | 17.20 | 5.648e−10 | 12-65 | BL00296 | Chaperonins cpn60 |
| | | | | | | proteins. |
| 1531 | BL00296B | 15.98 | 4.115e−13 | 76-129 | BL00296 | Chaperonins cpn60 |
| | | | | | | proteins. |
| 1531 | BL00296F | 19.66 | 3.826e−09 | 476-513 | BL00296 | Chaperonins cpn60 |
| | | | | | | proteins. |
| 1531 | BL00750A | 20.07 | 8.286e−36 | 25-67 | BL00750 | Chaperonins TCP-1 |
| | | | | | | proteins. |
| 1531 | BL00750B | 16.17 | 2.000e−39 | 69-118 | BL00750 | Chaperonins TCP-1 |
| | | | | | | proteins. |
| 1531 | BL00750C | 25.65 | 8.579e−23 | 152-183 | BL00750 | Chaperonins TCP-1 |
| | | | | | | proteins. |
| 1531 | BL00750D | 16.16 | 5.875e−13 | 199-217 | BL00750 | Chaperonins TCP-1 |
| | | | | | | proteins. |
| 1531 | BL00750E | 24.59 | 8.313e−21 | 294-330 | BL00750 | Chaperonins TCP-1 |
| | | | | | | proteins. |
| 1531 | BL00750F | 18.40 | 3.880e−29 | 368-408 | BL00750 | Chaperonins TCP-1 |
| | | | | | | proteins. |
| 1531 | BL00750G | 20.12 | 4.300e−31 | 429-468 | BL00750 | Chaperonins TCP-1 |
| | | | | | | proteins. |
| 1531 | BL00750H | 21.44 | 2.731e−23 | 486-520 | BL00750 | Chaperonins TCP-1 |
| | | | | | | proteins. |
| 1531 | PR00298B | 13.59 | 7.353e−11 | 88-115 | PR00298 | 60 KD CHAPERONIN |
| | | | | | | SIGNATURE |
| 1531 | PR00304A | 9.20 | 3.605e−15 | 34-50 | PR00304 | TAILLESS COMPLEX |
| | | | | | | POLYPEPTIDE 1 |
| | | | | | | (CHAPERONE) SIGNATURE |
| 1531 | PR00304B | 11.60 | 2.059e−17 | 56-74 | PR00304 | TAILLESS COMPLEX |
| | | | | | | POLYPEPTIDE 1 |
| | | | | | | (CHAPERONE) SIGNATURE |
| 1531 | PR00304C | 8.69 | 1.250e−18 | 86-105 | PR00304 | TAILLESS COMPLEX |
| | | | | | | POLYPEPTIDE 1 |
| | | | | | | (CHAPERONE) SIGNATURE |
| 1531 | PR00304D | 11.04 | 9.757e−17 | 371-393 | PR00304 | TAILLESS COMPLEX |
| | | | | | | POLYPEPTIDE 1 |
| | | | | | | (CHAPERONE) SIGNATURE |
| 1531 | PR00304E | 7.79 | 8.043e−13 | 405-417 | PR00304 | TAILLESS COMPLEX |
| | | | | | | POLYPEPTIDE 1 |
| | | | | | | (CHAPERONE) SIGNATURE |
| 1532 | BL00021B | 13.33 | 2.435e−10 | 487-504 | BL00021 | Kringle domain |
| | | | | | | proteins. |
| 1532 | BL00021D | 24.56 | 1.105e−09 | 656-697 | BL00021 | Kringle domain |
| | | | | | | proteins. |
| 1532 | BL00022B | 7.54 | 9.100e−09 | 174-180 | BL00022 | EGF-like domain |
| | | | | | | proteins. |
| 1532 | BL00134A | 11.96 | 5.114e−14 | 487-503 | BL00134 | Serine proteases, |
| | | | | | | trypsin family, |
| | | | | | | histidine proteins. |
| 1532 | BL00134B | 15.99 | 3.382e−13 | 648-671 | BL00134 | Serine proteases, |
| | | | | | | trypsin family, |
| | | | | | | histidine proteins. |
| 1532 | BL00134C | 13.45 | 5.500e−12 | 684-697 | BL00134 | Serine proteases, |
| | | | | | | trypsin family, |
| | | | | | | histidine proteins. |
| 1532 | BL004950 | 13.75 | 6.040e−09 | 675-703 | BL00495 | Apple domain proteins. |
| 1532 | BL01187B | 12.04 | 6.538e−16 | 165-180 | BL01187 | Calcium-binding EGF- |
| | | | | | | like domain proteins |
| | | | | | | pattern proteins. |
| 1532 | BL01253G | 11.34 | 5.382e−11 | 647-660 | BL01253 | Type I fibronectin |
| | | | | | | domain proteins. |
| 1532 | BL01253H | 13.15 | 9.587e−09 | 666-700 | BL01253 | Type I fibronectin |
| | | | | | | domain proteins. |
| 1532 | PR00010C | 11.16 | 3.571e−09 | 170-180 | PR00010 | TYPE II EGF-LIKE |
| | | | | | | SIGNATURE |
| 1532 | PR00722A | 12.27 | 8.258e−13 | 488-503 | PR00722 | CHYMOTRYPSIN SERINE |
| | | | | | | PROTEASE FAMILY (S1) |
| | | | | | | SIGNATURE |
| 1532 | PR00722B | 12.51 | 3.625e−09 | 553-567 | PR00722 | CHYMOTRYPSIN SERINE |
| | | | | | | PROTEASE FAMILY (S1) |
| | | | | | | SIGNATURE |
| 1532 | PR00722C | 10.87 | 8.105e−12 | 647-659 | PR00722 | CHYMOTRYPSIN SERINE |
| | | | | | | PROTEASE FAMILY (S1) |
| | | | | | | SIGNATURE |
| 1533 | BL00021B | 13.33 | 5.431e−11 | 460-477 | BL00021 | Kringle domain |
| | | | | | | proteins. |
| 1533 | BL00134A | 11.96 | 4.094e−15 | 460-476 | BL00134 | Serine proteases, |
| | | | | | | trypsin family, |
| | | | | | | histidine proteins. |
| 1533 | BL00134B | 15.99 | 5.378e−12 | 626-649 | BL00134 | Serine proteases, |
| | | | | | | trypsin family, |
| | | | | | | histidine proteins. |
| 1533 | BL00134C | 13.45 | 5.125e−12 | 662-675 | BL00134 | Serine proteases, |
| | | | | | | trypsin family, |
| | | | | | | histidine proteins. |
| 1533 | BL00495K | 12.58 | 4.845e−09 | 462-494 | BL00495 | Apple domain proteins. |
| 1533 | BL01180B | 11.58 | 2.875e−09 | 65-75 | BL01180 | CUB domain proteins |
| | | | | | | profile. |
| 1533 | BL01187B | 12.04 | 9.550e−14 | 147-162 | BL01187 | Calcium-binding EGF- |
| | | | | | | like domain proteins |
| | | | | | | pattern proteins. |
| 1533 | BL01253D | 4.84 | 7.960e−09 | 460-473 | BL01253 | Type I fibronectin |
| | | | | | | domain proteins. |
| 1533 | PF00084B | 9.45 | 8.875e−10 | 379-390 | PF00084 | Sushi domain proteins |
| | | | | | | (SCR repeat proteins. |
| 1533 | PR00722A | 12.27 | 7.120e−15 | 461-476 | PR00722 | CHYMOTRYPSIN SERINE |
| | | | | | | PROTEASE FAMILY (S1) |
| | | | | | | SIGNATURE |
| 1533 | PR00722B | 12.51 | 6.625e−12 | 525-539 | PR00722 | CHYMOTRYPSIN SERINE |
| | | | | | | PROTEASE FAMILY (S1) |
| | | | | | | SIGNATURE |
| 1533 | PR00722C | 10.87 | 3.864e−11 | 625-637 | PR00722 | CHYMOTRYPSIN SERINE |
| | | | | | | PROTEASE FAMILY (S1) |
| | | | | | | SIGNATURE |
| 1533 | PR00907B | 11.29 | 8.364e−10 | 143-159 | PR00907 | THROMBOMODULIN |
| | | | | | | SIGNATURE |
| 1535 | BL00018 | 7.41 | 1.000e−09 | 57-69 | BL00018 | EF-hand calcium-binding |
| | | | | | | domain proteins. |
| 1535 | BL00018 | 7.41 | 3.400e−12 | 130-142 | BL00018 | EF-hand calcium-binding |
| | | | | | | domain proteins. |
| 1535 | BL00303B | 26.15 | 6.344e−10 | 45-81 | BL00303 | S-100/ICaBP type |
| | | | | | | calcium binding |
| | | | | | | protein. |
| 1535 | PR00450C | 12.22 | 4.480e−10 | 89-110 | PR00450 | RECOVERIN FAMILY |
| | | | | | | SIGNATURE |
| 1535 | PR00450C | 12.22 | 5.320e−10 | 16-37 | PR00450 | RECOVERIN FAMILY |
| | | | | | | SIGNATURE |
| 1535 | PR00450C | 12.22 | 6.520e−10 | 52-73 | PR00450 | RECOVERIN FAMILY |
| | | | | | | SIGNATURE |
| 1536 | BL00319C | 17.12 | 9.289e−09 | 383-416 | BL00319 | Amyloidogenic |
| | | | | | | glycoprotein |
| | | | | | | extracellular domain |
| | | | | | | proteins. |
| 1536 | BL00412D | 16.54 | 2.565e−10 | 364-414 | BL00412 | Neuromodulin (GAP-43) |
| | | | | | | proteins. |
| 1536 | BL00412D | 16.54 | 2.929e−09 | 350-400 | BL00412 | Neuromodulin (GAP-43) |
| | | | | | | proteins. |
| 1536 | BL00412D | 16.54 | 4.398e−09 | 348-398 | BL00412 | Neuromodulin (GAP-43) |
| | | | | | | proteins. |
| 1536 | BL00412D | 16.54 | 8.714e−09 | 354-404 | BL00412 | Neuromodulin (GAP-43) |
| | | | | | | proteins. |
| 1536 | BL00412D | 16.54 | 9.265e−09 | 339-389 | BL00412 | Neuromodulin (GAP-43) |
| | | | | | | proteins. |
| 1536 | BL00422C | 16.18 | 1.176e−09 | 384-411 | BL00422 | Granins proteins. |
| 1536 | BL00422C | 16.18 | 8.059e−09 | 376-403 | BL00422 | Granins proteins. |
| 1536 | BL00803A | 14.83 | 2.688e−14 | 35-48 | BL00803 | Calreticulin family |
| | | | | | | proteins. |
| 1536 | BL00803B | 17.08 | 8.714e−18 | 63-81 | BL00803 | Calreticulin family |
| | | | | | | proteins. |
| 1536 | BL00803C | 11.13 | 6.063e−26 | 91-113 | BL00803 | Calreticulin family |
| | | | | | | proteins. |
| 1536 | BL00803D | 16.08 | 1.000e−15 | 128-138 | BL00803 | Calreticulin family |
| | | | | | | proteins. |
| 1536 | BL00803E | 16.55 | 2.588e−31 | 166-196 | BL00803 | Calreticulin family |
| | | | | | | proteins. |
| 1536 | BL00803F | 10.95 | 2.000e−37 | 225-255 | BL00803 | Calreticulin family |
| | | | | | | proteins. |
| 1536 | BL00803F | 10.95 | 2.179e−11 | 191-221 | BL00803 | Calreticulin family |
| | | | | | | proteins. |
| 1536 | BL00803F | 10.95 | 7.268e−22 | 208-238 | BL00803 | Calreticulin family |
| | | | | | | proteins. |
| 1536 | BL00803F | 10.95 | 9.516e−9 | 242-272 | BL00803 | Calreticulin family |
| 1536 | BL00803G | 14.33 | 1.000e−40 | 258-302 | BL00803 | Calreticulin family |
| | | | | | | proteins. |
| 1536 | BL00803G | 14.33 | 1.127e−19 | 244-288 | BL00803 | Calreticulin family |
| | | | | | | proteins. |
| 1536 | BL00803G | 14.33 | 7.429e−16 | 272-316 | BL00803 | Calreticulin family |
| | | | | | | proteins. |
| 1536 | BL00803H | 16.02 | 4.000e−10 | 309-325 | BL00803 | Calreticulin family |
| | | | | | | proteins. |
| 1536 | BL00803H | 16.02 | 7.375e−14 | 337-353 | BL00803 | Calreticulin family |
| | | | | | | proteins. |
| 1536 | PD00301B | 5.49 | 6.538e−09 | 371-381 | PD00301 | PROTEIN REPEAT MUSCLE |
| | | | | | | CALCIUM-BI. |
| 1536 | PF00992A | 16.67 | 8.986e−10 | 363-397 | PF00992 | Troponin. |
| 1536 | PR00626A | 14.35 | 1.500e−18 | 100-118 | PR00626 | CALRETICULIN SIGNATURE |
| 1536 | PR00626B | 14.12 | 2.200e−20 | 126-142 | PR00626 | CALRETICULIN SIGNATURE |
| 1536 | PR00626C | 9.70 | 7.882e−14 | 232-245 | PR00626 | CALRETICULIN SIGNATURE |
| 1536 | PR00626C | 9.70 | 9.100e−18 | 215-228 | PR00626 | CALRETICULIN SIGNATURE |
| 1536 | PR00626D | 8.30 | 6.520e−09 | 208-230 | PR00626 | CALRETICULIN SIGNATURE |
| 1536 | PR00626D | 8.30 | 8.017e−13 | 256-278 | PR00626 | CALRETICULIN SIGNATURE |
| 1536 | PR00626D | 8.30 | 8.071e−30 | 242-264 | PR00626 | CALRETICULIN SIGNATURE |
| 1536 | PR00626E | 11.30 | 3.676e−19 | 266-285 | PR00626 | CALRETICULIN SIGNATURE |
| 1536 | PR00626E | 11.30 | 7.632e−24 | 280-299 | PR00626 | CALRETICULIN SIGNATURE |
| 1536 | PR00626F | 15.79 | 5.500e−21 | 313-333 | PR00626 | CALRETICULIN SIGNATURE |
| 1537 | BL00303A | 21.77 | 5.286e−30 | 4-40 | BL00303 | S-100/ICaBP type |
| | | | | | | calcium binding |
| | | | | | | protein. |
| 1537 | BL00303B | 26.15 | 1.000e−29 | 51-87 | BL00303 | S-100/ICaBP type |
| | | | | | | calcium binding |
| | | | | | | protein. |
| 1538 | BL00983A | 5.84 | 7.261e−10 | 12-20 | BL00983 | Ly-6/u-PAR domain |
| | | | | | | proteins. |
| 1538 | BL00983B | 8.19 | 1.643e−12 | 22-31 | BL00983 | Ly-6/u-PAR domain |
| | | | | | | proteins. |
| 1538 | BL00983C | 12.69 | 3.500e−15 | 80-95 | BL00983 | Ly-6/u-PAR domain |
| | | | | | | proteins. |
| 1539 | BL00261A | 23.97 | 5.500e−34 | 29-62 | BL00261 | Glycoprotein hormones |
| | | | | | | beta chain proteins. |
| 1539 | BL00261B | 25.64 | 6.885e−37 | 77-120 | BL00261 | Glycoprotein hormones |
| | | | | | | beta chain proteins. |
| 1539 | PR00438A | 13.54 | 1.000e−09 | 50-59 | PR00438 | GROWTH FACTOR CYSTINE |
| | | | | | | KNOT SUPERFAMILY |
| | | | | | | SIGNATURE |
| 1540 | BL00280 | 24.61 | 1.391e−37 | 132-175 | BL00280 | Pancreatic trypsin |
| | | | | | | inhibitor (Kunitz) |
| | | | | | | family proteins. |
| 1540 | BL00280 | 24.61 | 2.241e−33 | 61-104 | BL00280 | Pancreatic trypsin |
| | | | | | | inhibitor (Kunitz) |
| | | | | | | family proteins. |
| 1540 | BL00280 | 24.61 | 3.500e−29 | 224-267 | BL00280 | Pancreatic trypsin |
| | | | | | | inhibitor (Kunitz) |
| | | | | | | family proteins. |
| 1540 | PR00759A | 14.51 | 5.500e−11 | 122-136 | PR00759 | BASIC PROTEASE (KUNITZ- |
| | | | | | | TYPE) INHIBITOR FAMILY |
| | | | | | | SIGNATURE |
| 1540 | PR00759A | 14.51 | 8.579e−12 | 51-65 | PR00759 | BASIC PROTEASE (KUNITZ- |
| | | | | | | TYPE) INHIBITOR FAMILY |
| | | | | | | SIGNATURE |
| 1540 | PR00759B | 11.26 | 1.692e−11 | 79-89 | PR00759 | BASIC PROTEASE (KUNITZ- |
| | | | | | | TYPE) INHIBITOR FAMILY |
| | | | | | | SIGNATURE |
| 1540 | PR00759B | 11.26 | 2.385e−11 | 150-160 | PR00759 | BASIC PROTEASE (KUNITZ- |
| | | | | | | TYPE) INHIBITOR FAMILY |
| | | | | | | SIGNATURE |
| 1540 | PR00759B | 11.26 | 8.269e−11 | 242-252 | PR00759 | BASIC PROTEASE (KUNITZ- |
| | | | | | | TYPE) INHIBITOR FAMILY |
| | | | | | | SIGNATURE |
| 1540 | PR00759C | 14.15 | 1.000e−13 | 89-104 | PR00759 | BASIC PROTEASE (KUNITZ- |
| | | | | | | TYPE) INHIBITOR FAMILY |
| | | | | | | SIGNATURE |
| 1540 | PR00759C | 14.15 | 1.818e−15 | 160-175 | PR00759 | BASIC PROTEASE (KUNITZ- |
| | | | | | | TYPE) INHIBITOR FAMILY |
| | | | | | | SIGNATURE |
| 1540 | PR00759C | 14.15 | 3.727e−12 | 252-267 | PR00759 | BASIC PROTEASE (KUNITZ- |
| | | | | | | TYPE) INHIBITOR FAMILY |
| | | | | | | SIGNATURE |
| 1541 | BL01104A | 14.65 | 1.000e−40 | 13-51 | BL01104 | Ribosomal protein L13e |
| | | | | | | proteins. |
| 1541 | BL01104B | 15.12 | 1.000e−40 | 83-129 | BL01104 | Ribosomal protein L13e |
| | | | | | | proteins. |
| 1541 | BL01104C | 15.14 | 9.550e−28 | 174-201 | BL01104 | Ribosomal protein L13e |
| | | | | | | proteins. |
| 1543 | BL01031A | 10.55 | 4.429e−09 | 19-28 | BL01031 | Heat shock hsp20 |
| | | | | | | proteins family |
| | | | | | | profile. |
| 1543 | BL01031B | 15.78 | 5.200e−19 | 73-93 | BL01031 | Heat shock hsp20 |
| | | | | | | proteins family |
| | | | | | | profile. |
| 1543 | BL01031C | 17.68 | 8.412e−21 | 101-125 | BL01031 | Heat shock hsp20 |
| | | | | | | proteins family |
| | | | | | | profile. |
| 1543 | PR00299A | 13.53 | 8.448e−16 | 2-14 | PR00299 | ALPHA CRYSTALLIN |
| | | | | | | SIGNATURE |
| 1543 | PR00299B | 17.53 | 1.000e−16 | 19-31 | PR00299 | ALPHA CRYSTALLIN |
| | | | | | | SIGNATURE |
| 1543 | PR00299C | 8.47 | 2.317e−20 | 69-89 | PR00299 | ALPHA CRYSTALLIN |
| | | | | | | SIGNATURE |
| 1543 | PR00299D | 8.56 | 5.974e−16 | 91-104 | PR00299 | ALPHA CRYSTALLIN |
| | | | | | | SIGNATURE |
| 1543 | PR00299E | 12.26 | 6.455e−25 | 106-125 | PR00299 | ALPHA CRYSTALLIN |
| | | | | | | SIGNATURE |
| 1543 | PR00299F | 13.20 | 9.289e−21 | 128-149 | PR00299 | ALPHA CRYSTALLIN |
| | | | | | | SIGNATURE |
| 1543 | PR00299G | 5.58 | 4.825e−16 | 156-171 | PR00299 | ALPHA CRYSTALLIN |
| | | | | | | SIGNATURE |
| 1544 | BL01101A | 16.07 | 1.000e−40 | 9-53 | BL01101 | Casein kinase II |
| | | | | | | regulatory subunit |
| | | | | | | proteins. |
| 1544 | BL01101B | 10.94 | 9.000e−31 | 72-96 | BL01101 | Casein kinase II |
| | | | | | | regulatory subunit |
| | | | | | | proteins. |
| 1544 | BL01101C | 15.36 | 8.714e−37 | 97-126 | BL01101 | Casein kinase II |
| | | | | | | regulatory subunit |
| | | | | | | proteins. |
| 1544 | BL01101D | 16.87 | 1.000e−40 | 127-168 | BL01101 | Casein kinase II |
| | | | | | | regulatory subunit |
| | | | | | | proteins. |
| 1544 | PR00472A | 8.03 | 7.600e−23 | 8-24 | PR00472 | CASEIN KINASE II |
| | | | | | | REGULATORY SUBUNIT |
| | | | | | | FAMILY SIGNATURE |
| 1544 | PR00472B | 14.84 | 1.000e−19 | 25-39 | PR00472 | CASEIN KINASE II |
| | | | | | | REGULATORY SUBUNIT |
| | | | | | | FAMILY SIGNATURE |
| 1544 | PR00472C | 12.38 | 5.154e−28 | 80-101 | PR00472 | CASEIN KINASE II |
| | | | | | | REGULATORY SUBUNIT |
| | | | | | | FAMILY SIGNATURE |
| 1544 | PR00472D | 10.36 | 4.857e−28 | 105-126 | PR00472 | CASEIN KINASE II |
| | | | | | | REGULATORY SUBUNIT |
| | | | | | | FAMILY SIGNATURE |
| 1544 | PR00472E | 13.85 | 3.769e−27 | 127-148 | PR00472 | CASEIN KINASE II |
| | | | | | | REGULATORY SUBUNIT |
| | | | | | | FAMILY SIGNATURE |
| 1544 | PR00472F | 9.76 | 3.368e−23 | 155-172 | PR00472 | CASEIN KINASE II |
| | | | | | | REGULATORY SUBUNIT |
| | | | | | | FAMILY SIGNATURE |
| 1545 | BL00023 | 24.31 | 4.545e−27 | 382-418 | BL00023 | Type II fibronectin |
| | | | | | | collagen-binding domain |
| | | | | | | proteins. |
| 1545 | BL00023 | 24.31 | 8.920e−33 | 442-478 | BL00023 | Type II fibronectin |
| | | | | | | collagen-binding domain |
| | | | | | | proteins. |
| 1545 | BL01253A | 20.33 | 4.720e−09 | 589-617 | BL01253 | Type I fibronectin |
| | | | | | | domain proteins. |
| 1545 | PR00012A | 9.68 | 1.450e−14 | 221-232 | PR00012 | FIBRONECTIN TYPE I |
| | | | | | | REPEAT SIGNATURE |
| 1545 | PR00012A | 9.68 | 3.250e−14 | 2297-2308 | PR00012 | FIBRONECTIN TYPE I |
| | | | | | | REPEAT SIGNATURE |
| 1545 | PR00012A | 9.68 | 4.250e−13 | 596-607 | PR00012 | FIBRONECTIN TYPE I |
| | | | | | | REPEAT SIGNATURE |
| 1545 | PR00012A | 9.68 | 4.789e−09 | 85-96 | PR00012 | FIBRONECTIN TYPE I |
| | | | | | | REPEAT SIGNATURE |
| 1545 | PR00012A | 9.68 | 7.316e−09 | 174-185 | PR00012 | FIBRONECTIN TYPE I |
| | | | | | | REPEAT SIGNATURE |
| 1545 | PR00012A | 9.68 | 8.269e−10 | 266-277 | PR00012 | FIBRONECTIN TYPE I |
| | | | | | | REPEAT SIGNATURE |
| 1545 | PR00012B | 8.28 | 1.957e−10 | 572-580 | PR00012 | FIBRONECTIN TYPE I |
| | | | | | | REPEAT SIGNATURE |
| 1545 | PR00012B | 8.28 | 4.273e−12 | 2317-2325 | PR00012 | FIBRONECTIN TYPE I |
| | | | | | | REPEAT SIGNATURE |
| 1545 | PR00012B | 8.28 | 5.021e−10 | 105-113 | PR00012 | FIBRONECTIN TYPE I |
| | | | | | | REPEAT SIGNATURE |
| 1545 | PR00012B | 8.28 | 5.909e−12 | 525-533 | PR00012 | FIBRONECTIN TYPE I |
| | | | | | | REPEAT SIGNATURE |
| 1545 | PR00012B | 8.28 | 6.339e−09 | 196-204 | PR00012 | FIBRONECTIN TYPE I |
| | | | | | | REPEAT SIGNATURE |
| 1545 | PR00012B | 8.28 | 6.707e−11 | 2274-2282 | PR00012 | FIBRONECTIN TYPE I |
| | | | | | | REPEAT SIGNATURE |
| 1545 | PR00012B | 8.28 | 8.475e−09 | 287-295 | PR00012 | FIBRONECTIN TYPE I |
| | | | | | | REPEAT SIGNATURE |
| 1545 | PR00012B | 8.28 | 8.902e−11 | 616-624 | PR00012 | FIBRONECTIN TYPE I |
| | | | | | | REPEAT SIGNATURE |
| 1545 | PR00012B | 8.28 | 9.043e−10 | 152-160 | PR00012 | FIBRONECTIN TYPE I |
| | | | | | | REPEAT SIGNATURE |
| 1545 | PR00013A | 12.26 | 1.500e−09 | 386-395 | PR00013 | FIBRONECTIN TYPE II |
| | | | | | | REPEAT SIGNATURE |
| 1545 | PR00013A | 12.26 | 5.875e−12 | 446-455 | PR00013 | FIBRONECTIN TYPE II |
| | | | | | | REPEAT SIGNATURE |
| 1545 | PR00013B | 14.75 | 2.385e−13 | 457-469 | PR00013 | FIBRONECTIN TYPE II |
| | | | | | | REPEAT SIGNATURE |
| 1545 | PR00013C | 12.29 | 2.607e−18 | 474-489 | PR00013 | FIBRONECTIN TYPE II |
| | | | | | | REPEAT SIGNATURE |
| 1545 | PR00013C | 12.29 | 4.400e−14 | 414-429 | PR00013 | FIBRONECTIN TYPE II |
| | | | | | | REPEAT SIGNATURE |
| 1545 | PR00014A | 8.22 | 4.750e−11 | 1946-1955 | PR00014 | FIBRONECTIN TYPE III |
| | | | | | | REPEAT SIGNATURE |
| 1545 | PR00014A | 8.22 | 9.591e−09 | 1040-1049 | PR00014 | FIBRONECTIN TYPE III |
| | | | | | | REPEAT SIGNATURE |
| 1545 | PR00014B | 14.77 | 1.000e−08 | 1956-1966 | PR00014 | FIBRONECTIN TYPE III |
| | | | | | | REPEAT SIGNATURE |
| 1545 | PR00014B | 14.77 | 8.500e−09 | 864-874 | PR00014 | FIBRONECTIN TYPE III |
| | | | | | | REPEAT SIGNATURE |
| 1545 | PR00014C | 15.44 | 1.391e−09 | 797-815 | PR00014 | FIBRONECTIN TYPE III |
| | | | | | | REPEAT SIGNATURE |
| 1545 | PR00014C | 15.44 | 1.500e−11 | 2148-2166 | PR00014 | FIBRONECTIN TYPE III |
| | | | | | | REPEAT SIGNATURE |
| 1545 | PR00014C | 15.44 | 1.783e−09 | 1254-1272 | PR00014 | FIBRONECTIN TYPE III |
| | | | | | | REPEAT SIGNATURE |
| 1545 | PR00014C | 15.44 | 2.800e−10 | 688-706 | PR00014 | FIBRONECTIN TYPE III |
| | | | | | | REPEAT SIGNATURE |
| 1545 | PR00014C | 15.44 | 2.800e−12 | 1890-1908 | PR00014 | FIBRONECTIN TYPE III |
| | | | | | | REPEAT SIGNATURE |
| 1545 | PR00014C | 15.44 | 4.857e−13 | 1980-1998 | PR00014 | FIBRONECTIN TYPE III |
| | | | | | | REPEAT SIGNATURE |
| 1545 | PR00014C | 15.44 | 6.400e−10 | 1525-1543 | PR00014 | FIBRONECTIN TYPE III |
| | | | | | | REPEAT SIGNATURE |
| 1545 | PR00014C | 15.44 | 6.400e−10 | 1709-1727 | PR00014 | FIBRONECTIN TYPE III |
| | | | | | | REPEAT SIGNATURE |
| 1545 | PR00014C | 15.44 | 6.400e−10 | 887-905 | PR00014 | FIBRONECTIN TYPE III |
| | | | | | | REPEAT SIGNATURE |
| 1545 | PR00014C | 15.44 | 6.478e−09 | 1619-1637 | PR00014 | FIBRONECTIN TYPE III |
| | | | | | | REPEAT SIGNATURE |
| 1545 | PR00014C | 15.44 | 7.000e−11 | 1435-1453 | PR00014 | FIBRONECTIN TYPE III |
| | | | | | | REPEAT SIGNATURE |
| 1545 | PR00014C | 15.44 | 8.650e−10 | 1345-1363 | PR00014 | FIBRONECTIN TYPE III |
| | | | | | | REPEAT SIGNATURE |
| 1546 | BL00086 | 20.87 | 1.429e−20 | 452-483 | BL00086 | Cytochrome P450 |
| | | | | | | cysteine heme-iron |
| | | | | | | ligand proteins. |
| 1546 | PR00359I | 11.13 | 5.378e−09 | 462-473 | PR00359 | B-CLASS P450 SIGNATURE |
| 1546 | PR00385A | 14.97 | 7.882e−16 | 326-343 | PR00385 | P450 SUPERFAMILY |
| | | | | | | SIGNATURE |
| 1546 | PR00385C | 16.94 | 2.421e−10 | 379-390 | PR00385 | P450 SUPERFAMILY |
| | | | | | | SIGNATURE |
| 1546 | PR00385D | 13.11 | 5.000e−09 | 453-462 | PR00385 | P450 SUPERFAMILY |
| | | | | | | SIGNATURE |
| 1546 | PR00385E | 12.66 | 5.714e−09 | 462-473 | PR00385 | P450 SUPERFAMILY |
| | | | | | | SIGNATURE |
| 1546 | PR00408A | 14.69 | 5.680e−15 | 126-141 | PR00408 | MITOCHONDRIAL P450 |
| | | | | | | SIGNATURE |
| 1546 | PR00408B | 13.00 | 4.194e−09 | 142-152 | PR00408 | MITOCHONDRIAL P450 |
| | | | | | | SIGNATURE |
| 1546 | PR00408C | 13.23 | 5.655e−18 | 203-221 | PR00408 | MITOCHONDRIAL P450 |
| | | | | | | SIGNATURE |
| 1546 | PR00408D | 15.44 | 5.500e−21 | 326-343 | PR00408 | MITOCHONDRIAL P450 |
| | | | | | | SIGNATURE |
| 1546 | PR00408E | 9.47 | 4.545e−13 | 344-357 | PR00408 | MITOCHONDRIAL P450 |
| | | | | | | SIGNATURE |
| 1546 | PR00408F | 11.33 | 1.486e−18 | 372-390 | PR00408 | MITOCHONDRIAL P450 |
| | | | | | | SIGNATURE |
| 1546 | PR00408G | 13.17 | 9.667e−10 | 435-443 | PR00408 | MITOCHONDRIAL P450 |
| | | | | | | SIGNATURE |
| 1546 | PR00408H | 12.37 | 1.000e−12 | 453-462 | PR00408 | MITOCHONDRIAL P450 |
| | | | | | | SIGNATURE |
| 1546 | PR00408I | 8.49 | 2.125e−14 | 462-473 | PR00408 | MITOCHONDRIAL P450 |
| | | | | | | SIGNATURE |
| 1546 | PR00463G | 18.24 | 9.833e−10 | 418-442 | PR00463 | E-CLASS P450 GROUP I |
| | | | | | | SIGNATURE |
| 1546 | PR00463I | 15.02 | 8.525e−09 | 462-485 | PR00463 | E-CLASS P450 GROUP I |
| | | | | | | SIGNATURE |
| 1546 | PR00464C | 18.84 | 9.000e−11 | 315-343 | PR00464 | E-CLASS P450 GROUP II |
| | | | | | | SIGNATURE |
| 1546 | PR00464E | 18.28 | 7.511e−11 | 373-393 | PR00464 | E-CLASS P450 GROUP II |
| | | | | | | SIGNATURE |
| 1546 | PR00464I | 14.64 | 6.651e−11 | 462-485 | PR00464 | E-CLASS P450 GROUP II |
| | | | | | | SIGNATURE |
| 1546 | PR00465D | 14.64 | 6.824e−12 | 374-390 | PR00465 | E-CLASS P450 GROUP IV |
| | | | | | | SIGNATURE |
| 1546 | PR00465F | 13.37 | 6.940e−11 | 423-441 | PR00465 | E-CLASS P450 GROUP IV |
| | | | | | | SIGNATURE |
| 1548 | BL00301A | 12.41 | 3.842e−13 | 9-20 | BL00301 | GTP-binding elongation |
| | | | | | | factors proteins. |
| 1548 | BL00301B | 20.09 | 5.500e−31 | 90-121 | BL00301 | GTP-binding elongation |
| | | | | | | factors proteins. |
| 1548 | BL00301C | 11.73 | 8.200e−15 | 423-436 | BL00301 | GTP-binding elongation |
| | | | | | | factors proteins. |
| 1548 | BL00880 | 17.52 | 9.214e−09 | 99-148 | BL00880 | Acyl-CoA-binding |
| | | | | | | protein. |
| 1548 | BL01176B | 8.74 | 5.547e−12 | 87-124 | BL01176 | Initiation factor 2 |
| | | | | | | proteins. |
| 1548 | PR00315A | 11.81 | 1.818e−15 | 9-22 | PR00315 | GTP-BINDING ELONGATION |
| | | | | | | FACTOR SIGNATURE |
| 1548 | PR00315B | 11.66 | 5.800e−10 | 68-76 | PR00315 | GTP-BINDING ELONGATION |
| | | | | | | FACTOR SIGNATURE |
| 1548 | PR00315C | 13.85 | 7.750e−13 | 88-98 | PR00315 | GTP-BINDING ELONGATION |
| | | | | | | FACTOR SIGNATURE |
| 1548 | PR00315D | 10.84 | 2.895e−11 | 104-115 | PR00315 | GTP-BINDING ELONGATION |
| | | | | | | FACTOR SIGNATURE |
| 1548 | PR00315E | 12.29 | 3.864e−09 | 148-157 | PR00315 | GTP-BINDING ELONGATION |
| | | | | | | FACTOR SIGNATURE |
| 1549 | BL00514A | 11.68 | 6.885e−12 | 40-49 | BL00514 | Fibrinogen beta and |
| | | | | | | gamma chains C-terminal |
| | | | | | | domain proteins. |
| 1549 | BL00514B | 16.42 | 4.000e−15 | 150-165 | BL00514 | Fibrinogen beta and |
| | | | | | | gamma chains C-terminal |
| | | | | | | domain proteins. |
| 1549 | BL00514C | 17.41 | 1.000e−40 | 206-242 | BL00514 | Fibrinogen beta and |
| | | | | | | gamma chains C-terminal |
| | | | | | | domain proteins. |
| 1549 | BL00514D | 15.35 | 7.000e−16 | 251-263 | BL00514 | Fibrinogen beta and |
| | | | | | | gamma chains C-terminal |
| | | | | | | domain proteins. |
| 1549 | BL00514E | 14.28 | 4.000e−19 | 272-288 | BL00514 | Fibrinogen beta and |
| | | | | | | gamma chains C-terminal |
| | | | | | | domain proteins. |
| 1549 | BL00514F | 11.65 | 5.091e−15 | 304-318 | BL00514 | Fibrinogen beta and |
| | | | | | | gamma chains C-terminal |
| | | | | | | domain proteins. |
| 1549 | BL00514G | 15.98 | 1.947e−37 | 351-380 | BL00514 | Fibrinogen beta and |
| | | | | | | gamma chains C-terminal |
| | | | | | | domain proteins. |
| 1549 | BL00514H | 14.95 | 3.368e−28 | 390-414 | BL00514 | Fibrinogen beta and |
| | | | | | | gamma chains C-terminal |
| | | | | | | domain proteins. |
| 1549 | PR00171A | 10.00 | 8.875e−09 | 384-394 | PR00171 | SUGAR TRANSPORTER |
| | | | | | | SIGNATURE |
| 1551 | BL00615B | 12.25 | 3.423e−09 | 207-220 | BL00615 | C-type lectin domain |
| | | | | | | proteins. |
| 1551 | PR00770A | 13.71 | 1.231e−24 | 2-25 | PR00770 | EOSINOPHIL MAJOR BASIC |
| | | | | | | PROTEIN SIGNATURE |
| 1551 | PR00770B | 11.43 | 9.325e−17 | 88-103 | PR00770 | EOSINOPHIL MAJOR BASIC |
| | | | | | | PROTEIN SIGNATURE |
| 1551 | PR00770C | 12.19 | 5.886e−17 | 109-125 | PR00770 | EOSINOPHIL MAJOR BASIC |
| | | | | | | PROTEIN SIGNATURE |
| 1551 | PR00770D | 13.82 | 8.364e−21 | 126-142 | PR00770 | EOSINOPHIL MAJOR BASIC |
| | | | | | | PROTEIN SIGNATURE |
| 1551 | PR00770E | 8.53 | 1.000e−22 | 153-171 | PR00770 | EOSINOPHIL MAJOR BASIC |
| | | | | | | PROTEIN SIGNATURE |
| 1551 | PR00770F | 13.79 | 1.250e−26 | 172-191 | PR00770 | EOSINOPHIL MAJOR BASIC |
| | | | | | | PROTEIN SIGNATURE |
| 1551 | PR00770G | 7.65 | 3.512e−23 | 195-212 | PR00770 | EOSINOPHIL MAJOR BASIC |
| | | | | | | PROTEIN SIGNATURE |
| 1552 | BL00213A | 12.95 | 8.105e−10 | 31-44 | BL00213 | Lipocalin proteins. |
| 1552 | PR00179A | 13.78 | 5.050e−11 | 31-43 | PR00179 | LIPOCALIN SIGNATURE |
| 1552 | PR00179B | 9.56 | 5.034e−11 | 112-124 | PR00179 | LIPOCALIN SIGNATURE |
| 1552 | PR00179C | 19.02 | 8.909e−09 | 139-154 | PR00179 | LIPOCALIN SIGNATURE |
| 1553 | BL00164A | 11.58 | 1.529e−27 | 32-54 | BL00164 | Enolase proteins. |
| 1553 | BL00164B | 16.22 | 1.000e−40 | 98-140 | BL00164 | Enolase proteins. |
| 1553 | BL00164C | 15.66 | 1.000e−40 | 144-193 | BL00164 | Enolase proteins. |
| 1553 | BL00164D | 21.97 | 2.588e−38 | 220-262 | BL00164 | Enolase proteins. |
| 1553 | BL00164E | 8.80 | 9.100e−20 | 287-301 | BL00164 | Enolase proteins. |
| 1553 | BL00164F | 10.48 | 3.813e−39 | 313-348 | BL00164 | Enolase proteins. |
| 1553 | BL00164G | 12.13 | 1.000e−40 | 380-418 | BL00164 | Enolase proteins. |
| 1553 | PR00148A | 10.11 | 1.783e−18 | 35-49 | PR00148 | ENOLASE SIGNATURE |
| 1553 | PR00148B | 8.60 | 7.000e−21 | 107-123 | PR00148 | ENOLASE SIGNATURE |
| 1553 | PR00148C | 15.33 | 2.800e−16 | 164-177 | PR00148 | ENOLASE SIGNATURE |
| 1553 | PR00148D | 14.46 | 1.360e−15 | 317-328 | PR00148 | ENOLASE SIGNATURE |
| 1553 | PR00148E | 13.62 | 4.500e−17 | 340-354 | PR00148 | ENOLASE SIGNATURE |
| 1553 | PR00148F | 10.19 | 1.643e−23 | 369-386 | PR00148 | ENOLASE SIGNATURE |
| 1554 | BL00086 | 20.87 | 4.938e−24 | 438-469 | BL00086 | Cytochrome P450 |
| | | | | | | cysteine heme-iron |
| | | | | | | ligand proteins. |
| 1554 | PR00359F | 24.20 | 1.738e−09 | 382-409 | PR00359 | B-CLASS P450 SIGNATURE |
| 1554 | PR00359I | 11.13 | 3.189e−09 | 448-459 | PR00359 | B-CLASS P450 SIGNATURE |
| 1554 | PR00385A | 14.97 | 7.750e−18 | 311-328 | PR00385 | P450 SUPERFAMILY |
| | | | | | | SIGNATURE |
| 1554 | PR00385B | 10.22 | 8.650e−12 | 329-342 | PR00385 | P450 SUPERFAMILY |
| | | | | | | SIGNATURE |
| 1554 | PR00385C | 16.94 | 6.684e−10 | 364-375 | PR00385 | P450 SUPERFAMILY |
| | | | | | | SIGNATURE |
| 1554 | PR00385D | 13.11 | 1.857e−10 | 439-448 | PR00385 | P450 SUPERFAMILY |
| | | | | | | SIGNATURE |
| 1554 | PR00385E | 12.66 | 2.800e−11 | 448-459 | PR00385 | P450 SUPERFAMILY |
| | | | | | | SIGNATURE |
| 1554 | PR00408D | 15.44 | 9.211e−12 | 311-328 | PR00408 | MITOCHONDRIAL P450 |
| | | | | | | SIGNATURE |
| 1554 | PR00463A | 11.40 | 3.659e−10 | 72-91 | PR00463 | E-CLASS P450 GROUP I |
| | | | | | | SIGNATURE |
| 1554 | PR00463B | 17.50 | 9.077e−12 | 96-117 | PR00463 | E-CLASS P450 GROUP I |
| | | | | | | SIGNATURE |
| 1554 | PR00463C | 12.85 | 6.684e−18 | 187-205 | PR00463 | E-CLASS P450 GROUP I |
| | | | | | | SIGNATURE |
| 1554 | PR00463D | 14.02 | 8.875e−18 | 300-317 | PR00463 | E-CLASS P450 GROUP I |
| | | | | | | SIGNATURE |
| 1554 | PR00463E | 17.37 | 4.150e−25 | 320-346 | PR00463 | E-CLASS P450 GROUP I |
| | | | | | | SIGNATURE |
| 1554 | PR00463F | 17.63 | 1.818e−16 | 363-381 | PR00463 | E-CLASS P450 GROUP I |
| | | | | | | SIGNATURE |
| 1554 | PR00463G | 18.24 | 5.680e−19 | 404-428 | PR00463 | E-CLASS P450 GROUP I |
| | | | | | | SIGNATURE |
| 1554 | PR00463H | 12.41 | 5.154e−13 | 438-448 | PR00463 | E-CLASS P450 GROUP I |
| | | | | | | SIGNATURE |
| 1554 | PR00463I | 15.02 | 5.500e−20 | 448-471 | PR00463 | E-CLASS P450 GROUP I |
| | | | | | | SIGNATURE |
| 1554 | PR00464C | 18.84 | 4.000e−11 | 300-328 | PR00464 | E-CLASS P450 GROUP II |
| | | | | | | SIGNATURE |
| 1554 | PR00464D | 17.40 | 4.545e−12 | 329-346 | PR00464 | E-CLASS P450 GROUP II |
| | | | | | | SIGNATURE |
| 1554 | PR00464H | 13.32 | 3.423e−09 | 435-448 | PR00464 | E-CLASS P450 GROUP II |
| | | | | | | SIGNATURE |
| 1554 | PR00464I | 14.64 | 2.532e−10 | 448-471 | PR00464 | E-CLASS P450 GROUP II |
| | | | | | | SIGNATURE |
| 1554 | PR00465F | 13.37 | 3.400e−09 | 409-427 | PR00465 | E-CLASS P450 GROUP IV |
| | | | | | | SIGNATURE |
| 1555 | BL01191A | 15.57 | 1.000e−40 | 13-63 | BL01191 | Ribosomal protein S3Ae |
| | | | | | | proteins. |
| 1555 | BL01191B | 13.33 | 1.000e−40 | 89-139 | BL01191 | Ribosomal protein S3Ae |
| | | | | | | proteins. |
| 1555 | BL01191C | 16.50 | 1.000e−40 | 180-231 | BL01191 | Ribosomal protein S3Ae |
| | | | | | | proteins. |
| 1556 | BL01209 | 9.31 | 2.500e−14 | 124-136 | BL01209 | LDL-receptor class A |
| | | | | | | (LDLRA) domain |
| | | | | | | proteins. |
| 1556 | BL01209 | 9.31 | 8.342e−12 | 44-56 | BL01209 | LDL-receptor class A |
| | | | | | | (LDLRA) domain |
| | | | | | | proteins. |
| 1556 | PR00261A | 11.02 | 6.053e−17 | 115-136 | PR00261 | LOW DENSITY LIPOPROTEIN |
| | | | | | | (LDL) RECEPTOR |
| | | | | | | SIGNATURE |
| 1556 | PR00261A | 11.02 | 7.338e−12 | 35-56 | PR00261 | LOW DENSITY LIPOPROTEIN |
| | | | | | | (LDL) RECEPTOR |
| | | | | | | SIGNATURE |
| 1556 | PR00261B | 14.12 | 2.385e−15 | 115-136 | PR00261 | LOW DENSITY LIPOPROTEIN |
| | | | | | | (LDL) RECEPTOR |
| | | | | | | SIGNATURE |
| 1556 | PR00261B | 14.12 | 9.630e−12 | 35-56 | PR00261 | LOW DENSITY LIPOPROTEIN |
| | | | | | | (LDL) RECEPTOR |
| | | | | | | SIGNATURE |
| 1556 | PR00261C | 11.37 | 5.607e−09 | 78-99 | PR00261 | LOW DENSITY LIPOPROTEIN |
| | | | | | | (LDL) RECEPTOR |
| | | | | | | SIGNATURE |
| 1556 | PR00261C | 11.37 | 8.174e−13 | 35-56 | PR00261 | LOW DENSITY LIPOPROTEIN |
| | | | | | | (LDL) RECEPTOR |
| | | | | | | SIGNATURE |
| 1556 | PR00261C | 11.37 | 8.603e−17 | 115-136 | PR00261 | LOW DENSITY LIPOPROTEIN |
| | | | | | | (LDL) RECEPTOR |
| | | | | | | SIGNATURE |
| 1556 | PR00261D | 12.47 | 1.915e−16 | 115-136 | PR00261 | LOW DENSITY LIPOPROTEIN |
| | | | | | | (LDL) RECEPTOR |
| | | | | | | SIGNATURE |
| 1556 | PR00261D | 12.47 | 5.257e−11 | 35-56 | PR00261 | LOW DENSITY LIPOPROTEIN |
| | | | | | | (LDL) RECEPTOR |
| | | | | | | SIGNATURE |
| 1556 | PR00261E | 11.08 | 3.813e−13 | 115-136 | PR00261 | LOW DENSITY LIPOPROTEIN |
| | | | | | | (LDL) RECEPTOR |
| | | | | | | SIGNATURE |
| 1556 | PR00261E | 11.08 | 8.714e−11 | 35-56 | PR00261 | LOW DENSITY LIPOPROTEIN |
| | | | | | | (LDL) RECEPTOR |
| | | | | | | SIGNATURE |
| 1556 | PR00261F | 11.57 | 6.824e−12 | 115-136 | PR00261 | LOW DENSITY LIPOPROTEIN |
| | | | | | | (LDL) RECEPTOR |
| | | | | | | SIGNATURE |
| 1556 | PR00261F | 11.57 | 7.750e−12 | 35-56 | PR00261 | LOW DENSITY LIPOPROTEIN |
| | | | | | | (LDL) RECEPTOR |
| | | | | | | SIGNATURE |
| 1557 | BL00025 | 17.17 | 2.853e−17 | 89-109 | BL00025 | P-type ‘Trefoil’ domain |
| | | | | | | proteins. |
| 1557 | BL00129A | 26.21 | 1.000e−40 | 359-404 | BL00129 | Glycosyl hydrolases |
| | | | | | | family 31 proteins. |
| 1557 | BL00129B | 19.19 | 3.667e−25 | 473-499 | BL00129 | Glycosyl hydrolases |
| | | | | | | family 31 proteins. |
| 1557 | BL00129C | 15.12 | 6.211e−32 | 594-621 | BL00129 | Glycosyl hydrolases |
| | | | | | | family 31 proteins. |
| 1557 | BL00129D | 16.76 | 1.000e−40 | 632-675 | BL00129 | Glycosyl hydrolases |
| | | | | | | family 31 proteins. |
| 1557 | BL00129E | 22.60 | 1.692e−32 | 696-731 | BL00129 | Glycosyl hydrolases |
| | | | | | | family 31 proteins. |
| 1557 | BL00129F | 26.19 | 1.000e−29 | 827-864 | BL00129 | Glycosyl hydrolases |
| | | | | | | family 31 proteins. |
| 1557 | BL01103H | 11.98 | 7.840e−09 | 738-749 | BL01103 | Aspartate-semialdehyde |
| | | | | | | dehydrogenase proteins. |
| 1557 | PR00680B | 10.34 | 5.359e−10 | 99-111 | PR00680 | P-TYPE TREFOIL DOMAIN |
| | | | | | | SIGNATURE |
| 1558 | BL01033A | 16.94 | 2.929e−17 | 25-46 | BL01033 | Globins profile. |
| 1558 | BL01033B | 13.81 | 1.000e−15 | 93-104 | BL01033 | Globins profile. |
| 1558 | PR00612D | 9.76 | 2.976e−10 | 80-93 | PR00612 | ALPHA HAEMOGLOBIN |
| | | | | | | SIGNATURE |
| 1558 | PR00613B | 9.02 | 9.270e−10 | 25-48 | PR00613 | MYOGLOBIN SIGNATURE |
| 1558 | PR00613C | 10.22 | 9.630e−09 | 58-78 | PR00613 | MYOGLOBIN SIGNATURE |
| 1558 | PR00814A | 12.94 | 1.000e−22 | 30-46 | PR00814 | BETA HAEMOGLOBIN |
| | | | | | | SIGNATURE |
| 1558 | PR00814B | 9.18 | 3.571e−20 | 48-63 | PR00814 | BETA HAEMOGLOBIN |
| | | | | | | SIGNATURE |
| 1558 | PR00814C | 9.20 | 8.615e−19 | 72-89 | PR00814 | BETA HAEMOGLOBIN |
| | | | | | | SIGNATURE |
| 1558 | PR00814D | 15.25 | 2.286e−09 | 94-99 | PR00814 | BETA HEAMOGLOBIN |
| | | | | | | SIGNATURE |
| 1558 | PR00814E | 10.17 | 4.414e−14 | 128-144 | PR00814 | BETA HAEMOGLOBIN |
| | | | | | | SIGNATURE |
| 1559 | PR00014A | 8.22 | 7.955e−09 | 443-452 | PR00014 | FIBRONECTIN TYPE III |
| | | | | | | REPEAT SIGNATURE |
| 1559 | PR00014C | 15.44 | 8.826e−09 | 578-596 | PR00014 | FIBRONECTIN TYPE III |
| | | | | | | REPEAT SIGNATURE |
| 1560 | BL00222A | 11.34 | 9.438e−11 | 45-55 | BL00222 | Insulin-like growth |
| | | | | | | factor binding |
| | | | | | | proteins. |
| 1560 | BL00222B | 11.09 | 7.300e−17 | 65-80 | BL00222 | Insulin-like growth |
| | | | | | | factor binding |
| | | | | | | proteins. |
| 1560 | BL00222C | 22.97 | 1.409e−29 | 237-264 | BL00222 | Insulin-like growth |
| | | | | | | factor binding |
| | | | | | | proteins. |
| 1560 | BL00484B | 9.04 | 1.000e−17 | 238-251 | BL00484 | Thyroglobulin type-1 |
| | | | | | | repeat proteins |
| | | | | | | proteins. |
| 1560 | BL00484C | 17.01 | 5.737e−15 | 262-276 | BL00484 | Thyroglobulin type-1 |
| | | | | | | repeat proteins |
| | | | | | | proteins. |
| 1561 | BL00222B | 11.09 | 7.333e−15 | 55-70 | BL00222 | Insulin-like growth |
| | | | | | | factor binding |
| | | | | | | proteins. |
| 1561 | BL00222C | 22.97 | 2.161e−24 | 203-230 | BL00222 | Insulin-like growth |
| | | | | | | factor binding |
| | | | | | | proteins. |
| 1561 | BL00484B | 9.04 | 6.143e−16 | 204-217 | BL00484 | Thyroglobulin type-1 |
| | | | | | | repeat proteins |
| | | | | | | proteins. |
| 1561 | BL00484C | 17.01 | 1.375e−14 | 228-242 | BL00484 | Thyroglobulin type-1 |
| | | | | | | repeat proteins |
| | | | | | | proteins. |
| 1562 | BL00322A | 9.23 | 1.000e−40 | 30-81 | BL00322 | Histone H3 proteins. |
| 1562 | BL00322B | 13.68 | 1.000e−40 | 83-135 | BL00322 | Histone H3 proteins. |
| 1562 | PR00622A | 6.52 | 1.391e−19 | 3-17 | PR00622 | HISTONE H3 SIGNATURE |
| 1562 | PR00622B | 6.92 | 1.409e−19 | 17-31 | PR00622 | HISTONE H3 SIGNATURE |
| 1562 | PR00622C | 8.83 | 1.391e−28 | 34-55 | PR00622 | HISTONE H3 SIGNATURE |
| 1562 | PR00622D | 12.71 | 1.273e−22 | 58-75 | PR00622 | HISTONE H3 SIGNATURE |
| 1562 | PR00622E | 15.81 | 1.281e−21 | 80-98 | PR00622 | HISTONE H3 SIGNATURE |
| 1562 | PR00622F | 19.51 | 1.265e−22 | 98-114 | PR00622 | HISTONE H3 SIGNATURE |
| 1562 | PR00622G | 13.24 | 1.300e−28 | 114-135 | PR00622 | HISTONE H3 SIGNATURE |
| 1563 | BL00290A | 20.89 | 1.000e−14 | 221-243 | BL00290 | Immunoglobulins and |
| | | | | | | major |
| | | | | | | histocompatibility |
| | | | | | | complex proteins. |
| 1563 | BL00290A | 20.89 | 2.800e−16 | 31-53 | BL00290 | Immunoglobulins and |
| | | | | | | major |
| | | | | | | histocompatibility |
| | | | | | | complex proteins. |
| 1563 | BL00290B | 13.17 | 4.000e−21 | 278-295 | BL00290 | Immunoglobulins and |
| | | | | | | major |
| | | | | | | histocompatibility |
| | | | | | | complex proteins. |
| 1564 | BL00345B | 21.28 | 9.118e−30 | 304-354 | BL00345 | Ets-domain proteins. |
| 1564 | BL00354A | 3.83 | 8.875e−10 | 244-253 | BL00354 | HMG-I and HMG-Y DNA- |
| | | | | | | binding domain proteins |
| | | | | | | (A+T-hook). |
| 1564 | BL00354B | 3.16 | 6.468e−09 | 241-253 | BL00354 | HMG-I and HMG-Y DNA- |
| | | | | | | binding domain proteins |
| | | | | | | (A+T-hook). |
| 1564 | PR00454B | 20.78 | 8.380e−12 | 299-317 | PR00454 | ETS DOMAIN SIGNATURE |
| 1564 | PR00454C | 11.24 | 5.119e−14 | 318-336 | PR00454 | ETS DOMAIN SIGNATURE |
| 1564 | PR00454D | 10.89 | 5.860e−11 | 337-355 | PR00454 | ETS DOMAIN SIGNATURE |
| 1564 | PR00929A | 3.25 | 6.571e−09 | 244-254 | PR00929 | AT-HOOK-LIKE DOMAIN |
| | | | | | | SIGNATURE |
| 1564 | PR00929B | 4.38 | 5.018e−09 | 242-253 | PR00929 | AT-HOOK-LIKE DOMAIN |
| | | | | | | SIGNATURE |
| 1564 | PR00929C | 5.26 | 4.736e−10 | 242-252 | PR00929 | AT-HOOK-LIKE DOMAIN |
| | | | | | | SIGNATURE |
| 1564 | PR00930D | 5.16 | 9.407e−09 | 233-252 | PR00930 | HIGH MOBILITY GROUP |
| | | | | | | PROTEIN (HMGY) |
| | | | | | | SIGNATURE |
| 1565 | BL00290A | 20.89 | 7.882e−14 | 224-246 | BL00290 | Immunoglobulins and |
| | | | | | | major |
| | | | | | | histocompatibility |
| | | | | | | complex proteins. |
| 1565 | BL00290A | 20.89 | 9.526e−13 | 34-56 | BL00290 | Immunoglobulins and |
| | | | | | | major |
| | | | | | | histocompatibility |
| | | | | | | complex proteins. |
| 1565 | BL00290B | 13.17 | 6.625e−19 | 281-298 | BL00290 | Immunoglobulins and |
| | | | | | | major |
| | | | | | | histocompatibility |
| | | | | | | complex proteins. |
| 1565 | PR00818B | 6.95 | 1.614e−09 | 164-180 | PR00818 | ISLET AMYLOID PROTEIN |
| | | | | | | (AMYLIN) SIGNATURE |
| 1566 | BL00299 | 28.84 | 7.943e−26 | 97-148 | BL00299 | Ubiquitin domain |
| | | | | | | proteins. |
| 1568 | PF01105B | 25.12 | 2.016e−20 | 154-205 | PF01105 | emp24/gp25L/p24 family. |
| 1569 | BL00380F | 9.76 | 9.705e−09 | 38-48 | BL00380 | Rhodanese proteins. |
| 1569 | BL00383E | 10.35 | 1.692e−10 | 256-266 | BL00383 | Tyrosine specific |
| | | | | | | protein phosphatases |
| | | | | | | proteins. |
| 1569 | BL00415R | 7.93 | 7.655e−11 | 302-341 | BL00415 | Synapsins proteins. |
| 1569 | PR00700D | 12.47 | 4.462e−11 | 253-271 | PR00700 | PROTEIN TYROSINE |
| | | | | | | PHOSPHATASE SIGNATURE |
| 1569 | PR00716C | 17.65 | 7.750e−09 | 26-46 | PR00716 | M-PHASE INDUCER |
| | | | | | | PHOSPHATASE SIGNATURE |
| 1570 | BL00712A | 6.23 | 6.000e−25 | 2-21 | BL00712 | Ribosomal protein S17e |
| | | | | | | proteins. |
| 1570 | BL00712B | 12.56 | 1.000e−40 | 28-65 | BL00712 | Ribosomal protein S17e |
| | | | | | | proteins. |
| 1570 | BL00712C | 9.67 | 1.900e−13 | 98-107 | BL00712 | Ribosomal protein S17e |
| | | | | | | proteins. |
| 1571 | BL00388A | 23.14 | 3.483e−37 | 6-51 | BL00388 | Proteasome A-type |
| | | | | | | subunits proteins. |
| 1571 | BL00388B | 31.38 | 2.731e−29 | 62-103 | BL00388 | Proteasome A-type |
| | | | | | | subunits proteins. |
| 1571 | BL00388C | 18.79 | 2.385e−19 | 117-138 | BL00388 | Proteasome A-type |
| | | | | | | subunits proteins. |
| 1571 | BL00388D | 20.71 | 4.462e−24 | 144-174 | BL00388 | Proteasome A-type |
| | | | | | | subunits proteins. |
| 1572 | BL01002B | 7.39 | 3.118e−14 | 14-27 | BL01002 | Translationally |
| | | | | | | controlled tumor |
| | | | | | | protein. |
| 1572 | BL01002C | 21.97 | 6.143e−26 | 45-75 | BL01002 | Translationally |
| | | | | | | controlled tumor |
| | | | | | | protein. |
| 1572 | BL01002D | 18.24 | 4.706e−26 | 109-136 | BL01002 | Translationally |
| | | | | | | controlled tumor |
| | | | | | | protein. |
| 1573 | BL00298C | 16.40 | 1.000e−40 | 28-71 | BL00298 | Heat shock hsp90 |
| | | | | | | proteins family |
| | | | | | | proteins. |
| 1573 | BL00298D | 17.97 | 1.000e−40 | 84-123 | BL00298 | Heat shock hsp90 |
| | | | | | | proteins family |
| | | | | | | proteins. |
| 1573 | BL00298E | 27.30 | 1.000e−40 | 178-232 | BL00298 | Heat shock hsp90 |
| | | | | | | proteins family |
| | | | | | | proteins. |
| 1573 | BL00298F | 11.21 | 1.000e−40 | 264-318 | BL00298 | Heat shock hsp90 |
| | | | | | | proteins family |
| | | | | | | proteins. |
| 1573 | BL00298G | 24.57 | 1.000e−40 | 321-375 | BL00298 | Heat shock hsp90 |
| | | | | | | proteins family |
| | | | | | | proteins. |
| 1573 | BL00298H | 20.50 | 1.000e−40 | 409-462 | BL00298 | Heat shock hsp90 |
| | | | | | | proteins family |
| | | | | | | proteins. |
| 1573 | BL00298I | 30.07 | 1.000e−40 | 513-566 | BL00298 | Heat shock hsp90 |
| | | | | | | proteins family |
| | | | | | | proteins. |
| 1573 | BL00412D | 16.54 | 5.989e−10 | 121-171 | BL00412 | Neuromodulin (GAP-43) |
| | | | | | | proteins. |
| 1573 | PR00775D | 8.91 | 1.000e−22 | 9-26 | PR00775 | 90 KD HEAT SHOCK |
| | | | | | | PROTEIN SIGNATURE |
| 1573 | PR00775E | 8.06 | 5.500e−28 | 34-56 | PR00775 | 90 KD HEAT SHOCK |
| | | | | | | PROTEIN SIGNATURE |
| 1573 | PR00775F | 12.76 | 7.188e−21 | 85-102 | PR00775 | 90 KD HEAT SHOCK |
| | | | | | | PROTEIN SIGNATURE |
| 1573 | PR00775G | 10.64 | 1.750e−23 | 103-121 | PR00775 | 90 KD HEAT SHOCK |
| | | | | | | PROTEIN SIGNATURE |
| 1574 | BL00076A | 18.83 | 9.163e−13 | 14-43 | BL00076 | Pyridine nucleotide- |
| | | | | | | disulphide |
| | | | | | | oxidoreductases class- |
| | | | | | | I. |
| 1574 | BL00504A | 10.76 | 3.712e−10 | 15-36 | BL00504 | Fumarate reductase/ |
| | | | | | | succinate dehydrogenase |
| | | | | | | FAD-binding site |
| | | | | | | proteins. |
| 1574 | BL00623A | 12.60 | 5.500e−10 | 15-33 | BL00623 | GMC oxidoreductases |
| | | | | | | proteins. |
| 1574 | BL00836D | 22.30 | 1.574e−10 | 15-51 | BL00836 | Alanine dehydrogenase & |
| | | | | | | pyridine nucleotide |
| | | | | | | transhydrogenase. |
| 1574 | BL00977A | 20.76 | 4.051e−09 | 15-66 | BL00977 | FAD-dependent glycerol- |
| | | | | | | 3-phosphate |
| | | | | | | dehydrogenase proteins. |
| 1574 | BL00982A | 18.41 | 1.000e−13 | 17-48 | BL00982 | Bacterial-type phytoene |
| | | | | | | dehydrogenase proteins. |
| 1574 | BL01280A | 15.97 | 8.740e−09 | 15-55 | BL01280 | Glucose inhibited |
| | | | | | | division protein A |
| | | | | | | family proteins. |
| 1574 | PR00368A | 17.76 | 1.865e−10 | 15-37 | PR00368 | FAD-DEPENDENT PYRIDINE |
| | | | | | | NUCLEOTIDE REDUCTASE |
| | | | | | | SIGNATURE |
| 1574 | PR00368C | 15.74 | 3.656e−09 | 15-40 | PR00368 | FAD-DEPENDENT PYRIDINE |
| | | | | | | NUCLEOTIDE REDUCTASE |
| | | | | | | SIGNATURE |
| 1574 | PR00370A | 3.35 | 7.932e−10 | 15-30 | PR00370 | FLAVIN-CONTAINING |
| | | | | | | MONOOXYGENASE (FMO) |
| | | | | | | SIGNATURE |
| 1574 | PR00411A | 15.95 | 6.365e−10 | 15-37 | PR00411 | PYRIDINE NUCLEOTIDE |
| | | | | | | DISULPHIDE REDUCTASE |
| | | | | | | CLASS-I SIGNATURE |
| 1574 | PR00419A | 14.89 | 4.214e−09 | 15-37 | PR00419 | ADRENODOXIN REDUCTASE |
| | | | | | | FAMILY SIGNATURE |
| 1574 | PR00420A | 14.78 | 6.750e−16 | 15-37 | PR00420 | AROMATIC-RING |
| | | | | | | HYDROXYLASE |
| | | | | | | (FLAVOPROTEIN |
| | | | | | | MONOOXYGENASE) |
| | | | | | | SIGNATURE |
| 1574 | PR00469F | 16.51 | 6.241e−09 | 11-35 | PR00469 | PYRIDINE NUCLEOTIDE |
| | | | | | | DISULPHIDE REDUCTASE |
| | | | | | | CLASS-II SIGNATURE |
| 1574 | PR00757A | 6.64 | 2.324e−22 | 15-34 | PR00757 | FLAVIN-CONTAINING AMINE |
| | | | | | | OXIDASE SIGNATURE |
| 1574 | PR00757B | 12.54 | 2.286e−30 | 101-123 | PR00757 | FLAVIN-CONTAINING AMINE |
| | | | | | | OXIDASE SIGNATURE |
| 1574 | PR00757C | 13.48 | 1.600e−30 | 183-204 | PR00757 | FLAVIN-CONTAINING AMINE |
| | | | | | | OXIDASE SIGNATURE |
| 1574 | PR00757D | 6.41 | 3.571e−29 | 206-228 | PR00757 | FLAVIN-CONTAINING AMINE |
| | | | | | | OXIDASE SIGNATURE |
| 1574 | PR00757E | 11.48 | 1.000e−27 | 303-322 | PR00757 | FLAVIN-CONTAINING AMINE |
| | | | | | | OXIDASE SIGNATURE |
| 1574 | PR00757F | 15.60 | 1.129e−28 | 389-408 | PR00757 | FLAVIN-CONTAINING AMINE |
| | | | | | | OXIDASE SIGNATURE |
| 1574 | PR00757G | 4.34 | 5.345e−30 | 410-432 | PR00757 | FLAVIN-CONTAINING AMINE |
| | | | | | | OXIDASE SIGNATURE |
| 1574 | PR00757H | 9.22 | 1.096e−23 | 441-458 | PR00757 | FLAVIN-CONTAINING AMINE |
| | | | | | | OXIDASE SIGNATURE |
| 1574 | PR00757I | 12.66 | 3.368e−29 | 471-493 | PR00757 | FLAVIN-CONTAINING AMINE |
| | | | | | | OXIDASE SIGNATURE |
| 1575 | BL00290A | 20.89 | 2.421e−13 | 224-246 | BL00290 | Immunoglobulins and |
| | | | | | | major |
| | | | | | | histocompatibility |
| | | | | | | complex proteins. |
| 1575 | BL00290A | 20.89 | 4.600e−16 | 34-56 | BL00290 | Immunoglobulins and |
| | | | | | | major |
| | | | | | | histocompatibility |
| | | | | | | complex proteins. |
| 1575 | BL00290B | 13.17 | 4.000e−21 | 281-298 | BL00290 | Immunoglobulins and |
| | | | | | | major |
| | | | | | | histocompatibility |
| | | | | | | complex proteins. |
| 1576 | BL00290A | 20.89 | 6.684e−13 | 129-151 | BL00290 | Immunoglobulins and |
| | | | | | | major |
| | | | | | | histocompatibility |
| | | | | | | complex proteins. |
| 1576 | BL00290B | 13.17 | 9.308e−15 | 186-203 | BL00290 | Immunoglobulins and |
| | | | | | | major |
| | | | | | | histocompatibility |
| | | | | | | complex proteins. |
| 1577 | BL00469 | 22.22 | 1.000e−40 | 78-132 | BL00469 | Nucleoside diphosphate |
| | | | | | | kinases proteins. |
| 1578 | BL00113A | 12.74 | 4.600e−09 | 142-158 | BL00113 | Adenylate kinase |
| | | | | | | proteins. |
| 1578 | BL00291A | 4.49 | 8.448e−09 | 47-81 | BL00291 | Prion protein. |
| 1578 | BL00674B | 4.46 | 8.909e−11 | 138-159 | BL00674 | AAA-protein family |
| | | | | | | proteins. |
| 1578 | PR00300A | 9.56 | 5.442e−09 | 141-159 | PR00300 | ATP-DEPENDENT CLP |
| | | | | | | PROTEASE ATP-BINDING |
| | | | | | | SUBUNIT SIGNATURE |
| 1578 | PR00449A | 13.20 | 1.692e−10 | 139-160 | PR00449 | TRANSFORMING PROTEIN |
| | | | | | | P21 RAS SIGNATURE |
| 1578 | PR00449D | 10.79 | 6.400e−15 | 241-254 | PR00449 | TRANSFORMING PROTEIN |
| | | | | | | P21 RAS SIGNATURE |
| 1578 | PR00449E | 13.50 | 1.529e−11 | 276-298 | PR00449 | TRANSFORMING PROTEIN |
| | | | | | | P21 RAS SIGNATURE |
| 1578 | PR00830A | 8.41 | 8.644e−09 | 145-164 | PR00830 | ENDOPEPTIDASE LA (LON) |
| | | | | | | SERINE PROTEASE (S16) |
| | | | | | | SIGNATURE |
| 1579 | BL01257A | 11.15 | 1.000e−40 | 2-44 | BL01257 | Ribosomal protein L10e |
| | | | | | | proteins. |
| 1579 | BL01257B | 12.56 | 1.000e−40 | 62-101 | BL01257 | Ribosomal protein L10e |
| | | | | | | proteins. |
| 1579 | BL01257C | 11.43 | 1.000e−40 | 102-136 | BL01257 | Ribosomal protein L10e |
| | | | | | | proteins. |
| 1579 | BL01257D | 18.80 | 1.000e−40 | 137-176 | BL01257 | Ribosomal protein L10e |
| | | | | | | proteins. |
| 1579 | PF00774D | 10.59 | 9.250e−10 | 189-214 | PF00774 | Dihydropyridine |
| | | | | | | sensitive L-type |
| | | | | | | calcium channel (Beta |
| | | | | | | subuni. |
| 1580 | BL01204A | 17.74 | 1.000e−40 | 19-66 | BL01204 | NF-kappa-B/Rel/dorsal |
| | | | | | | domain proteins. |
| 1580 | BL01204B | 15.41 | 4.000e−16 | 113-126 | BL01204 | NF-kappa-B/Rel/dorsal |
| | | | | | | domain proteins. |
| 1580 | BL01204C | 13.93 | 9.727e−18 | 150-168 | BL01204 | NF-kappa-B/Rel/dorsal |
| | | | | | | domain proteins. |
| 1580 | BL01204D | 16.42 | 1.000e−40 | 185-228 | BL01204 | NF-kappa-B/Rel/dorsal |
| | | | | | | domain proteins. |
| 1580 | BL01204E | 13.83 | 8.875e−31 | 233-257 | BL01204 | NF-kappa-B/Rel/dorsal |
| | | | | | | domain proteins. |
| 1580 | PR00057A | 10.14 | 1.450e−24 | 25-42 | PR00057 | TRANSCRIPTION FACTOR |
| | | | | | | NF-KB SIGNATURE |
| 1580 | PR00057B | 11.81 | 5.629e−15 | 175-189 | PR00057 | TRANSCRIPTION FACTOR |
| | | | | | | NF-KB SIGNATURE |
| 1580 | PR00057C | 7.43 | 4.462e−25 | 208-228 | PR00057 | TRANSCRIPTION FACTOR |
| | | | | | | NF-KB SIGNATURE |
| 1580 | PR00057D | 11.94 | 1.563e−24 | 239-257 | PR00057 | TRANSCRIPTION FACTOR |
| | | | | | | NF-KB SIGNATURE |
| 1580 | PR00057E | 15.74 | 4.000e−14 | 280-294 | PR00057 | TRANSCRIPTION FACTOR |
| | | | | | | NF-KB SIGNATURE |
| 1581 | BL00284A | 15.64 | 7.231e−17 | 54-77 | BL00284 | Serpins proteins. |
| 1581 | BL00284B | 17.99 | 1.783e−15 | 155-175 | BL00284 | Serpins proteins. |
| 1581 | BL00284C | 28.56 | 4.913e−31 | 184-225 | BL00284 | Serpins proteins. |
| 1581 | BL00284D | 16.34 | 6.538e−18 | 296-322 | BL00284 | Serpins proteins. |
| 1581 | BL00284E | 19.15 | 8.875e−23 | 378-402 | BL00284 | Serpins proteins. |
| 1582 | BL01251A | 17.37 | 4.240e−31 | 1-36 | BL01251 | Proliferating cell |
| | | | | | | nuclear antigen |
| | | | | | | proteins. |
| 1582 | BL01251B | 17.25 | 1.000e−40 | 37-82 | BL01251 | Proliferating cell |
| | | | | | | nuclear antigen |
| | | | | | | proteins. |
| 1582 | BL01251C | 19.35 | 1.000e−40 | 108-157 | BL01251 | Proliferating cell |
| | | | | | | nuclear antigen |
| | | | | | | proteins. |
| 1582 | BL01251D | 23.72 | 1.000e−40 | 197-250 | BL01251 | Proliferating cell |
| | | | | | | nuclear antigen |
| | | | | | | proteins. |
| 1582 | PR00339A | 5.83 | 6.400e−21 | 10-29 | PR00339 | PROLIFERATING CELL |
| | | | | | | NUCLEAR ANTIGEN |
| | | | | | | (CYCLIN) SIGNATURE |
| 1582 | PR00339B | 9.94 | 3.250e−20 | 34-52 | PR00339 | PROLIFERATING CELL |
| | | | | | | NUCLEAR ANTIGEN |
| | | | | | | (CYCLIN) SIGNATURE |
| 1582 | PR00339C | 13.91 | 7.158e−29 | 56-80 | PR00339 | PROLIFERATING CELL |
| | | | | | | NUCLEAR ANTIGEN |
| | | | | | | (CYCLIN) SIGNATURE |
| 1582 | PR00339D | 12.90 | 8.650e−26 | 110-132 | PR00339 | PROLIFERATING CELL |
| | | | | | | NUCLEAR ANTIGEN |
| | | | | | | (CYCLIN) SIGNATURE |
| 1582 | PR00339E | 14.05 | 2.000e−18 | 203-217 | PR00339 | PROLIFERATING CELL |
| | | | | | | NUCLEAR ANTIGEN |
| | | | | | | (CYCLIN) SIGNATURE |
| 1582 | PR00339F | 10.56 | 1.000e−22 | 241-258 | PR00339 | PROLIFERATING CELL |
| | | | | | | NUCLEAR ANTIGEN |
| | | | | | | (CYCLIN) SIGNATURE |
| 1583 | BL00507A | 8.79 | 4.643e−09 | 309-329 | BL00507 | Nickel-dependent |
| | | | | | | hydrogenases large |
| | | | | | | subunit proteins. |
| 1583 | PD02870A | 14.10 | 1.563e−17 | 39-55 | PD02870 | RECEPTOR INTERLEUKIN-1 |
| | | | | | | PRECURSOR. |
| 1583 | PD02870B | 18.83 | 7.968e−34 | 93-125 | PD02870 | RECEPTOR INTERLEUKIN-1 |
| | | | | | | PRECURSOR. |
| 1583 | PD02870C | 24.41 | 9.419e−31 | 136-170 | PD02870 | RECEPTOR INTERLEUKIN-1 |
| | | | | | | PRECURSOR. |
| 1583 | PD02870D | 15.74 | 4.000e−33 | 192-226 | PD02870 | RECEPTOR INTERLEUKIN-1 |
| | | | | | | PRECURSOR. |
| 1583 | PD02870E | 12.75 | 1.545e−16 | 244-260 | PD02870 | RECEPTOR INTERLEUKIN-1 |
| | | | | | | PRECURSOR. |
| 1583 | PD02870F | 22.82 | 4.536e−22 | 301-325 | PD02870 | RECEPTOR INTERLEUKIN-1 |
| | | | | | | PRECURSOR. |
| 1584 | BL01024A | 10.26 | 1.000e−40 | 26-72 | BL01024 | Protein phosphatase 2A |
| | | | | | | regulatory subunit PR55 |
| | | | | | | proteins. |
| 1584 | BL01024B | 8.91 | 1.000e−40 | 90-130 | BL01024 | Protein phosphatase 2A |
| | | | | | | regulatory subunit PR55 |
| | | | | | | proteins. |
| 1584 | BL01024C | 7.80 | 1.000e−40 | 150-188 | BL01024 | Protein phosphatase 2A |
| | | | | | | regulatory subunit PR55 |
| | | | | | | proteins. |
| 1584 | BL01024D | 13.22 | 1.000e−40 | 189-225 | BL01024 | Protein phosphatase 2A |
| | | | | | | regulatory subunit PR55 |
| | | | | | | proteins. |
| 1584 | BL01024E | 11.96 | 1.000e−40 | 226-269 | BL01024 | Protein phosphatase 2A |
| | | | | | | regulatory subunit PR55 |
| | | | | | | proteins. |
| 1584 | BL01024F | 9.42 | 1.000e−40 | 270-320 | BL01024 | Protein phosphatase 2A |
| | | | | | | regulatory subunit PR55 |
| | | | | | | proteins. |
| 1584 | BL01024G | 11.09 | 1.000e−40 | 321-352 | BL01024 | Protein phosphatase 2A |
| | | | | | | regulatory subunit PR55 |
| | | | | | | proteins. |
| 1584 | BL01024H | 13.88 | 1.000e−40 | 393-445 | BL01024 | Protein phosphatase 2A |
| | | | | | | regulatory subunit PR55 |
| | | | | | | proteins. |
| 1584 | PR00600A | 11.61 | 6.000e−26 | 35-55 | PR00600 | PROTEIN PHOSPHATASE |
| | | | | | | PP2A 55 kd REGULATORY |
| | | | | | | SUBUNIT SIGNATURE |
| 1584 | PR00600B | 11.27 | 1.500e−37 | 70-98 | PR00600 | PROTEIN PHOSPHATASE |
| | | | | | | PP2A 55 kd REGULATORY |
| | | | | | | SUBUNIT SIGNATURE |
| 1584 | PR00600C | 10.70 | 3.842e−35 | 99-127 | PR00600 | PROTEIN PHOSPHATASE |
| | | | | | | PP2A 55 kd REGULATORY |
| | | | | | | SUBUNIT SIGNATURE |
| 1584 | PR00500D | 10.70 | 4.667e−36 | 176-203 | PR00600 | PROTEIN PHOSPHATASE |
| | | | | | | PP2A 55 kd REGULATORY |
| | | | | | | SUBUNIT SIGNATURE |
| 1584 | PR00600E | 12.87 | 1.000e−34 | 204-231 | PR00600 | PROTEIN PHOSPHATASE |
| | | | | | | PP2A 55 kd REGULATORY |
| | | | | | | SUBUNIT SIGNATURE |
| 1584 | PR00600F | 18.73 | 9.625e−36 | 232-260 | PR00600 | PROTEIN PHOSPHATASE |
| | | | | | | PP2A 55 kd REGULATORY |
| | | | | | | SUBUNIT SIGNATURE |
| 1584 | PR00600G | 8.77 | 6.143e−35 | 261-288 | PR00600 | PROTEIN PHOSPHATASE |
| | | | | | | PP2A 55 kd REGULATORY |
| | | | | | | SUBUNIT SIGNATURE |
| 1584 | PR00600H | 8.99 | 5.500e−36 | 289-316 | PR00600 | PROTEIN PHOSPHATASE |
| | | | | | | PP2A 55 kd REGULATORY |
| | | | | | | SUBUNIT SIGNATURE |
| 1584 | PR00600I | 10.13 | 6.625e−34 | 317-342 | PR00600 | PROTEIN PHOSPHATASE |
| | | | | | | PP2A 55 kd REGULATORY |
| | | | | | | SUBUNIT SIGNATURE |
| 1584 | PR00600J | 12.56 | 7.000e−37 | 343-369 | PR00600 | PROTEIN PHOSPHATASE |
| | | | | | | PP2A 55 kd REGULATORY |
| | | | | | | SUBUNIT SIGNATURE |
| 1584 | PR00600K | 11.12 | 3.647e−37 | 413-442 | PR00600 | PROTEIN PHOSPHATASE |
| | | | | | | PP2A 55 kd REGULATORY |
| | | | | | | SUBUNIT SIGNATURE |
| 1585 | DM00372A | 19.18 | 1.000e−40 | 19-63 | DM00372 | CARCINOEMBRYONIC |
| | | | | | | ANTIGEN PRECURSOR |
| | | | | | | AMINO-TERMINAL DOMAIN. |
| 1585 | DM00372B | 20.31 | 9.763e−35 | 82-126 | DM00372 | CARCINOEMBRYONIC |
| | | | | | | ANTIGEN PRECURSOR |
| | | | | | | AMINO-TERMINAL DOMAIN. |
| 1585 | DM00372C | 23.69 | 6.921e−23 | 321-356 | DM00372 | CARCINOEMBRYONIC |
| | | | | | | ANTIGEN PRECURSOR |
| | | | | | | AMINO-TERMINAL DOMAIN. |
| 1586 | BL00214A | 21.17 | 1.257e−18 | 5-30 | BL00214 | Cytosolic fatty-acid |
| | | | | | | binding proteins. |
| 1586 | BL00214B | 26.51 | 6.516e−26 | 46-90 | BL00214 | Cytosolic fatty-acid |
| | | | | | | binding proteins. |
| 1586 | PR00178A | 15.07 | 5.846e−17 | 6-26 | PR00178 | FATTY ACID-BINDING |
| | | | | | | PROTEIN SIGNATURE |
| 1586 | PR00178B | 10.52 | 5.800e−10 | 40-51 | PR00178 | FATTY ACID-BINDING |
| | | | | | | PROTEIN SIGNATURE |
| 1586 | PR00178C | 20.54 | 3.919e−19 | 66-93 | PR00178 | FATTY ACID-BINDING |
| | | | | | | PROTEIN SIGNATURE |
| 1586 | PR00178D | 13.52 | 3.132e−14 | 112-130 | PR00178 | FATTY ACID-BINDING |
| | | | | | | PROTEIN SIGNATURE |
| 1587 | BL00107A | 18.39 | 3.842e−18 | 768-798 | BL00107 | Protein kinases ATP- |
| | | | | | | binding region |
| | | | | | | proteins. |
| 1587 | BL00107B | 13.31 | 9.100e−14 | 835-850 | BL00107 | Protein kinases ATP- |
| | | | | | | binding region |
| | | | | | | proteins. |
| 1587 | BL00239B | 25.15 | 2.849e−14 | 634-681 | BL00239 | Receptor tyrosine |
| | | | | | | kinase class II |
| | | | | | | proteins. |
| 1587 | BL00239C | 18.75 | 3.684e−13 | 755-777 | BL00239 | Receptor tyrosine |
| | | | | | | kinase class II |
| | | | | | | proteins. |
| 1587 | BL00239D | 16.81 | 4.356e−11 | 780-805 | BL00239 | Receptor tyrosine |
| | | | | | | kinase class II |
| | | | | | | proteins. |
| 1587 | BL00239E | 17.14 | 6.891e−32 | 807-856 | BL00239 | Receptor tyrosine |
| | | | | | | kinase class II |
| | | | | | | proteins. |
| 1587 | BL00239F | 28.15 | 1.632e−19 | 862-906 | BL00239 | Receptor tyrosine |
| | | | | | | kinase class II |
| | | | | | | proteins. |
| 1587 | BL00240A | 22.72 | 6.516e−20 | 21-49 | BL00240 | Receptor tyrosine |
| | | | | | | kinase class III |
| | | | | | | proteins. |
| 1587 | BL00240B | 24.70 | 9.500e−20 | 417-440 | BL00240 | Receptor tyrosine |
| | | | | | | kinase class III |
| | | | | | | proteins. |
| 1587 | BL00240C | 22.58 | 1.000e−40 | 574-622 | BL00240 | Receptor tyrosine |
| | | | | | | kinase class III |
| | | | | | | proteins. |
| 1587 | BL00240D | 23.07 | 1.000e−40 | 623-677 | BL00240 | Receptor tyrosine |
| | | | | | | kinase class III |
| | | | | | | proteins. |
| 1587 | BL00240E | 11.56 | 1.000e−40 | 754-791 | BL00240 | Receptor tyrosine |
| | | | | | | kinase class III |
| | | | | | | proteins. |
| 1587 | BL00240F | 17.74 | 1.000e−40 | 806-853 | BL00240 | Receptor tyrosine |
| | | | | | | kinase class III |
| | | | | | | proteins. |
| 1587 | BL00240G | 28.45 | 1.000e−40 | 854-906 | BL00240 | Receptor tyrosine |
| | | | | | | kinase class III |
| | | | | | | proteins. |
| 1587 | BL00790M | 8.74 | 5.747e−09 | 759-780 | BL00790 | Receptor tyrosine |
| | | | | | | kinase class V |
| | | | | | | proteins. |
| 1587 | BL00790N | 13.25 | 1.098e-11 | 781-807 | BL00790 | Receptor tyrosine |
| | | | | | | kinase class V |
| | | | | | | proteins. |
| 1587 | BL00790O | 7.68 | 3.302e-15 | 814-846 | BL00790 | Receptor tyrosine |
| | | | | | | kinase class V |
| | | | | | | proteins. |
| 1587 | BL00790Q | 15.61 | 3.536e-10 | 873-921 | BL00790 | Receptor tyrosine |
| | | | | | | kinase class V |
| | | | | | | proteins. |
| 1587 | BL50001B | 17.40 | 4.130e-10 | 765-785 | BL50001 | Src homology 2 (SH2) |
| | | | | | | domain proteins |
| | | | | | | profile. |
| 1587 | BL50001D | 11.00 | 4.750e−09 | 835-845 | BL50001 | Src homology 2 (SH2) |
| | | | | | | domain proteins |
| | | | | | | profile. |
| 1587 | PR00109A | 15.00 | 8.615e−15 | 663-676 | PR00109 | TYROSINE KINASE |
| | | | | | | CATALYTIC DOMAIN |
| | | | | | | SIGNATURE |
| 1587 | PR00109B | 12.27 | 5.500e−18 | 768-786 | PR00109 | TYROSINE KINASE |
| | | | | | | CATALYTIC DOMAIN |
| | | | | | | SIGNATURE |
| 1587 | PR00109C | 12.85 | 2.500e−14 | 817-827 | PR00109 | TYROSINE KINASE |
| | | | | | | CATALYTIC DOMAIN |
| | | | | | | SIGNATURE |
| 1587 | PR00109D | 17.04 | 7.158e−23 | 836-858 | PR00109 | TYROSINE KINASE |
| | | | | | | CATALYTIC DOMAIN |
| | | | | | | SIGNATURE |
| 1587 | PR00109E | 14.41 | 1.321e−16 | 881-903 | PR00109 | TYROSINE KINASE |
| | | | | | | CATALYTIC DOMAIN |
| | | | | | | SIGNATURE |
| 1590 | BL00442B | 14.98 | 5.765e−09 | 237-248 | BL00442 | Glutamine |
| | | | | | | amidotransferases |
| | | | | | | class-I proteins. |
| 1591 | BL00962A | 11.87 | 1.600e−10 | 13-25 | BL00962 | Ribosomal protein S2 |
| | | | | | | proteins. |
| 1591 | BL00962B | 36.15 | 4.600e−36 | 28-81 | BL00962 | Ribosomal protein S2 |
| | | | | | | proteins. |
| 1591 | BL00962C | 15.90 | 9.591e−17 | 94-111 | BL00962 | Ribosomal protein S2 |
| | | | | | | proteins. |
| 1591 | BL00962D | 22.51 | 5.500e−35 | 119-162 | BL00962 | Ribosomal protein S2 |
| | | | | | | proteins. |
| 1591 | PR00395A | 16.93 | 6.464e−15 | 15-33 | PR00395 | RIBOSOMAL PROTEIN S2 |
| | | | | | | SIGNATURE |
| 1591 | PR00395B | 10.55 | 1.771e−10 | 45-54 | PR00395 | RIBOSOMAL PROTEIN S2 |
| | | | | | | SIGNATURE |
| 1591 | PR00395C | 16.17 | 1.000e−17 | 94-111 | PR00395 | RIBOSOMAL PROTEIN S2 |
| | | | | | | SIGNATURE |
| 1591 | PR00395D | 13.04 | 7.000e−17 | 119-136 | PR00395 | RIBOSOMAL PROTEIN S2 |
| | | | | | | SIGNATURE |
| 1591 | PR00395E | 14.46 | 4.103e−11 | 136-147 | PR00395 | RIBOSOMAL PROTEIN S2 |
| | | | | | | SIGNATURE |
| 1591 | PR00395F | 10.56 | 6.400e−16 | 157-171 | PR00395 | RIBOSOMAL PROTEIN S2 |
| | | | | | | SIGNATURE |
| 1592 | BL00740B | 19.76 | 3.813e−09 | 690-710 | BL00740 | MAM domain proteins. |
| 1592 | PR00597A | 12.96 | 1.000e−25 | 375-396 | PR00597 | GELSOLIN FAMILY |
| | | | | | | SIGNATURE |
| 1592 | PR00597A | 12.96 | 4.575e−09 | 742-763 | PR00597 | GELSOLIN FAMILY |
| | | | | | | SIGNATURE |
| 1592 | PR00597B | 9.78 | 5.629e−09 | 85-101 | PR00597 | GELSOLIN FAMILY |
| | | | | | | SIGNATURE |
| 1592 | PR00597B | 9.78 | 7.000e−20 | 464-480 | PR00597 | GELSOLIN FAMILY |
| | | | | | | SIGNATURE |
| 1592 | PR00597C | 14.19 | 9.000e−23 | 489-507 | PR00597 | GELSOLIN FAMILY |
| | | | | | | SIGNATURE |
| 1592 | PR00597D | 12.77 | 4.522e−24 | 522-542 | PR00597 | GELSOLIN FAMILY |
| | | | | | | SIGNATURE |
| 1592 | PR00597D | 12.77 | 7.723e−09 | 144-164 | PR00597 | GELSOLIN FAMILY |
| | | | | | | SIGNATURE |
| 1592 | PR00597E | 13.46 | 4.130e−21 | 576-596 | PR00597 | GELSOLIN FAMILY |
| | | | | | | SIGNATURE |
| 1592 | PR00597F | 16.29 | 4.522e−21 | 634-653 | PR00597 | GELSOLIN FAMILY |
| | | | | | | SIGNATURE |
| 1592 | PR00597G | 8.55 | 1.429e−28 | 690-712 | PR00597 | GELSOLIN FAMILY |
| | | | | | | SIGNATURE |
| 1592 | PR00597H | 15.32 | 5.500e−22 | 719-738 | PR00597 | GELSOLIN FAMILY |
| | | | | | | SIGNATURE |
| 1595 | BL01019A | 13.20 | 3.629e−09 | 46-85 | BL01019 | ADP-ribosylation |
| | | | | | | factors family |
| | | | | | | proteins. |
| 1595 | BL01115A | 10.22 | 2.688e−14 | 12-55 | BL01115 | GTP-binding nuclear |
| | | | | | | protein ran proteins. |
| 1595 | PR00449A | 13.20 | 7.000e−20 | 12-33 | PR00449 | TRANSFORMING PROTEIN |
| | | | | | | P21 RAS SIGNATURE |
| 1595 | PR00449B | 14.34 | 7.500e−12 | 35-51 | PR00449 | TRANSFORMING PROTEIN |
| | | | | | | P21 RAS SIGNATURE |
| 1595 | PR00449C | 17.27 | 5.500e−24 | 53-75 | PR00449 | TRANSFORMING PROTEIN |
| | | | | | | P21 RAS SIGNATURE |
| 1595 | PR00449D | 10.79 | 5.500e−14 | 115-128 | PR00449 | TRANSFORMING PROTEIN |
| | | | | | | P21 RAS SIGNATURE |
| 1595 | PR00449E | 13.50 | 5.263e−17 | 150-172 | PR00449 | TRANSFORMING PROTEIN |
| | | | | | | P21 RAS SIGNATURE |
| 1596 | BL00578A | 14.24 | 2.800e−37 | 1-31 | BL00578 | Ribosomal protein S6e |
| | | | | | | proteins. |
| 1596 | BL00578B | 15.15 | 1.000e−40 | 39-89 | BL00578 | Ribosomal protein S6e |
| | | | | | | proteins. |
| 1596 | BL00578C | 9.53 | 1.000e−40 | 120-157 | BL00578 | Ribosomal protein S6e |
| | | | | | | proteins. |
| 1596 | BL00578D | 16.68 | 1.000e−40 | 164-213 | BL00578 | Ribosomal protein S6e |
| | | | | | | proteins. |
| 1597 | BL00472B | 14.67 | 8.448e−12 | 31-48 | BL00472 | Small cytokines |
| | | | | | | (intercrine/chemokine) |
| | | | | | | C-C subfamily signatur. |
| 1597 | PR00436D | 12.23 | 1.106e−10 | 72-95 | PR00436 | INTERLEUKIN-8 SIGNATURE |
| 1598 | DM00895E | 15.72 | 3.333e−11 | 527-551 | DM00895 | 7 kw REVERSE |
| | | | | | | TRANSCRIPTASE RNA |
| | | | | | | POLYMERASE. |
| 1598 | DM01354A | 11.77 | 4.462e−29 | 13-40 | DM01354 | kw TRANSCRIPTASE |
| | | | | | | REVERSE II ORF2. |
| 1598 | DM01354B | 14.71 | 9.280e−33 | 41-68 | DM01354 | kw TRANSCRIPTASE |
| | | | | | | REVERSE II ORF2. |
| 1598 | DM01354C | 8.79 | 5.680e−21 | 69-86 | DM01354 | kw TRANSCRIPTASE |
| | | | | | | REVERSE II ORF2. |
| 1598 | DM01354D | 10.59 | 4.960e−32 | 87-114 | DM01354 | kw TRANSCRIPTASE |
| | | | | | | REVERSE II ORF2. |
| 1598 | DM01354E | 18.69 | 3.025e−28 | 115-144 | DM01354 | kw TRANSCRIPTASE |
| | | | | | | REVERSE II ORF2. |
| 1598 | DM01354F | 14.56 | 7.943e−37 | 145-180 | DM01354 | kw TRANSCRIPTASE |
| | | | | | | REVERSE II ORF2. |
| 1598 | DM01354G | 11.57 | 9.500e−37 | 181-211 | DM01354 | kw TRANSCRIPTASE |
| | | | | | | REVERSE II ORF2. |
| 1598 | DM01354H | 18.00 | 8.071e−30 | 212-251 | DM01354 | kw TRANSCRIPTASE |
| | | | | | | REVERSE II ORF2. |
| 1598 | DM01354I | 15.55 | 2.800e−39 | 252-292 | DM01354 | kw TRANSCRIPTASE |
| | | | | | | REVERSE II ORF2. |
| 1598 | DM01354J | 15.12 | 8.541e−31 | 293-324 | DM01354 | kw TRANSCRIPTASE |
| | | | | | | REVERSE II ORF2. |
| 1598 | DM01354K | 9.35 | 1.200e−30 | 325-356 | DM01354 | kw TRANSCRIPTASE |
| | | | | | | REVERSE II ORF2. |
| 1598 | DM01354L | 11.73 | 4.000e−30 | 357-383 | DM01354 | kw TRANSCRIPTASE |
| | | | | | | REVERSE II ORF2. |
| 1598 | DM01354M | 12.50 | 4.960e−33 | 384-413 | DM01354 | kw TRANSCRIPTASE |
| | | | | | | REVERSE II ORF2. |
| 1598 | DM01354N | 13.17 | 1.000e−40 | 414-458 | DM01354 | kw TRANSCRIPTASE |
| | | | | | | REVERSE II ORF2. |
| 1598 | DM01354O | 8.73 | 1.000e−40 | 465-510 | DM01354 | kw TRANSCRIPTASE |
| | | | | | | REVERSE II ORF2. |
| 1598 | DM01354P | 9.18 | 3.308e−40 | 511-544 | DM01354 | kw TRANSCRIPTASE |
| | | | | | | REVERSE II ORF2. |
| 1598 | DM01354Q | 9.23 | 1.000e−40 | 545-599 | DM01354 | kw TRANSCRIPTASE |
| | | | | | | REVERSE II ORF2. |
| 1598 | DM01354R | 8.50 | 5.714e−31 | 600-629 | DM01354 | kw TRANSCRIPTASE |
| | | | | | | REVERSE II ORF2. |
| 1598 | DM01354S | 11.61 | 7.300e−26 | 630-650 | DM01354 | kw TRANSCRIPTASE |
| | | | | | | REVERSE II ORF2. |
| 1598 | DM01354T | 9.48 | 1.000e−40 | 651-693 | DM01354 | kw TRANSCRIPTASE |
| | | | | | | REVERSE II ORF2. |
| 1598 | DM01354U | 12.24 | 7.171e−21 | 740-759 | DM01354 | kw TRANSCRIPTASE |
| | | | | | | REVERSE II ORF2. |
| 1598 | DM01354V | 12.97 | 1.000e−40 | 760-806 | DM01354 | kw TRANSCRIPTASE |
| | | | | | | REVERSE II ORF2. |
| 1598 | DM01354W | 12.64 | 6.760e−23 | 807-826 | DM01354 | kw TRANSCRIPTASE |
| | | | | | | REVERSE II ORF2. |
| 1598 | DM01354X | 13.86 | 1.000e−40 | 827-865 | DM01354 | kw TRANSCRIPTASE |
| | | | | | | REVERSE II ORF2. |
| 1598 | DM01354Y | 10.69 | 1.000e−40 | 876-915 | DM01354 | kw TRANSCRIPTASE |
| | | | | | | REVERSE II ORF2. |
| 1598 | DM01354Z | 9.06 | 1.000e−40 | 1190-1238 | DM01354 | kw TRANSCRIPTASE |
| | | | | | | REVERSE II ORF2. |
| 1600 | BL00322A | 9.23 | 1.000e−40 | 32-83 | BL00322 | Histone H3 proteins. |
| 1600 | BL00322B | 13.68 | 1.000e−40 | 85-137 | BL00322 | Histone H3 proteins. |
| 1600 | PR00622A | 6.52 | 1.391e−19 | 5-19 | PR00622 | HISTONE H3 SIGNATURE |
| 1600 | PR00622B | 6.92 | 1.409e−19 | 19-33 | PR00622 | HISTONE H3 SIGNATURE |
| 1600 | PR00622C | 8.83 | 1.391e−28 | 36-57 | PR00622 | HISTONE H3 SIGNATURE |
| 1600 | PR00622D | 12.71 | 1.273e−22 | 60-77 | PR00622 | HISTONE H3 SIGNATURE |
| 1600 | PR00622E | 15.81 | 1.281e−21 | 82-100 | PR00622 | HISTONE H3 SIGNATURE |
| 1600 | PR00622F | 19.51 | 1.265e−22 | 100-116 | PR00622 | HISTONE H3 SIGNATURE |
| 1600 | PR00622G | 13.24 | 1.300e−28 | 116-137 | PR00622 | HISTONE H3 SIGNATURE |
| 1601 | BL00065A | 31.92 | 4.682e−27 | 115-156 | BL00065 | D-isomer specific 2- |
| | | | | | | hydroxyacid |
| | | | | | | dehydrogenases NAD- |
| | | | | | | binding si. |
| 1601 | BL00065B | 16.97 | 7.652e−19 | 179-203 | BL00065 | D-isomer specific 2- |
| | | | | | | hydroxyacid |
| | | | | | | dehydrogenases NAD- |
| | | | | | | binding si. |
| 1601 | BL00065C | 27.25 | 6.000e−37 | 253-303 | BL00065 | D-isomer specific 2- |
| | | | | | | hydroxyacid |
| | | | | | | dehydrogenases NAD- |
| | | | | | | binding si. |
| 1601 | BL00071A | 5.81 | 8.258e−09 | 184-195 | BL00071 | Glyceraldehyde 3- |
| | | | | | | phosphate dehydrogenase |
| | | | | | | proteins. |
| 1603 | BL00388A | 23.14 | 5.500e−39 | 8-53 | BL00388 | Proteasome A-type |
| | | | | | | subunits proteins. |
| 1603 | BL00388B | 31.38 | 7.207e−27 | 66-107 | BL00388 | Proteasome A-type |
| | | | | | | subunits proteins. |
| 1603 | BL00388C | 18.79 | 4.706e−16 | 121-142 | BL00388 | Proteasome A-type |
| | | | | | | subunits proteins. |
| 1603 | BL00388D | 20.71 | 6.897e−23 | 149-179 | 8L00388 | Proteasome A-type |
| | | | | | | subunits proteins. |
| 1603 | PF00227 | 14.68 | 6.294e−10 | 15-26 | PF00227 | Proteasome A-type and |
| | | | | | | B-type. |
| 1604 | BL00053A | 8.83 | 5.320e−12 | 5-17 | BL00053 | Ribosomal protein S8 |
| | | | | | | proteins. |
| 1604 | BL00053B | 14.56 | 4.789e−14 | 58-75 | BL00053 | Ribosomal protein S8 |
| | | | | | | proteins. |
| 1604 | BL00053C | 16.71 | 5.500e−26 | 98-130 | BL00053 | Ribosomal protein S8 |
| | | | | | | proteins. |
| 1607 | BL01170A | 12.34 | 9.143e−40 | 139-174 | BL01170 | Ribosomal protein L6e |
| | | | | | | proteins. |
| 1607 | BL01170B | 19.54 | 5.821e−37 | 251-288 | BL01170 | Ribosomal protein L6e |
| | | | | | | proteins. |
| 1607 | PD01457A | 16.51 | 9.845e−09 | 67-111 | PD01457 | RIBOSOMAL PROTEIN 40S |
| | | | | | | ZINC-FINGER METAL. |
| 1608 | BL50040A | 12.98 | 1.450e−14 | 4-15 | BL50040 | Elongation factor 1 |
| | | | | | | gamma chain profile. |
| 1608 | BL50040B | 13.65 | 7.000e−30 | 53-78 | BL50040 | Elongation factor 1 |
| | | | | | | gamma chain profile. |
| 1608 | BL50040C | 22.62 | 3.739e−38 | 135-177 | BL50040 | Elongation factor 1 |
| | | | | | | gamma chain profile. |
| 1608 | BL50040D | 17.41 | 1.000e−40 | 273-322 | BL50040 | Elongation factor 1 |
| | | | | | | gamma chain profile. |
| 1608 | BL50040E | 18.79 | 1.000e−40 | 327-381 | BL50040 | Elongation factor 1 |
| | | | | | | gamma chain profile. |
| 1608 | BL50040F | 18.99 | 5.320e−40 | 384-421 | BL50040 | Elongation factor 1 |
| | | | | | | gamma chain profile. |
| 1608 | BL50040G | 8.15 | 1.900e−13 | 427-437 | BL50040 | Elongation factor 1 |
| | | | | | | gamma chain profile. |
| 1608 | DM01181C | 17.27 | 6.055e−12 | 125-162 | DM01181 | 7 kw 103-1A |
| | | | | | | LACTOYLGLUTATHIONE |
| | | | | | | GLUTATHIONE LYASE. |
| 1608 | PF00043 | 21.83 | 9.735e−11 | 57-86 | PF00043 | Glutathione S- |
| | | | | | | transferases. |
| 1609 | BL01052A | 16.12 | 2.875e−35 | 3-34 | BL01052 | Calponin family repeat |
| | | | | | | proteins. |
| 1609 | BL01052B | 15.31 | 5.219e−26 | 52-77 | BL01052 | Calponin family repeat |
| | | | | | | proteins. |
| 1609 | BL01052C | 18.51 | 1.000e−40 | 88-127 | BL01052 | Calponin family repeat |
| | | | | | | proteins. |
| 1609 | BL01052D | 10.26 | 4.462e−24 | 175-194 | BL01052 | Calponin family repeat |
| | | | | | | proteins. |
| 1609 | PR00888A | 11.87 | 7.750e−18 | 3-17 | PR00888 | SMOOTH MUSCLE |
| | | | | | | PROTEIN/CALPONIN FAMILY |
| | | | | | | SIGNATURE |
| 1609 | PR00888B | 13.72 | 1.321e−14 | 22-35 | PR00888 | SMOOTH MUSCLE |
| | | | | | | PROTEIN/CALPONIN FAMILY |
| | | | | | | SIGNATURE |
| 1609 | PR00888C | 12.27 | 2.286e−17 | 52-67 | PR00888 | SMOOTH MUSCLE |
| | | | | | | PROTEIN/CALPONIN FAMILY |
| | | | | | | SIGNATURE |
| 1609 | PR00888D | 16.09 | 9.550e−19 | 89-105 | PR00888 | SMOOTH MUSCLE |
| | | | | | | PROTEIN/CALPONIN FAMILY |
| | | | | | | SIGNATURE |
| 1609 | PR00888E | 11.81 | 2.800e−18 | 105-120 | PR00888 | SMOOTH MUSCLE |
| | | | | | | PROTEIN/CALPONIN FAMILY |
| | | | | | | SIGNATURE |
| 1609 | PR00888F | 7.44 | 4.600e−18 | 126-140 | PR00888 | SMOOTH MUSCLE |
| | | | | | | PROTEIN/CALPONIN FAMILY |
| | | | | | | SIGNATURE |
| 1609 | PR00888G | 12.73 | 9.438e−15 | 163-176 | PR00888 | SMOOTH MUSCLE |
| | | | | | | PROTEIN/CALPONIN FAMILY |
| | | | | | | SIGNATURE |
| 1609 | PR00888H | 9.97 | 8.269e−20 | 176-191 | PR00888 | SMOOTH MUSCLE |
| | | | | | | PROTEIN/CALPONIN FAMILY |
| | | | | | | SIGNATURE |
| 1609 | PR00889E | 12.18 | 7.300e−11 | 172-187 | PR00889 | CALPONIN SIGNATURE |
| 1609 | PR00890A | 8.61 | 1.000e−26 | 34-53 | PR00890 | SMOOTH MUSCLE PROTEIN |
| | | | | | | 22-ALPHA (TRANSGELIN) |
| | | | | | | SIGNATURE |
| 1609 | PR00890B | 8.75 | 6.318e−19 | 62-77 | PR00890 | SMOOTH MUSCLE PROTEIN |
| | | | | | | 22-ALPHA (TRANSGELIN) |
| | | | | | | SIGNATURE |
| 1609 | PR00890C | 8.22 | 1.600e−19 | 85-98 | PR00890 | SMOOTH MUSCLE PROTEIN |
| | | | | | | 22-ALPHA (TRANSGELIN) |
| | | | | | | SIGNATURE |
| 1609 | PR00890D | 16.17 | 1.130e−13 | 119-128 | PR00890 | SMOOTH MUSCLE PROTEIN |
| | | | | | | 22-ALPHA (TRANSGELIN) |
| | | | | | | SIGNATURE |
| 1609 | PR00890E | 14.34 | 1.429e−27 | 136-155 | PR00890 | SMOOTH MUSCLE PROTEIN |
| | | | | | | 22-ALPHA (TRANSGELIN) |
| | | | | | | SIGNATURE |
| 1609 | PR00890F | 12.92 | 1.643e−17 | 162-174 | PR00890 | SMOOTH MUSCLE PROTEIN |
| | | | | | | 22-ALPHA (TRANSGELIN) |
| | | | | | | SIGNATURE |
| 1612 | PR00194A | 7.86 | 7.652e−09 | 180-197 | PR00194 | TROPOMYOSIN SIGNATURE |
| 1614 | DM00934A | 20.07 | 8.663e−11 | 7-54 | DM00934 | kw DIHYDROFLAVONOL |
| | | | | | | YOL151W YDR541C |
| | | | | | | YGL157W. |
| 1616 | BL00605 | 27.67 | 1.000e−40 | 74-127 | BL00605 | ATP synthase c subunit |
| | | | | | | proteins. |
| 1616 | PR00124A | 8.81 | 2.125e−17 | 70-89 | PR00124 | ATP SYNTHASE C SUBUNIT |
| | | | | | | SIGNATURE |
| 1616 | PR00124A | 8.81 | 8.603e−09 | 72-91 | PR00124 | ATP SYNTHASE C SUBUNIT |
| | | | | | | SIGNATURE |
| 1616 | PR00124B | 14.66 | 1.000e−15 | 91-106 | PR00124 | ATP SYNTHASE C SUBUNIT |
| | | | | | | SIGNATURE |
| 1616 | PR00124C | 12.42 | 3.250e−27 | 108-133 | PR00124 | ATP SYNTHASE C SUBUNIT |
| | | | | | | SIGNATURE |
| 1618 | BL00310E | 19.92 | 8.875e−12 | 257-281 | BL00310 | Lysosome-associated |
| | | | | | | membrane glycoproteins |
| | | | | | | duplicated domain |
| | | | | | | proteins. |
| 1618 | BL00310F | 23.26 | 3.377e−10 | 291-345 | BL00310 | Lysosome-associated |
| | | | | | | membrane glycoproteins |
| | | | | | | duplicated domain |
| | | | | | | proteins. |
| 1618 | PR00336A | 12.86 | 6.455e−24 | 158-182 | PR00336 | LYSOSOME-ASSOCIATED |
| | | | | | | MEMBRANE GLYCOPROTEIN |
| | | | | | | SIGNATURE |
| 1618 | PR00336B | 15.42 | 9.027e−13 | 269-283 | PR00336 | LYSOSOME-ASSOCIATED |
| | | | | | | MEMBRANE GLYCOPROTEIN |
| | | | | | | SIGNATURE |
| 1618 | PR00336C | 14.47 | 9.438e−11 | 306-318 | PR00336 | LYSOSOME-ASSOCIATED |
| | | | | | | MEMBRANE GLYCOPROTEIN |
| | | | | | | SIGNATURE |
| 1618 | PR00336D | 9.96 | 5.705e−19 | 319-341 | PR00336 | LYSOSOME-ASSOCIATED |
| | | | | | | MEMBRANE GLYCOPROTEIN |
| | | | | | | SIGNATURE |
| 1618 | PR00336E | 11.59 | 1.711e−12 | 341-353 | PR00336 | LYSOSOME-ASSOCIATED |
| | | | | | | MEMBRANE GLYCOPROTEIN |
| | | | | | | SIGNATURE |
| 1619 | BL00280 | 24.61 | 5.091e−38 | 317-360 | BL00280 | Pancreatic trypsin |
| | | | | | | inhibitor (Kunitz) |
| | | | | | | family proteins. |
| 1619 | BL00319A | 17.62 | 1.000e−40 | 77-125 | BL00319 | Amyloidogenic |
| | | | | | | glycoprotein |
| | | | | | | extracellular domain |
| | | | | | | proteins. |
| 1619 | BL00319B | 17.02 | 2.440e−29 | 173-198 | BL00319 | Amyloidogenic |
| | | | | | | glycoprotein |
| | | | | | | extracellular domain |
| | | | | | | proteins. |
| 1619 | BL00319C | 17.12 | 6.143e−30 | 265-298 | BL00319 | Amyloidogenic |
| | | | | | | glycoprotein |
| | | | | | | extracellular domain |
| | | | | | | proteins. |
| 1619 | BL00319D | 21.29 | 1.000e−40 | 365-414 | BL00319 | Amyloidogenic |
| | | | | | | glycoprotein |
| | | | | | | extracellular domain |
| | | | | | | proteins. |
| 1619 | BL00319E | 12.66 | 1.000e−40 | 438-479 | BL00319 | Amyloidogenic |
| | | | | | | glycoprotein |
| | | | | | | extracellular domain |
| | | | | | | proteins. |
| 1619 | BL00319F | 13.95 | 1.000e−40 | 480-522 | BL00319 | Amyloidogenic |
| | | | | | | glycoprotein |
| | | | | | | extracellular domain |
| | | | | | | proteins. |
| 1619 | BL00319G | 16.93 | 1.000e−40 | 717-762 | BL00319 | Amyloidogenic |
| | | | | | | glycoprotein |
| | | | | | | extracellular domain |
| | | | | | | proteins. |
| 1619 | PR00203A | 13.98 | 3.829e−21 | 193-211 | PR00203 | AMYLOID A4 PROTEIN |
| | | | | | | PRECURSOR SIGNATURE |
| 1619 | PR00203B | 11.38 | 8.500e−28 | 381-404 | PR00203 | AMYLOID A4 PROTEIN |
| | | | | | | PRECURSOR SIGNATURE |
| 1619 | PR00203C | 6.37 | 4.667e−27 | 692-717 | PR00203 | AMYLOID A4 PROTEIN |
| | | | | | | PRECURSOR SIGNATURE |
| 1619 | PR00203D | 13.57 | 2.895e−30 | 738-760 | PR00203 | AMYLOID A4 PROTEIN |
| | | | | | | PRECURSOR SIGNATURE |
| 1619 | PR00759A | 14.51 | 2.440e−10 | 307-321 | PR00759 | BASIC PROTEASE (KUNITZ- |
| | | | | | | TYPE) INHIBITOR FAMILY |
| | | | | | | SIGNATURE |
| 1619 | PR00759B | 11.26 | 7.000e−13 | 335-345 | PR00759 | BASIC PROTEASE (KUNITZ- |
| | | | | | | TYPE) INHIBITOR FAMILY |
| | | | | | | SIGNATURE |
| 1619 | PR00759C | 14.15 | 1.000e−14 | 345-360 | PR00759 | BASIC PROTEASE (KUNITZ- |
| | | | | | | TYPE) INHIBITOR FAMILY |
| | | | | | | SIGNATURE |
| 1620 | BL00634 | 34.38 | 1.333e−37 | 93-143 | BL00634 | Ribosomal protein L30 |
| | | | | | | proteins. |
| 1622 | BL00107A | 18.39 | 9.400e−22 | 1012-1042 | BL00107 | Protein kinases ATP- |
| | | | | | | binding region |
| | | | | | | proteins. |
| 1622 | BL00107B | 13.31 | 7.300e−14 | 1079-1094 | BL00107 | Protein kinases ATP- |
| | | | | | | binding region |
| | | | | | | proteins. |
| 1622 | BL00239C | 18.75 | 1.913e−10 | 999-1021 | BL00239 | Receptor tyrosine |
| | | | | | | kinase class II |
| | | | | | | proteins. |
| 1622 | BL00239D | 16.81 | 9.043e−14 | 1024-1049 | BL00239 | Receptor tyrosine |
| | | | | | | kinase class II |
| | | | | | | proteins. |
| 1622 | BL00239E | 17.14 | 4.436e−32 | 1051-1100 | BL00239 | Receptor tyrosine |
| | | | | | | kinase class II |
| | | | | | | proteins. |
| 1622 | BL00239F | 28.15 | 2.770e−17 | 1106-1150 | BL00239 | Receptor tyrosine |
| | | | | | | kinase class II |
| | | | | | | proteins. |
| 1622 | BL00240A | 22.72 | 7.500e−18 | 32-60 | BL00240 | Receptor tyrosine |
| | | | | | | kinase class III |
| | | | | | | proteins. |
| 1622 | BL00240B | 24.70 | 5.333e−15 | 575-598 | BL00240 | Receptor tyrosine |
| | | | | | | kinase class III |
| | | | | | | proteins. |
| 1622 | BL00240B | 24.70 | 5.404e−09 | 452-475 | BL00240 | Receptor tyrosine |
| | | | | | | kinase class III |
| | | | | | | proteins. |
| 1622 | BL00240B | 24.70 | 6.651e−10 | 680-703 | BL00240 | Receptor tyrosine |
| | | | | | | kinase class III |
| | | | | | | proteins. |
| 1622 | BL00240C | 22.58 | 1.000e−40 | 819-867 | BL00240 | Receptor tyrosine |
| | | | | | | kinase class III |
| | | | | | | proteins. |
| 1622 | BL00240D | 23.07 | 1.000e−40 | 868-922 | BL00240 | Receptor tyrosine |
| | | | | | | kinase class III |
| | | | | | | proteins. |
| 1622 | BL00240E | 11.56 | 3.182e−40 | 998-1035 | BL00240 | Receptor tyrosine |
| | | | | | | kinase class III |
| | | | | | | proteins. |
| 1622 | BL00240F | 17.74 | 1.000e−40 | 1050-1097 | BL00240 | Receptor tyrosine |
| | | | | | | kinase class III |
| | | | | | | proteins. |
| 1622 | BL00240G | 28.45 | 1.000e−40 | 1098-1150 | BL00240 | Receptor tyrosine |
| | | | | | | kinase class III |
| | | | | | | proteins. |
| 1622 | BL00790M | 8.74 | 1.692e−09 | 1003-1024 | BL00790 | Receptor tyrosine |
| | | | | | | kinase class V |
| | | | | | | proteins. |
| 1622 | BL00790N | 13.25 | 6.929e−13 | 1025-1051 | BL00790 | Receptor tyrosine |
| | | | | | | kinase class V |
| | | | | | | proteins. |
| 1622 | BL00790O | 7.68 | 4.539e−14 | 1058-1090 | BL00790 | Receptor tyrosine |
| | | | | | | kinase class V |
| | | | | | | proteins. |
| 1622 | BL00790Q | 15.61 | 8.533e−15 | 1117-1165 | BL00790 | Receptor tyrosine |
| | | | | | | kinase class V |
| | | | | | | proteins. |
| 1622 | BL50001B | 17.40 | 1.000e−12 | 1009-1029 | BL50001 | Src homology 2 (SH2) |
| | | | | | | domain proteins |
| | | | | | | profile. |
| 1622 | BL50001D | 11.00 | 9.100e−10 | 1079-1089 | BL50001 | Src homology 2 (SH2) |
| | | | | | | domain proteins |
| | | | | | | profile. |
| 1622 | DM00179 | 13.97 | 8.826e−09 | 304-313 | DM00179 | w KINASE ALPHA ADHESION |
| | | | | | | T-CELL. |
| 1622 | PD02870B | 18.83 | 9.521e−09 | 621-653 | PD02870 | RECEPTOR INTERLEUKIN-1 |
| | | | | | | PRECURSOR. |
| 1622 | PD02870B | 18.83 | 9.617e−09 | 716-748 | PD02870 | RECEPTOR INTERLEUKIN-1 |
| | | | | | | PRECURSOR. |
| 1622 | PD02870D | 15.74 | 1.200e−10 | 621-655 | PD02870 | RECEPTOR INTERLEUKIN-1 |
| | | | | | | PRECURSOR. |
| 1622 | PD02870D | 15.74 | 5.117e−09 | 390-424 | PD02870 | RECEPTOR INTERLEUKIN-1 |
| | | | | | | PRECURSOR. |
| 1622 | PR00109A | 15.00 | 4.808e−11 | 909-922 | PR00109 | TYROSINE KINASE |
| | | | | | | CATALYTIC DOMAIN |
| | | | | | | SIGNATURE |
| 1622 | PR00109B | 12.27 | 5.714e−19 | 1012-1030 | PR00109 | TYROSINE KINASE |
| | | | | | | CATALYTIC DOMAIN |
| | | | | | | SIGNATURE |
| 1622 | PR00109C | 12.85 | 3.118e−12 | 1061-1071 | PR00109 | TYROSINE KINASE |
| | | | | | | CATALYTIC DOMAIN |
| | | | | | | SIGNATURE |
| 1622 | PR00109D | 17.04 | 2.286e−25 | 1080-1102 | PR00109 | TYROSINE KINASE |
| | | | | | | CATALYTIC DOMAIN |
| | | | | | | SIGNATURE |
| 1622 | PR00109E | 14.41 | 7.857e−19 | 1125-1147 | PR00109 | TYROSINE KINASE |
| | | | | | | CATALYTIC DOMAIN |
| | | | | | | SIGNATURE |
| 1622 | PR00573D | 15.57 | 1.000e−09 | 1284-1299 | PR00573 | INTERLEUKIN 8B RECEPTOR |
| | | | | | | SIGNATURE |
| 1623 | DM01354Z | 9.06 | 5.747e−14 | 1-49 | DM01354 | kw TRANSCRIPTASE |
| | | | | | | REVERSE II ORF2. |
| 1624 | BL00262A | 12.48 | 8.200e−09 | 523-540 | BL00262 | Insulin family |
| | | | | | | proteins. |
| 1624 | BL01282B | 30.49 | 5.243e−09 | 517-555 | BL01282 | BIR repeat proteins. |
| 1625 | BL00779A | 14.01 | 4.667e−27 | 31-57 | BL00779 | Glycoprotein hormones |
| | | | | | | alpha chain proteins. |
| 1625 | BL00779B | 6.45 | 1.429e−20 | 58-73 | BL00779 | Glycoprotein hormones |
| | | | | | | alpha chain proteins. |
| 1625 | BL00779C | 14.39 | 1.333e−37 | 82-115 | BL00779 | Glycoprotein hormones |
| | | | | | | alpha chain proteins. |
| 1625 | PR00274A | 9.96 | 2.500e−15 | 30-44 | PR00274 | GLYCOPROTEIN HORMONE |
| | | | | | | ALPHA CHAIN SIGNATURE |
| 1625 | PR00274B | 9.15 | 8.091e−26 | 50-69 | PR00274 | GLYCOPROTEIN HORMONE |
| | | | | | | ALPHA CHAIN SIGNATURE |
| 1625 | PR00274C | 13.49 | 5.959e−22 | 70-87 | PR00274 | GLYCOPROTEIN HORMONE |
| | | | | | | ALPHA CHAIN SIGNATURE |
| 1625 | PR00274D | 9.71 | 1.900e−23 | 99-115 | PR00274 | GLYCOPROTEIN HORMONE |
| | | | | | | ALPHA CHAIN SIGNATURE |
| 1626 | BL01019A | 13.20 | 7.353e−10 | 203-242 | BL01019 | ADP-ribosylation |
| | | | | | | factors family |
| | | | | | | proteins. |
| 1626 | PR00318A | 7.84 | 4.000e−18 | 42-57 | PR00318 | ALPHA G-PROTEIN |
| | | | | | | (TRANSDUCIN) SIGNATURE |
| 1626 | PR00318B | 14.79 | 4.429e−22 | 190-212 | PR00318 | ALPHA G-PROTEIN |
| | | | | | | (TRANSDUCIN) SIGNATURE |
| 1626 | PR00318C | 12.09 | 9.526e−22 | 219-236 | PR00318 | ALPHA G-PROTEIN |
| | | | | | | (TRANSDUCIN) SIGNATURE |
| 1626 | PR00318D | 16.28 | 3.625e−26 | 241-269 | PR00318 | ALPHA G-PROTEIN |
| | | | | | | (TRANSDUCIN) SIGNATURE |
| 1626 | PR00318E | 7.23 | 2.875e−11 | 287-296 | PR00318 | ALPHA G-PROTEIN |
| | | | | | | (TRANSDUCIN) SIGNATURE |
| 1626 | PR00440A | 9.18 | 9.416e−14 | 42-57 | PR00440 | G-PROTEIN ALPHA SUBUNIT |
| | | | | | | GROUP 12 SIGNATURE |
| 1626 | PR00440B | 13.27 | 7.078e−13 | 190-212 | PR00440 | G-PROTEIN ALPHA SUBUNIT |
| | | | | | | GROUP 12 SIGNATURE |
| 1626 | PR00440C | 9.54 | 7.197e−15 | 219-236 | PR00440 | G-PROTEIN ALPHA SUBUNIT |
| | | | | | | GROUP 12 SIGNATURE |
| 1626 | PR00440D | 8.15 | 5.081e−16 | 241-269 | PR00440 | G-PROTEIN ALPHA SUBUNIT |
| | | | | | | GROUP 12 SIGNATURE |
| 1626 | PR00440E | 11.16 | 3.160e−10 | 288-296 | PR00440 | G-PROTEIN ALPHA SUBUNIT |
| | | | | | | GROUP 12 SIGNATURE |
| 1626 | PR00441A | 10.69 | 5.725e−17 | 42-57 | PR00441 | G-PROTEIN ALPHA SUBUNIT |
| | | | | | | GROUP I SIGNATURE |
| 1626 | PR00441B | 16.16 | 7.709e−18 | 190-212 | PR00441 | G-PROTEIN ALPHA SUBUNIT |
| | | | | | | GROUP I SIGNATURE |
| 1626 | PR00441C | 14.17 | 5.245e−16 | 219-236 | PR00441 | G-PROTEIN ALPHA SUBUNIT |
| | | | | | | GROUP I SIGNATURE |
| 1626 | PR00441D | 14.44 | 9.847e−20 | 241-269 | PR00441 | G-PROTEIN ALPHA SUBUNIT |
| | | | | | | GROUP I SIGNATURE |
| 1626 | PR00441E | 8.35 | 8.377e−10 | 288-296 | PR00441 | G-PROTEIN ALPHA SUBUNIT |
| | | | | | | GROUP I SIGNATURE |
| 1626 | PR00442A | 6.46 | 6.865e−13 | 42-57 | PR00442 | G-PROTEIN ALPHA SUBUNIT |
| | | | | | | GROUP Q SIGNATURE |
| 1626 | PR00442B | 7.17 | 5.390e−13 | 190-213 | PR00442 | G-PROTEIN ALPHA SUBUNIT |
| | | | | | | GROUP Q SIGNATURE |
| 1626 | PR00442C | 17.61 | 5.985e−16 | 219-236 | PR00442 | G-PROTEIN ALPHA SUBUNIT |
| | | | | | | GROUP Q SIGNATURE |
| 1626 | PR00442D | 9.29 | 9.679e−13 | 241-269 | PR00442 | G-PROTEIN ALPHA SUBUNIT |
| | | | | | | GROUP Q SIGNATURE |
| 1626 | PR00442E | 7.23 | 1.273e−10 | 288-296 | PR00442 | G-PROTEIN ALPHA SUBUNIT |
| | | | | | | GROUP Q SIGNATURE |
| 1626 | PR00443A | 15.16 | 1.097e−19 | 42-57 | PR00443 | G-PROTEIN ALPHA SUBUNIT |
| | | | | | | GROUP S SIGNATURE |
| 1626 | PR00443B | 9.25 | 3.000e−29 | 94-117 | PR00443 | G-PROTEIN ALPHA SUBUNIT |
| | | | | | | GROUP S SIGNATURE |
| 1626 | PR00443C | 14.35 | 1.346e−29 | 190-212 | PR00443 | G-PROTEIN ALPHA SUBUNIT |
| | | | | | | GROUP S SIGNATURE |
| 1626 | PR00443D | 13.15 | 1.205e−25 | 219-236 | PR00443 | G-PROTEIN ALPHA SUBUNIT |
| | | | | | | GROUP S SIGNATURE |
| 1626 | PR00443E | 11.98 | 2.421e−36 | 241-269 | PR00443 | G-PROTEIN ALPHA SUBUNIT |
| | | | | | | GROUP S SIGNATURE |
| 1626 | PR00443F | 12.68 | 1.092e−11 | 288-296 | PR00443 | G-PROTEIN ALPHA SUBUNIT |
| | | | | | | GROUP S SIGNATURE |
| 1626 | PR00443G | 7.19 | 1.750e−29 | 334-356 | PR00443 | G-PROTEIN ALPHA SUBUNIT |
| | | | | | | GROUP S SIGNATURE |
| 1627 | BL00030A | 14.39 | 1.000e−12 | 16-34 | BL00030 | Eukaryotic RNA-binding |
| | | | | | | region RNP-1 proteins. |
| 1627 | BL00030A | 14.39 | 1.500e−10 | 107-125 | BL00030 | Eukaryotic RNA-binding |
| | | | | | | region RNP-1 proteins. |
| 1627 | BL00030B | 7.03 | 1.900e−11 | 146-155 | BL00030 | Eukaryotic RNA-binding |
| | | | | | | region RNP-1 proteins. |
| 1628 | BL00353C | 14.83 | 4.814e−09 | 1-47 | BL00353 | HMG1/2 proteins. |
| 1628 | PR00901L | 11.74 | 5.348e−09 | 77-90 | PR00901 | PHEROMONE B ALPHA-1 |
| | | | | | | RECEPTOR SIGNATURE |
| 1629 | BL01082 | 20.37 | 7.750e−40 | 152-191 | BL01082 | Ribosomal protein L7Ae |
| | | | | | | proteins. |
| 1629 | PR00881A | 9.94 | 7.517e−13 | 136-150 | PR00881 | RIBOSOMAL PROTEIN |
| | | | | | | L7A/RS6 FAMILY |
| | | | | | | SIGNATURE |
| 1629 | PR00881B | 9.01 | 4.000e−17 | 155-168 | PR00881 | RIBOSOMAL PROTEIN |
| | | | | | | L7A/RS6 FAMILY |
| | | | | | | SIGNATURE |
| 1629 | PR00881C | 12.76 | 1.000e−13 | 171-181 | PR00881 | RIBOSOMAL PROTEIN |
| | | | | | | L7A/RS6 FAMILY |
| | | | | | | SIGNATURE |
| 1629 | PR00881D | 11.60 | 8.500e−16 | 181-195 | PR00881 | RIBOSOMAL PROTEIN |
| | | | | | | L7A/RS6 FAMILY |
| | | | | | | SIGNATURE |
| 1629 | PR00882A | 8.80 | 3.160e−22 | 36-53 | PR00882 | RIBOSOMAL PROTEIN L7A |
| | | | | | | FAMILY SIGNATURE |
| 1629 | PR00882B | 9.47 | 1.000e−22 | 53-70 | PR00882 | RIBOSOMAL PROTEIN L7A |
| | | | | | | FAMILY SIGNATURE |
| 1629 | PR00882C | 15.18 | 2.969e−23 | 73-92 | PR00882 | RIBOSOMAL PROTEIN L7A |
| | | | | | | FAMILY SIGNATURE |
| 1629 | PR00882D | 14.85 | 6.500e−17 | 97-110 | PR00882 | RIBOSOMAL PROTEIN L7A |
| | | | | | | FAMILY SIGNATURE |
| 1629 | PR00882E | 14.99 | 2.216e−21 | 132-152 | PR00882 | RIBOSOMAL PROTEIN L7A |
| | | | | | | FAMILY SIGNATURE |
| 1629 | PR00882F | 13.81 | 4.273e−26 | 193-217 | PR00882 | RIBOSOMAL PROTEIN L7A |
| | | | | | | FAMILY SIGNATURE |
| 1629 | PR00882G | 10.27 | 8.500e−25 | 225-245 | PR00882 | RIBOSOMAL PROTEIN L7A |
| | | | | | | FAMILY SIGNATURE |
| 1629 | PR00884C | 7.05 | 7.409e−10 | 154-165 | PR00884 | RIBOSOMAL PROTEIN HS6 |
| | | | | | | SIGNATURE |
| 1630 | BL00529A | 22.06 | 1.000e−40 | 5-49 | BL00529 | Ribosomal protein S24e |
| | | | | | | proteins. |
| 1630 | BL00529B | 20.08 | 1.000e−40 | 55-99 | BL00529 | Ribosomal protein S24e |
| | | | | | | proteins. |
| 1631 | BL00612A | 12.09 | 7.171e−09 | 3-18 | BL00612 | Osteonectin domain |
| | | | | | | proteins. |
| 1631 | PD01469 | 20.59 | 1.346e−29 | 357-388 | PD01469 | GLYCOPROTEIN PROTEIN |
| | | | | | | PRECURSOR SA. |
| 1631 | PD01469 | 20.59 | 7.176e−19 | 451-482 | PD01469 | GLYCOPROTEIN PROTEIN |
| | | | | | | PRECURSOR SA. |
| 1632 | BL00326A | 14.01 | 6.651e−09 | 162-195 | BL00326 | Tropomyosins proteins. |
| 1632 | BL00326A | 14.01 | 9.308e−37 | 1-34 | BL00326 | Tropomyosins proteins. |
| 1632 | BL00326B | 7.68 | 1.000e−40 | 81-129 | BL00326 | Tropomyosins proteins. |
| 1632 | BL00326B | 7.68 | 3.838e−10 | 39-87 | BL00326 | Tropomyosins proteins. |
| 1632 | BL00326C | 9.99 | 1.000e−40 | 137-190 | BL00326 | Tropomyosins proteins. |
| 1632 | BL00326C | 9.99 | 2.116e−09 | 95-148 | BL00326 | Tropomyosins proteins. |
| 1632 | BL00326C | 9.99 | 3.306e−09 | 193-246 | BL00326 | Tropomyosins proteins. |
| 1632 | BL00326D | 8.76 | 1.000e−40 | 220-260 | BL00326 | Tropomyosins proteins. |
| 1632 | BL00326D | 8.76 | 7.511e−12 | 59-99 | BL00326 | Tropomyosins proteins. |
| 1632 | PR00194A | 7.86 | 4.857e−21 | 84-101 | PR00194 | TROPOMYOSIN SIGNATURE |
| 1632 | PR00194B | 10.24 | 6.143e−26 | 120-140 | PR00194 | TROPOMYOSIN SIGNATURE |
| 1632 | PR00194C | 6.38 | 1.450e−32 | 145-173 | PR00194 | TROPOMYOSIN SIGNATURE |
| 1632 | PR00194D | 9.57 | 1.788e−09 | 21-44 | PR00194 | TROPOMYOSIN SIGNATURE |
| 1632 | PR00194D | 9.57 | 6.400e−23 | 175-198 | PR00194 | TROPOMYOSIN SIGNATURE |
| 1632 | PR00194E | 8.74 | 1.000e−30 | 231-256 | PR00194 | TROPOMYOSIN SIGNATURE |
| 1633 | BL00266A | 15.69 | 5.200e−26 | 46-72 | BL00266 | Somatotropin, prolactin |
| | | | | | | and related hormones |
| | | | | | | proteins. |
| 1633 | BL00266B | 24.48 | 1.857e−29 | 86-123 | BL00266 | Somatotropin, prolactin |
| | | | | | | and related hormones |
| | | | | | | proteins. |
| 1633 | BL00266C | 13.66 | 5.304e−12 | 146-162 | BL00266 | Somatotropin, prolactin |
| | | | | | | and related hormones |
| | | | | | | proteins |
| 1633 | BL00266D | 12.72 | 1.818e−27 | 197-220 | BL00266 | Somatotropin, prolactin |
| | | | | | | and related hormones |
| | | | | | | proteins. |
| 1633 | PR00836A | 14.40 | 9.471e−14 | 86-99 | PR00836 | SOMATOTROPIN HORMONE |
| | | | | | | FAMILY SIGNATURE |
| 1633 | PR00836B | 16.59 | 3.571e−15 | 108-126 | PR00836 | SOMATOTROPIN HORMONE |
| | | | | | | FAMILY SIGNATURE |
| 1633 | PR00836C | 11.95 | 2.500e−17 | 190-206 | PR00836 | SOMATOTROPIN HORMONE |
| | | | | | | FAMILY SIGNATURE |
| 1633 | PR00836D | 13.05 | 2.688e−17 | 206-220 | PR00836 | SOMATOTROPIN HORMONE |
| | | | | | | FAMILY SIGNATURE |
| 1635 | BL00383A | 13.34 | 6.000e−09 | 1657-1671 | BL00383 | Tyrosine specific |
| | | | | | | protein phosphatases |
| | | | | | | proteins. |
| 1635 | BL00383A | 13.34 | 9.550e−14 | 1368-1382 | BL00383 | Tyrosine specific |
| | | | | | | protein phosphatases |
| | | | | | | proteins. |
| 1635 | BL00383B | 7.61 | 6.143e−12 | 1393-1401 | BL00383 | Tyrosine specific |
| | | | | | | protein phosphatases |
| | | | | | | proteins. |
| 1635 | BL00383B | 7.61 | 8.500e−09 | 1682-1690 | BL00383 | Tyrosine specific |
| | | | | | | protein phosphatases |
| | | | | | | proteins. |
| 1635 | BL00383C | 10.10 | 1.000e−10 | 1712-1722 | BL00383 | Tyrosine specific |
| | | | | | | protein phosphatases |
| | | | | | | proteins. |
| 1635 | BL00383C | 10.10 | 4.500e−13 | 1423-1433 | BL00383 | Tyrosine specific |
| | | | | | | protein phosphatases |
| | | | | | | proteins. |
| 1635 | BL00383D | 11.92 | 7.500e−12 | 1787-1799 | BL00383 | Tyrosine specific |
| | | | | | | protein phosphatases |
| | | | | | | proteins. |
| 1635 | BL00383D | 11.92 | 9.400e−13 | 1498-1510 | BL00383 | Tyrosine specific |
| | | | | | | protein phosphatases |
| | | | | | | proteins. |
| 1635 | BL00383E | 10.35 | 1.000e−14 | 1536-1546 | BL00383 | Tyrosine specific |
| | | | | | | protein phosphatases |
| | | | | | | proteins. |
| 1635 | BL00383E | 10.35 | 1.000e−14 | 1827-1837 | BL00383 | Tyrosine specific |
| | | | | | | protein phosphatases |
| | | | | | | proteins. |
| 1635 | BL00383F | 15.51 | 7.120e−13 | 1865-1880 | BL00383 | Tyrosine specific |
| | | | | | | protein phosphatases |
| | | | | | | proteins. |
| 1635 | BL00383F | 15.51 | 8.941e−16 | 1574-1589 | BL00383 | Tyrosine specific |
| | | | | | | protein phosphatases |
| | | | | | | proteins. |
| 1635 | BL00621G | 22.33 | 1.250e−10 | 1225-1278 | BL00621 | Tissue factor proteins. |
| 1635 | BL00790I | 20.01 | 1.536e−09 | 663-693 | BL00790 | Receptor tyrosine |
| | | | | | | kinase class V |
| | | | | | | proteins. |
| 1635 | BL00790I | 20.01 | 2.688e−10 | 776-806 | BL00790 | Receptor tyrosine |
| | | | | | | kinase class V |
| | | | | | | proteins. |
| 1635 | BL00790I | 20.01 | 2.800e−10 | 467-497 | BL00790 | Receptor tyrosine |
| | | | | | | kinase class V |
| | | | | | | proteins. |
| 1635 | BL00790I | 20.01 | 8.500e−12 | 561-591 | BL00790 | Receptor tyrosine |
| | | | | | | kinase class V |
| | | | | | | proteins. |
| 1635 | BL00790I | 20.01 | 9.735e−13 | 967-997 | BL00790 | Receptor tyrosine |
| | | | | | | kinase class V |
| | | | | | | proteins. |
| 1635 | PR00014B | 14.77 | 5.500e−09 | 431-441 | PR00014 | FIBRONECTIN TYPE III |
| | | | | | | REPEAT SIGNATURE |
| 1635 | PR00014C | 15.44 | 5.500e−10 | 550-568 | PR00014 | FIBRONECTIN TYPE III |
| | | | | | | REPEAT SIGNATURE |
| 1635 | PR00014C | 15.44 | 8.500e−14 | 956-974 | PR00014 | FIBRONECTIN TYPE III |
| | | | | | | REPEAT SIGNATURE |
| 1635 | PR00014D | 12.04 | 5.235e−10 | 878-892 | PR00014 | FIBRONECTIN TYPE III |
| | | | | | | REPEAT SIGNATURE |
| 1635 | PR00014D | 12.04 | 7.000e−11 | 670-684 | PR00014 | FIBRONECTIN TYPE III |
| | | | | | | REPEAT SIGNATURE |
| 1635 | PR00014D | 12.04 | 7.750e−09 | 974-988 | PR00014 | FIBRONECTIN TYPE III |
| | | | | | | REPEAT SIGNATURE |
| 1635 | PR00219C | 9.04 | 4.450e−09 | 1251-1270 | PR00219 | SYNAPTOBREVIN SIGNATURE |
| 1635 | PR00346H | 10.74 | 1.214e−09 | 1250-1273 | PR00346 | TISSUE FACTOR SIGNATURE |
| 1635 | PR00700A | 6.96 | 8.714e−11 | 1394-1401 | PR00700 | PROTEIN TYROSINE |
| | | | | | | PHOSPHATASE SIGNATURE |
| 1635 | PR00700B | 16.80 | 1.500e−24 | 1410-1430 | PR00700 | PROTEIN TYROSINE |
| | | | | | | PHOSPHATASE SIGNATURE |
| 1635 | PR00700B | 16.80 | 4.240e−21 | 1699-1719 | PR00700 | PROTEIN TYROSINE |
| | | | | | | PHOSPHATASE SIGNATURE |
| 1635 | PR00700C | 13.17 | 5.800e−18 | 1494-1511 | PR00700 | PROTEIN TYROSINE |
| | | | | | | PHOSPHATASE SIGNATURE |
| 1635 | PR00700C | 13.17 | 7.353e−17 | 1783-1800 | PR00700 | PROTEIN TYROSINE |
| | | | | | | PHOSPHATASE SIGNATURE |
| 1635 | PR00700D | 12.47 | 4.214e−22 | 1533-1551 | PR00700 | PROTEIN TYROSINE |
| | | | | | | PHOSPHATASE SIGNATURE |
| 1635 | PR00700D | 12.47 | 7.158e−20 | 1824-1842 | PR00700 | PROTEIN TYROSINE |
| | | | | | | PHOSPHATASE SIGNATURE |
| 1635 | PR00700E | 17.57 | 4.000e−14 | 1855-1870 | PR00700 | PROTEIN TYROSINE |
| | | | | | | PHOSPHATASE SIGNATURE |
| 1635 | PR00700E | 17.57 | 5.304e−12 | 1564-1579 | PR00700 | PROTEIN TYROSINE |
| | | | | | | PHOSPHATASE SIGNATURE |
| 1635 | PR00700F | 11.18 | 1.429e−12 | 1871-1881 | PR00700 | PROTEIN TYROSINE |
| | | | | | | PHOSPHATASE SIGNATURE |
| 1635 | PR00700F | 11.18 | 7.353e−13 | 1580-1590 | PR00700 | PROTEIN TYROSINE |
| | | | | | | PHOSPHATASE SIGNATURE |
| 1636 | BL00152A | 15.38 | 5.154e−21 | 134-159 | BL00152 | ATP synthase alpha and |
| | | | | | | beta subunits proteins. |
| 1636 | BL00152B | 21.40 | 4.000e−32 | 191-228 | BL00152 | ATP synthase alpha and |
| | | | | | | beta subunits proteins. |
| 1636 | BL00152C | 11.41 | 6.250e−12 | 291-302 | BL00152 | ATP synthase alpha and |
| | | | | | | beta subunits proteins. |
| 1636 | BL00152D | 29.00 | 1.000e−40 | 310-354 | BL00152 | ATP synthase alpha and |
| | | | | | | beta subunits proteins. |
| 1636 | BL00152E | 22.68 | 1.000e−32 | 362-399 | BL00152 | ATP synthase alpha and |
| | | | | | | beta subunits proteins. |
| 1637 | BL00018 | 7.41 | 4.130e−09 | 67-79 | BL00018 | EF-hand calcium-binding |
| | | | | | | domain proteins. |
| 1637 | BL00303A | 21.77 | 6.667e−26 | 7-43 | BL00303 | S-100/ICaBP type |
| | | | | | | calcium binding |
| | | | | | | protein. |
| 1637 | BL00303B | 26.15 | 1.000e−24 | 55-91 | BL00303 | S-100/ICaBP type |
| | | | | | | calcium binding |
| | | | | | | protein. |
| 1637 | PR00334B | 8.69 | 8.286e−09 | 90-113 | PR00334 | HMW KININOGEN SIGNATURE |
| 1639 | BL00111A | 9.65 | 3.000e−17 | 16-29 | BL00111 | Phosphoglycerate kinase |
| | | | | | | proteins. |
| 1639 | BL00111B | 12.16 | 7.923e−15 | 58-69 | BL00111 | Phosphoglycerate kinase |
| | | | | | | proteins. |
| 1639 | BL00111C | 15.75 | 6.850e−20 | 74-98 | BL00111 | Phosphoglycerate kinase |
| | | | | | | proteins. |
| 1639 | BL00111D | 16.01 | 9.400e−16 | 114-128 | BL00111 | Phosphoglycerate kinase |
| | | | | | | proteins. |
| 1639 | BL00111E | 11.18 | 1.750e−26 | 159-179 | BL00111 | Phosphoglycerate kinase |
| | | | | | | proteins. |
| 1639 | BL00111F | 14.32 | 1.000e−40 | 186-232 | BL00111 | Phosphoglycerate kinase |
| | | | | | | proteins. |
| 1639 | BL00111G | 26.36 | 3.769e−34 | 253-292 | BL00111 | Phosphoglycerate kinase |
| | | | | | | proteins. |
| 1639 | BL00111H | 20.83 | 3.455e−31 | 317-352 | BL00111 | Phosphoglycerate kinase |
| | | | | | | proteins. |
| 1639 | BL00111I | 9.95 | 1.643e−14 | 390-411 | BL00111 | Phosphoglycerate kinase |
| | | | | | | proteins. |
| 1639 | BL00461B | 14.59 | 1.437e−09 | 201-240 | BL00461 | 6-phosphogluconate |
| | | | | | | dehydrogenase proteins. |
| 1639 | PR00477A | 7.93 | 3.769e−20 | 13-29 | PR00477 | PHOSPHOGLYCERATE KINASE |
| | | | | | | FAMILY SIGNATURE |
| 1639 | PR00477B | 14.50 | 4.857e−22 | 34-56 | PR00477 | PHOSPHOGLYCERATE KINASE |
| | | | | | | FAMILY SIGNATURE |
| 1639 | PR00477C | 14.67 | 6.400e−17 | 114-129 | PR00477 | PHOSPHOGLYCERATE KINASE |
| | | | | | | FAMILY SIGNATURE |
| 1639 | PR00477D | 12.94 | 1.900e−28 | 157-179 | PR00477 | PHOSPHOGLYCERATE KINASE |
| | | | | | | FAMILY SIGNATURE |
| 1639 | PR00477E | 11.95 | 3.500e−22 | 186-208 | PR00477 | PHOSPHOGLYCERATE KINASE |
| | | | | | | FAMILY SIGNATURE |
| 1639 | PR00477F | 7.63 | 8.000e−20 | 209-228 | PR00477 | PHOSPHOGLYCERATE KINASE |
| | | | | | | FAMILY SIGNATURE |
| 1639 | PR00477G | 15.40 | 1.000e−24 | 333-358 | PR00477 | PHOSPHOGLYCERATE KINASE |
| | | | | | | FAMILY SIGNATURE |
| 1639 | PR00477H | 5.93 | 6.000e−15 | 369-380 | PR00477 | PHOSPHOGLYCERATE KINASE |
| | | | | | | FAMILY SIGNATURE |
| 1640 | PR00477I | 8.53 | 4.000e−20 | 392-409 | PR00477 | PHOSPHOGLYCERATE KINASE |
| | | | | | | FAMILY SIGNATURE |
| 1640 | PR00360B | 13.61 | 1.818e−09 | 40-53 | PR00360 | C2 DOMAIN SIGNATURE |
| 1640 | PR00360B | 13.61 | 6.455e−11 | 1193-1206 | PR00360 | C2 DOMAIN SIGNATURE |
| 1641 | BL00115A | 15.44 | 1.000e−40 | 50-88 | BL00115 | Eukaryotic RNA |
| | | | | | | polymerase II |
| | | | | | | heptapeptide repeat |
| | | | | | | proteins. |
| 1641 | BL00115B | 15.42 | 2.957e−36 | 89-120 | BL00115 | Eukaryotic RNA |
| | | | | | | polymerase II |
| | | | | | | heptapeptide repeat |
| | | | | | | proteins. |
| 1641 | BL00115C | 14.01 | 4.750e−24 | 182-203 | BL00115 | Eukaryotic RNA |
| | | | | | | polymerase II |
| | | | | | | heptapeptide repeat |
| | | | | | | proteins. |
| 1641 | BL00115D | 19.94 | 1.000e−40 | 224-264 | BL00115 | Eukaryotic RNA |
| | | | | | | polymerase II |
| | | | | | | heptapeptide repeat |
| | | | | | | proteins. |
| 1641 | BL00115E | 14.13 | 8.560e−31 | 297-325 | BL00115 | Eukaryotic RNA |
| | | | | | | polymerase II |
| | | | | | | heptapeptide repeat |
| | | | | | | proteins. |
| 1641 | BL00115F | 10.77 | 7.107e−36 | 326-356 | BL00115 | Eukaryotic RNA |
| | | | | | | polymerase II |
| | | | | | | heptapeptide repeat |
| | | | | | | proteins. |
| 1641 | BL00115G | 11.65 | 2.000e−34 | 357-384 | BL00115 | Eukaryotic RNA |
| | | | | | | polymerase II |
| | | | | | | heptapeptide repeat |
| | | | | | | proteins. |
| 1641 | BL00115H | 14.34 | 2.286e−35 | 385-417 | BL00115 | Eukaryotic RNA |
| | | | | | | polymerase II |
| | | | | | | heptapeptide repeat |
| | | | | | | proteins. |
| 1641 | BL00115I | 8.33 | 1.000e−40 | 443-497 | BL00115 | Eukaryotic RNA |
| | | | | | | polymerase II |
| | | | | | | heptapeptide repeat |
| | | | | | | proteins. |
| 1641 | BL00115J | 16.71 | 9.143e−31 | 498-523 | BL00115 | Eukaryotic RNA |
| | | | | | | polymerase II |
| | | | | | | heptapeptide repeat |
| | | | | | | proteins. |
| 1641 | BL00115K | 15.03 | 1.000e−40 | 524-565 | BL00115 | Eukaryotic RNA |
| | | | | | | polymerase II |
| | | | | | | heptapeptide repeat |
| | | | | | | proteins. |
| 1641 | BL00115L | 12.25 | 6.464e−37 | 566-597 | BL00115 | Eukaryotic RNA |
| | | | | | | polymerase II |
| | | | | | | heptapeptide repeat |
| | | | | | | proteins. |
| 1641 | BL00115M | 19.19 | 1.000e−40 | 622-664 | BL00115 | Eukaryotic RNA |
| | | | | | | polymerase II |
| | | | | | | heptapeptide repeat |
| | | | | | | proteins. |
| 1641 | BL00115N | 20.57 | 1.000e−40 | 665-713 | BL00115 | Eukaryotic RNA |
| | | | | | | polymerase II |
| | | | | | | heptapeptide repeat |
| | | | | | | proteins. |
| 1641 | BL00115O | 16.76 | 1.000e−40 | 735-784 | BL00115 | Eukaryotic RNA |
| | | | | | | polymerase II |
| | | | | | | heptapeptide repeat |
| | | | | | | proteins. |
| 1641 | BL00115P | 11.54 | 1.000e−40 | 785-824 | BL00115 | Eukaryotic RNA |
| | | | | | | polymerase II |
| | | | | | | heptapeptide repeat |
| | | | | | | proteins. |
| 1641 | BL00115Q | 18.08 | 2.575e−37 | 825-854 | BL00115 | Eukaryotic RNA |
| | | | | | | polymerase II |
| | | | | | | heptapeptide repeat |
| | | | | | | proteins. |
| 1641 | BL00115R | 6.50 | 2.385e−32 | 855-881 | BL00115 | Eukaryotic RNA |
| | | | | | | polymerase II |
| | | | | | | heptapeptide repeat |
| | | | | | | proteins. |
| 1641 | BL00115S | 18.24 | 6.333e−40 | 882-923 | BL00115 | Eukaryotic RNA |
| | | | | | | polymerase II |
| | | | | | | heptapeptide repeat |
| | | | | | | proteins. |
| 1641 | BL00115T | 8.45 | 1.000e−40 | 1083-1116 | BL00115 | Eukaryotic RNA |
| | | | | | | polymerase II |
| | | | | | | heptapeptide repeat |
| | | | | | | proteins. |
| 1641 | BL00115U | 10.34 | 2.688e−26 | 1117-1139 | BL00115 | Eukaryotic RNA |
| | | | | | | polymerase II |
| | | | | | | heptapeptide repeat |
| | | | | | | proteins. |
| 1641 | BL00115V | 21.32 | 1.000e−40 | 1140-1189 | BL00115 | Eukaryotic RNA |
| | | | | | | polymerase II |
| | | | | | | heptapeptide repeat |
| | | | | | | proteins. |
| 1641 | BL00115W | 21.01 | 1.000e−40 | 1208-1253 | BL00115 | Eukaryotic RNA |
| | | | | | | polymerase II |
| | | | | | | heptapeptide repeat |
| | | | | | | proteins. |
| 1641 | BL00115X | 21.13 | 5.500e−35 | 1324-1359 | BL00115 | Eukaryotic RNA |
| | | | | | | polymerase II |
| | | | | | | heptapeptide repeat |
| | | | | | | proteins. |
| 1641 | BL00115Y | 11.86 | 1.000e−40 | 1360-1405 | BL00115 | Eukaryotic RNA |
| | | | | | | polymerase II |
| | | | | | | heptapeptide repeat |
| | | | | | | proteins. |
| 1641 | BL00115Z | 3.12 | 1.000e−08 | 1568-1616 | BL00115 | Eukaryotic RNA |
| | | | | | | polymerase II |
| | | | | | | heptapeptide repeat |
| | | | | | | proteins. |
| 1641 | BL00115Z | 3.12 | 1.000e−40 | 1604-1652 | BL00115 | Eukaryotic RNA |
| | | | | | | polymerase II |
| | | | | | | heptapeptide repeat |
| | | | | | | proteins. |
| 1641 | BL00115Z | 3.12 | 1.000e−40 | 1611-1659 | BL00115 | Eukaryotic RNA |
| | | | | | | polymerase II |
| | | | | | | heptapeptide repeat |
| | | | | | | proteins. |
| 1641 | BL00115Z | 3.12 | 1.000e−40 | 1618-1666 | BL00115 | Eukaryotic RNA |
| | | | | | | polymerase II |
| | | | | | | heptapeptide repeat |
| | | | | | | proteins. |
| 1641 | BL00115Z | 3.12 | 1.000e−40 | 1625-1673 | BL00115 | Eukaryotic RNA |
| | | | | | | polymerase II |
| | | | | | | heptapeptide repeat |
| | | | | | | proteins. |
| 1641 | BL00115Z | 3.12 | 1.000e−40 | 1632-1680 | BL00115 | Eukaryotic RNA |
| | | | | | | polymerase II |
| | | | | | | heptapeptide repeat |
| | | | | | | proteins. |
| 1641 | BL00115Z | 3.12 | 1.000e−40 | 1639-1687 | BL00115 | Eukaryotic RNA |
| | | | | | | polymerase II |
| | | | | | | heptapeptide repeat |
| | | | | | | proteins. |
| 1641 | BL00115Z | 3.12 | 1.000e−40 | 1646-1694 | BL00115 | Eukaryotic RNA |
| | | | | | | polymerase II |
| | | | | | | heptapeptide repeat |
| | | | | | | proteins. |
| 1641 | BL00115Z | 3.12 | 1.000e−40 | 1653-1701 | BL00115 | Eukaryotic RNA |
| | | | | | | polymerase II |
| | | | | | | heptapeptide repeat |
| | | | | | | proteins. |
| 1641 | BL00115Z | 3.12 | 1.000e−40 | 1660-1708 | BL00115 | Eukaryotic RNA |
| | | | | | | polymerase II |
| | | | | | | heptapeptide repeat |
| | | | | | | proteins. |
| 1641 | BL00115Z | 3.12 | 1.000e−40 | 1667-1715 | BL00115 | Eukaryotic RNA |
| | | | | | | polymerase II |
| | | | | | | heptapeptide repeat |
| | | | | | | proteins. |
| 1641 | BL00115Z | 3.12 | 1.000e−40 | 1674-1722 | BL00115 | Eukaryotic RNA |
| | | | | | | polymerase II |
| | | | | | | heptapeptide repeat |
| | | | | | | proteins. |
| 1641 | BL00115Z | 3.12 | 1.000e−40 | 1681-1729 | BL00115 | Eukaryotic RNA |
| | | | | | | polymerase II |
| | | | | | | heptapeptide repeat |
| | | | | | | proteins. |
| 1641 | BL00115Z | 3.12 | 1.000e−40 | 1688-1736 | BL00115 | Eukaryotic RNA |
| | | | | | | polymerase II |
| | | | | | | heptapeptide repeat |
| | | | | | | proteins. |
| 1641 | BL00115Z | 3.12 | 1.000e−40 | 1695-1743 | BL00115 | Eukaryotic RNA |
| | | | | | | polymerase II |
| | | | | | | heptapeptide repeat |
| | | | | | | proteins. |
| 1641 | BL00115Z | 3.12 | 1.000e−40 | 1702-1750 | BL00115 | Eukaryotic RNA |
| | | | | | | polymerase II |
| | | | | | | heptapeptide repeat |
| | | | | | | proteins. |
| 1641 | BL00115Z | 3.12 | 1.000e−40 | 1709-1757 | BL00115 | Eukaryotic RNA |
| | | | | | | polymerase II |
| | | | | | | heptapeptide repeat |
| | | | | | | proteins. |
| 1641 | BL00115Z | 3.12 | 1.000e−40 | 1716-1764 | BL00115 | Eukaryotic RNA |
| | | | | | | polymerase II |
| | | | | | | heptapeptide repeat |
| | | | | | | proteins. |
| 1641 | BL00115Z | 3.12 | 1.000e−40 | 1723-1771 | BL00115 | Eukaryotic RNA |
| | | | | | | polymerase II |
| | | | | | | heptapeptide repeat |
| | | | | | | proteins. |
| 1641 | BL00115Z | 3.12 | 1.000e−40 | 1730-1778 | BL00115 | Eukaryotic RNA |
| | | | | | | polymerase II |
| | | | | | | heptapeptide repeat |
| | | | | | | proteins. |
| 1641 | BL00115Z | 3.12 | 1.000e−40 | 1737-1785 | BL00115 | Eukaryotic RNA |
| | | | | | | polymerase II |
| | | | | | | heptapeptide repeat |
| | | | | | | proteins. |
| 1641 | BL00115Z | 3.12 | 1.000e−40 | 1744-1792 | BL00115 | Eukaryotic RNA |
| | | | | | | polymerase II |
| | | | | | | heptapeptide repeat |
| | | | | | | proteins |
| 1641 | BL00115Z | 3.12 | 1.000e−40 | 1751-1799 | BL00115 | Eukaryotic RNA |
| | | | | | | polymerase II |
| | | | | | | heptapeptide repeat |
| | | | | | | proteins. |
| 1641 | BL00115Z | 3.12 | 1.000e−40 | 1758-1806 | BL00115 | Eukaryotic RNA |
| | | | | | | polymerase II |
| | | | | | | heptapeptide repeat |
| | | | | | | proteins. |
| 1641 | BL00115Z | 3.12 | 1.000e−40 | 1765-1813 | BL00115 | Eukaryotic RNA |
| | | | | | | polymerase II |
| | | | | | | heptapeptide repeat |
| | | | | | | proteins. |
| 1641 | BL00115Z | 3.12 | 1.000e−40 | 1772-1820 | BL00115 | Eukaryotic RNA |
| | | | | | | polymerase II |
| | | | | | | heptapeptide repeat |
| | | | | | | proteins. |
| 1641 | BL00115Z | 3.12 | 1.000e−40 | 1779-1827 | BL00115 | Eukaryotic RNA |
| | | | | | | polymerase II |
| | | | | | | heptapeptide repeat |
| | | | | | | proteins. |
| 1641 | BL00115Z | 3.12 | 1.000e−40 | 1786-1834 | BL00115 | Eukaryotic RNA |
| | | | | | | polymerase II |
| | | | | | | heptapeptide repeat |
| | | | | | | proteins. |
| 1641 | BL00115Z | 3.12 | 1.000e−40 | 1793-1841 | BL00115 | Eukaryotic RNA |
| | | | | | | polymerase II |
| | | | | | | heptapeptide repeat |
| | | | | | | proteins. |
| 1641 | BL00115Z | 3.12 | 1.000e−40 | 1800-1848 | BL00115 | Eukaryotic RNA |
| | | | | | | polymerase II |
| | | | | | | heptapeptide repeat |
| | | | | | | proteins. |
| 1641 | BL00115Z | 3.12 | 1.000e−40 | 1814-1862 | BL00115 | Eukaryotic RNA |
| | | | | | | polymerase II |
| | | | | | | heptapeptide repeat |
| | | | | | | proteins. |
| 1641 | BL00115Z | 3.12 | 1.000e−40 | 1821-1869 | BL00115 | Eukaryotic RNA |
| | | | | | | polymerase II |
| | | | | | | heptapeptide repeat |
| | | | | | | proteins. |
| 1641 | BL00115Z | 3.12 | 1.000e−40 | 1828-1876 | BL00115 | Eukaryotic RNA |
| | | | | | | polymerase II |
| | | | | | | heptapeptide repeat |
| | | | | | | proteins. |
| 1641 | BL00115Z | 3.12 | 1.000e−40 | 1835-1883 | BL00115 | Eukaryotic RNA |
| | | | | | | polymerase II |
| | | | | | | heptapeptide repeat |
| | | | | | | proteins. |
| 1641 | BL00115Z | 3.12 | 1.000e−40 | 1842-1890 | BL00115 | Eukaryotic RNA |
| | | | | | | polymerase II |
| | | | | | | heptapeptide repeat |
| | | | | | | proteins. |
| 1641 | BL00115Z | 3.12 | 1.000e−40 | 1849-1897 | BL00115 | Eukaryotic RNA |
| | | | | | | polymerase II |
| | | | | | | heptapeptide repeat |
| | | | | | | proteins. |
| 1641 | BL00115Z | 3.12 | 1.000e−40 | 1856-1904 | BL00115 | Eukaryotic RNA |
| | | | | | | polymerase II |
| | | | | | | heptapeptide repeat |
| | | | | | | proteins. |
| 1641 | BL00115Z | 3.12 | 1.000e−40 | 1863-1911 | BL00115 | Eukaryotic RNA |
| | | | | | | polymerase II |
| | | | | | | heptapeptide repeat |
| | | | | | | proteins. |
| 1641 | BL00115Z | 3.12 | 1.000e−40 | 1870-1918 | BL00115 | Eukaryotic RNA |
| | | | | | | polymerase II |
| | | | | | | heptapeptide repeat |
| | | | | | | proteins. |
| 1641 | BL00115Z | 3.12 | 1.000e−40 | 1877-1925 | BL00115 | Eukaryotic RNA |
| | | | | | | polymerase II |
| | | | | | | heptapeptide repeat |
| | | | | | | proteins. |
| 1641 | BL00115Z | 3.12 | 1.000e−40 | 1884-1932 | BL00015 | Eukaryotic RNA |
| | | | | | | polymerase II |
| | | | | | | heptapeptide repeat |
| | | | | | | proteins. |
| 1641 | BL00115Z | 3.12 | 1.000e−40 | 1891-1939 | BL00115 | Eukaryotic RNA |
| | | | | | | polymerase II |
| | | | | | | heptapeptide repeat |
| | | | | | | proteins. |
| 1641 | BL00115Z | 3.12 | 1.493e−35 | 1597-1645 | BL00115 | Eukaryotic RNA |
| | | | | | | polymerase II |
| | | | | | | heptapeptide repeat |
| | | | | | | proteins. |
| 1641 | BL00115Z | 3.12 | 1.779e−17 | 1922-1970 | BL00115 | Eukaryotic RNA |
| | | | | | | polymerase II |
| | | | | | | heptapeptide repeat |
| | | | | | | proteins. |
| 1641 | BL00115Z | 3.12 | 2.636e−12 | 1561-1609 | BL00115 | Eukaryotic RNA |
| | | | | | | polymerase II |
| | | | | | | heptapeptide repeat |
| | | | | | | proteins. |
| 1641 | BL00115Z | 3.12 | 3.326e−24 | 1590-1638 | BL00115 | Eukaryotic RNA |
| | | | | | | polymerase II |
| | | | | | | heptapeptide repeat |
| | | | | | | proteins. |
| 1641 | BL00115Z | 3.12 | 3.380e−12 | 1554-1602 | BL00115 | Eukaryotic RNA |
| | | | | | | polymerase II |
| | | | | | | heptapeptide repeat |
| | | | | | | proteins. |
| 1641 | BL00115Z | 3.12 | 3.512e−10 | 1576-1624 | BL00115 | Eukaryotic RNA |
| | | | | | | polymerase II |
| | | | | | | heptapeptide repeat |
| | | | | | | proteins. |
| 1641 | BL00115Z | 3.12 | 4.030e−18 | 1583-1631 | BL00115 | Eukaryotic RNA |
| | | | | | | polymerase II |
| | | | | | | heptapeptide repeat |
| | | | | | | proteins. |
| 1641 | BL00115Z | 3.12 | 4.646e−30 | 1905-1953 | BL00115 | Eukaryotic RNA |
| | | | | | | polymerase II |
| | | | | | | heptapeptide repeat |
| | | | | | | proteins. |
| 1641 | BL00115Z | 3.12 | 5.760e−17 | 1908-1956 | BL00115 | Eukaryotic RNA |
| | | | | | | polymerase II |
| | | | | | | heptapeptide repeat |
| | | | | | | proteins. |
| 1641 | BL00115Z | 3.12 | 6.000e−23 | 1912-1960 | BL00115 | Eukaryotic RNA |
| | | | | | | polymerase II |
| | | | | | | heptapeptide repeat |
| | | | | | | proteins. |
| 1641 | BL00115Z | 3.12 | 6.302e−10 | 1894-1942 | BL00115 | Eukaryotic RNA |
| | | | | | | polymerase II |
| | | | | | | heptapeptide repeat |
| | | | | | | proteins. |
| 1641 | BL00115Z | 3.12 | 6.591e−40 | 1807-1855 | BL00115 | Eukaryotic RNA |
| | | | | | | polymerase II |
| | | | | | | heptapeptide repeat |
| | | | | | | proteins. |
| 1641 | BL00115Z | 3.12 | 7.154e−09 | 1547-1595 | BL00115 | Eukaryotic RNA |
| | | | | | | polymerase II |
| | | | | | | heptapeptide repeat |
| | | | | | | proteins. |
| 1641 | BL00115Z | 3.12 | 8.174e−38 | 1898-1946 | BL00115 | Eukaryotic RNA |
| | | | | | | polymerase II |
| | | | | | | heptapeptide repeat |
| | | | | | | proteins. |
| 1641 | BL00115Z | 3.12 | 8.566e−14 | 1901-1949 | BL00115 | Eukaryotic RNA |
| | | | | | | polymerase II |
| | | | | | | heptapeptide repeat |
| | | | | | | proteins. |
| 1641 | BL00115Z | 3.12 | 9.644e−18 | 1919-1967 | BL00115 | Eukaryotic RNA |
| | | | | | | polymerase II |
| | | | | | | heptapeptide repeat |
| | | | | | | proteins. |
| 1641 | BL00115Z | 3.12 | 9.903e−22 | 1915-1963 | BL00115 | Eukaryotic RNA |
| | | | | | | polymerase II |
| | | | | | | heptapeptide repeat |
| | | | | | | proteins. |
| 1643 | BL00298A | 10.97 | 1.000e−40 | 74-118 | BL00298 | Heat shock hsp90 |
| | | | | | | proteins family |
| | | | | | | proteins. |
| 1643 | BL00298B | 15.64 | 1.290e−39 | 134-180 | BL00298 | Heat shock hsp90 |
| | | | | | | proteins family |
| | | | | | | proteins. |
| 1643 | BL00298C | 16.40 | 2.286e−40 | 186-229 | BL00298 | Heat shock hsp90 |
| | | | | | | proteins family |
| | | | | | | proteins. |
| 1643 | BL00298D | 17.97 | 6.226e−33 | 242-281 | BL00298 | Heat shock hsp90 |
| | | | | | | proteins family |
| | | | | | | proteins. |
| 1643 | BL00298E | 27.30 | 1.000e−40 | 321-375 | BL00298 | Heat shock hsp90 |
| | | | | | | proteins family |
| | | | | | | proteins. |
| 1643 | BL00298F | 11.21 | 1.000e−40 | 409-463 | BL00298 | Heat shock hsp90 |
| | | | | | | proteins family |
| | | | | | | proteins. |
| 1643 | BL00298G | 24.57 | 5.345e−39 | 465-519 | BL00298 | Heat shock hsp90 |
| | | | | | | proteins family |
| | | | | | | proteins. |
| 1643 | BL00298H | 20.50 | 1.000e−40 | 553-606 | BL00298 | Heat shock hsp90 |
| | | | | | | proteins family |
| | | | | | | proteins. |
| 1643 | BL00298I | 30.07 | 7.818e−34 | 661-714 | BL00298 | Heat shock hsp90 |
| | | | | | | proteins family |
| | | | | | | proteins. |
| 1643 | BL00422C | 16.18 | 9.234e−10 | 295-322 | BL00422 | Granins proteins. |
| 1643 | PD01781B | 27.55 | 2.800e−09 | 758-801 | PD01781 | PROTEASE IMMUNOGLOBULIN |
| | | | | | | PRECURSO. |
| 1643 | PR00775A | 9.90 | 3.250e−22 | 74-94 | PR00775 | 90 KD HEAT SHOCK |
| | | | | | | PROTEIN SIGNATURE |
| 1643 | PR00775B | 3.52 | 3.700e−26 | 95-117 | PR00775 | 90 KD HEAT SHOCK |
| | | | | | | PROTEIN SIGNATURE |
| 1643 | PR00775C | 10.68 | 3.727e−16 | 144-161 | PR00775 | 90 KD HEAT SHOCK |
| | | | | | | PROTEIN SIGNATURE |
| 1643 | PR00775D | 8.91 | 9.640e−18 | 162-179 | PR00775 | 90 KD HEAT SHOCK |
| | | | | | | PROTEIN SIGNATURE |
| 1643 | PR00775E | 8.06 | 6.571e−27 | 192-214 | PR00775 | 90 KD HEAT SHOCK |
| | | | | | | PROTEIN SIGNATURE |
| 1643 | PR00775F | 12.76 | 2.800e−15 | 243-260 | PR00775 | 90 KD HEAT SHOCK |
| | | | | | | PROTEIN SIGNATURE |
| 1643 | PR00775G | 10.64 | 9.625e−19 | 261-279 | PR00775 | 90 KD HEAT SHOCK |
| | | | | | | PROTEIN SIGNATURE |
| 1644 | BL00299 | 28.84 | 1.000e−40 | 16-67 | BL00299 | Ubiquitin domain |
| | | | | | | proteins. |
| 1644 | PF01020 | 15.00 | 1.000e−40 | 80-128 | PF01020 | Ribosomal L40e family. |
| 1644 | PR00348A | 7.86 | 2.000e−26 | 11-31 | PR00348 | UBIQUITIN SIGNATURE |
| 1644 | PR00348B | 5.78 | 2.800e−27 | 32-52 | PR00348 | UBIQUITIN SIGNATURE |
| 1644 | PR00348C | 20.03 | 1.643e−27 | 53-74 | PR00348 | UBIQUITIN SIGNATURE |
| 1646 | BL00646A | 25.82 | 6.192e−29 | 14-61 | BL00646 | Ribosomal protein S13 |
| | | | | | | proteins. |
| 1646 | BL00646B | 21.42 | 6.100e−30 | 110-142 | BL00646 | Ribosomal protein S13 |
| | | | | | | proteins. |
| 1647 | BL00358A | 13.06 | 9.690e−11 | 19-29 | BL00358 | Ribosomal protein L5 |
| | | | | | | proteins. |
| 1647 | BL00358B | 22.76 | 2.742e−38 | 40-85 | BL00358 | Ribosomal protein L5 |
| | | | | | | proteins. |
| 1647 | BL00358C | 13.75 | 5.500e−15 | 99-112 | BL00358 | Ribosomal protein L5 |
| | | | | | | proteins. |
| 1647 | BL00358D | 14.26 | 5.500e−14 | 119-133 | BL00358 | Ribosomal protein L5 |
| | | | | | | proteins. |
| 1649 | BL00290A | 20.89 | 7.158e−13 | 42-64 | BL00290 | Immunoglobulins and |
| | | | | | | major |
| | | | | | | histocompatibility |
| | | | | | | complex proteins. |
| 1649 | BL00290B | 13.17 | 4.500e−12 | 98-115 | BL00290 | Immunoglobulins and |
| | | | | | | major |
| | | | | | | histocompatibility |
| | | | | | | complex proteins. |
| 1650 | BL01121A | 9.11 | 9.100e−12 | 90-100 | BL01121 | Caspase family |
| | | | | | | histidine proteins. |
| 1650 | BL01121B | 29.68 | 1.346e−26 | 103-138 | BL01121 | Caspase family |
| | | | | | | histidine proteins. |
| 1650 | BL01121C | 13.17 | 5.065e−15 | 150-165 | BL01121 | Caspase family |
| | | | | | | histidine proteins. |
| 1650 | BL01121D | 12.34 | 4.343e−19 | 197-214 | BL01121 | Caspase family |
| | | | | | | histidine proteins. |
| 1650 | BL01121E | 23.71 | 5.179e−31 | 247-281 | BL01121 | Caspase family |
| | | | | | | histidine proteins. |
| 1650 | BL01121F | 15.43 | 1.783e−12 | 293-305 | BL01121 | Caspase family |
| | | | | | | histidine proteins. |
| 1650 | PR00376A | 14.23 | 5.886e−14 | 88-101 | PR00376 | INTERLEUKIN-1B |
| | | | | | | CONVERTING ENZYME |
| | | | | | | SIGNATURE |
| 1650 | PR00376B | 15.57 | 9.660e−11 | 106-124 | PR00376 | INTERLEUKIN-1B |
| | | | | | | CONVERTING ENZYME |
| | | | | | | SIGNATURE |
| 1650 | PR00376C | 16.28 | 5.574e−10 | 124-142 | PR00376 | INTERLEUKIN-1B |
| | | | | | | CONVERTING ENZYME |
| | | | | | | SIGNATURE |
| 1650 | PR00376D | 12.74 | 1.250e−10 | 157-165 | PR00376 | INTERLEUKIN-1B |
| | | | | | | CONVERTING ENZYME |
| | | | | | | SIGNATURE |
| 1650 | PR00376E | 12.26 | 5.941e−18 | 197-215 | PR00376 | INTERLEUKIN-1B |
| | | | | | | CONVERTING ENZYME |
| | | | | | | SIGNATURE |
| 1650 | PR00376F | 13.77 | 4.833e−11 | 266-277 | PR00376 | INTERLEUKIN-1B |
| | | | | | | CONVERTING ENZYME |
| | | | | | | SIGNATURE |
| 1651 | BL00525A | 11.57 | 4.971e−11 | 12-30 | BL00525 | Ribosomal protein L6 |
| | | | | | | proteins. |
| 1651 | BL00700A | 19.34 | 9.308e−33 | 8-45 | BL00700 | Ribosonal protein L6 |
| | | | | | | proteins 2. |
| 1651 | BL00700B | 18.26 | 1.000e−40 | 62-100 | BL00700 | Ribosomal protein L6 |
| | | | | | | proteins 2. |
| 1651 | BL00700C | 11.76 | 4.000e−13 | 112-121 | BL00700 | Ribosomal protein L6 |
| | | | | | | proteins 2. |
| 1651 | BL00700D | 21.51 | 1.000e−40 | 141-184 | BL00700 | Ribosomal protein L6 |
| | | | | | | proteins 2. |
| 1652 | BL00055 | 15.98 | 2.200e−24 | 90-125 | BL00055 | Ribosomal protein S12 |
| | | | | | | proteins. |
| 1653 | BL00299 | 28.84 | 8.269e−33 | 16-67 | BL00299 | Ubiquitin domain |
| | | | | | | proteins. |
| 1653 | PR00348B | 5.78 | 2.000e−15 | 32-52 | PR00348 | UBIQUITIN SIGNATURE |
| 1653 | PR00348C | 20.03 | 8.477e−14 | 53-74 | PR00348 | UBIQUITIN SIGNATURE |
| 1654 | BL00024A | 11.49 | 5.000e−11 | 75-85 | BL00024 | Hemopexin domain |
| | | | | | | proteins. |
| 1654 | BL00024B | 21.53 | 3.432e−26 | 104-137 | BL00024 | Hemopexin domain |
| | | | | | | proteins. |
| 1654 | BL00024C | 22.98 | 1.000e−40 | 152-200 | BL00024 | Hemopexin domain |
| | | | | | | proteins. |
| 1654 | BL00024D | 17.28 | 4.375e−29 | 206-237 | BL00024 | Hemopexin domain |
| | | | | | | proteins. |
| 1654 | BL00024E | 7.58 | 2.406e−14 | 245-258 | BL00024 | Hemopexin domain |
| | | | | | | proteins. |
| 1654 | BL00024F | 11.30 | 6.786e−21 | 298-318 | BL00024 | Hemopexin domain |
| | | | | | | proteins. |
| 1654 | BL00024G | 13.31 | 2.333e−09 | 429-441 | BL00024 | Hemopexin domain |
| | | | | | | proteins. |
| 1654 | BL00024G | 13.31 | 9.308e−13 | 336-348 | BL00024 | Hemopexin domain |
| | | | | | | proteins. |
| 1654 | BL00024H | 11.35 | 2.174e−13 | 355-366 | BL00024 | Hemopexin domain |
| | | | | | | proteins. |
| 1654 | BL00024H | 11.35 | 3.600e−09 | 401-412 | BL00024 | Hemopexin domain |
| | | | | | | proteins. |
| 1654 | BL00142 | 8.38 | 2.636e−11 | 212-222 | BL00142 | Neutral zinc |
| | | | | | | metallopeptidases, |
| | | | | | | zinc-binding region |
| | | | | | | proteins. |
| 1654 | BL00546A | 19.62 | 8.154e−21 | 55-84 | BL00546 | Matrixins cysteine |
| | | | | | | switch. |
| 1654 | BL00546B | 20.11 | 1.000e−40 | 153-196 | BL00546 | Matrixins cysteine |
| | | | | | | switch. |
| 1654 | BL00546C | 16.41 | 2.575e−29 | 206-237 | BL00546 | Matrixins cysteine |
| | | | | | | switch. |
| 1654 | BL00546D | 10.34 | 2.459e−14 | 245-258 | BL00546 | Matrixins cysteine |
| | | | | | | switch. |
| 1654 | BL00546E | 10.23 | 9.727e−21 | 298-318 | BL00546 | Matrixins cysteine |
| | | | | | | switch. |
| 1654 | BL00546F | 12.40 | 6.700e−13 | 336-348 | BL00546 | Matrixins cysteine |
| | | | | | | switch. |
| 1654 | BL00546F | 12.40 | 8.059e−10 | 429-441 | BL00546 | Matrixins cysteine |
| | | | | | | switch. |
| 1654 | BL00546G | 16.84 | 2.091e−15 | 356-375 | BL00546 | Matrixins cysteine |
| | | | | | | switch. |
| 1654 | BL00546G | 16.84 | 3.368e−09 | 310-329 | BL00546 | Matrixins cysteine |
| | | | | | | switch. |
| 1654 | BL00546H | 10.76 | 1.514e−10 | 448-458 | BL00546 | Matrixins cysteine |
| | | | | | | switch. |
| 1654 | BL00546H | 10.76 | 6.333e−11 | 401-411 | BL00546 | Matrixins cysteine |
| | | | | | | switch. |
| 1654 | PR00138A | 15.14 | 7.000e−13 | 75-88 | PR00138 | MATRIXIN SIGNATURE |
| 1654 | PR00138B | 15.82 | 6.625e−16 | 130-145 | PR00138 | MATRIXIN SIGNATURE |
| 1654 | PR00138C | 16.41 | 9.053e−33 | 153-181 | PR00138 | MATRIXIN SIGNATURE |
| 1654 | PR00138D | 16.56 | 6.921e−25 | 212-237 | PR00138 | MATRIXIN SIGNATURE |
| 1654 | PR00138E | 6.01 | 2.091e−14 | 245-258 | PR00138 | MATRIXIN SIGNATURE |
| 1654 | PR00480B | 15.41 | 5.355e−11 | 207-225 | PR00480 | ASTACIN FAMILY |
| | | | | | | SIGNATURE |
| 1656 | PR00449E | 13.50 | 8.313e−18 | 68-90 | PR00449 | TRANSFORMING PROTEIN |
| | | | | | | P21 RAS SIGNATURE |
| 1657 | BL01160B | 19.54 | 2.068e−09 | 139-192 | BL01160 | Kinesin light chain |
| | | | | | | repeat proteins. |
| 1657 | PF00850D | 14.76 | 5.846e−16 | 829-852 | PF00850 | Histone deacetylase |
| | | | | | | family. |
| 1657 | PF00850E | 8.88 | 8.071e−23 | 863-888 | PF00850 | Histone deacetylase |
| | | | | | | family. |
| 1657 | PF00850F | 15.70 | 1.556e−10 | 901-933 | PF00850 | Histone deacetylase |
| | | | | | | family. |
| 1657 | PF00850G | 22.75 | 9.250e−11 | 940-981 | PF00850 | Histone deacetylase |
| | | | | | | family. |
| 1658 | BL00720B | 16.57 | 6.516e−17 | 347-370 | BL00720 | Guanine-nucleotide |
| | | | | | | dissociation |
| | | | | | | stimulators CDC25 |
| | | | | | | family sign. |
| 1658 | PR00761E | 14.32 | 9.500e−10 | 38-56 | PR00761 | BINDIN PRECURSOR |
| | | | | | | SIGNATURE |
| 1659 | BL01267A | 18.07 | 7.618e−28 | 12-40 | BL01267 | Uncharacterized protein |
| | | | | | | family UPF0023 |
| | | | | | | proteins. |
| 1659 | BL01267B | 18.76 | 6.936e−31 | 41-81 | BL01267 | Uncharacterized protein |
| | | | | | | family UPF0023 |
| | | | | | | proteins. |
| 1659 | BL01267C | 22.80 | 9.348e−23 | 125-178 | BL01267 | Uncharacterized protein |
| | | | | | | family UPF0023 |
| | | | | | | proteins. |
| 1660 | BL01100A | 12.62 | 1.947e−24 | 12-38 | BL01100 | NNMT/PNMT/TEMT family |
| | | | | | | of methyltransferases |
| | | | | | | proteins. |
| 1660 | BL01100B | 12.73 | 1.000e−40 | 42-85 | BL01100 | NNMT/PNMT/TEMT family |
| | | | | | | of methyltransferases |
| | | | | | | proteins. |
| 1660 | BL01100C | 10.34 | 6.211e−24 | 86-107 | BL01100 | NNMT/PNMT/TEMT family |
| | | | | | | of methyltransferases |
| | | | | | | proteins. |
| 1660 | BL01100D | 14.77 | 9.357e−23 | 110-134 | BL01100 | NNMT/PNMT/TEMT family |
| | | | | | | of methyltransferases |
| | | | | | | proteins. |
| 1660 | BL01100E | 12.25 | 1.000e−40 | 156-199 | BL01100 | NNMT/PNMT/TEMT family |
| | | | | | | of methyltransferases |
| | | | | | | proteins. |
| 1660 | BL01100F | 14.30 | 6.595e−28 | 200-232 | BL01100 | NNMT/PNMT/TEMT family |
| | | | | | | of methyltransferases |
| | | | | | | proteins. |
| 1660 | BL01100G | 14.70 | 9.780e−19 | 238-259 | BL01100 | NNMT/PNMT/TEMT family |
| | | | | | | of methyltransferases |
| | | | | | | proteins. |
| 1661 | BL00548 | 20.58 | 7.000e−19 | 66-95 | BL00548 | Ribosomal protein S3 |
| | | | | | | proteins. |
| 1661 | BL00765A | 13.27 | 1.000e−08 | 158-178 | BL00765 | Phosphoglucose |
| | | | | | | isomerase proteins. |
| 1661 | PF00013 | 5.78 | 4.706e−10 | 58-69 | PF00013 | KH domain proteins |
| | | | | | | family of RNA binding |
| | | | | | | proteins. |
| 1662 | PD01733B | 20.44 | 4.375e−09 | 410-464 | PD01733 | APOLIPOPROTEIN PLASMA |
| | | | | | | LIPID TRANSPORT H. |
| 1663 | BL00267 | 14.21 | 8.667e−10 | 81-90 | BL00267 | Tachykinin family |
| | | | | | | proteins. |
| 1664 | DM00372A | 19.18 | 1.000e−40 | 19-63 | DM00372 | CARCINOEMBRYONIC |
| | | | | | | ANTIGEN PRECURSOR |
| | | | | | | AMINO-TERMINAL DOMAIN. |
| 1664 | DM00372B | 20.31 | 9.229e−38 | 82-126 | DM00372 | CARCINOEMBRYONIC |
| | | | | | | ANTIGEN PRECURSOR |
| | | | | | | AMINO-TERMINAL DOMAIN. |
| 1664 | DM00372C | 23.69 | 2.552e−28 | 321-356 | DM00372 | CARCINOEMBRYONIC |
| | | | | | | ANTIGEN PRECURSOR |
| | | | | | | AMINO-TERMINAL DOMAIN. |
| 1664 | PD01270D | 24.66 | 1.000e−09 | 378-413 | PD01270 | RECEPTOR FC |
| | | | | | | IMMUNOGLOBULIN AFFIN. |
| 1665 | DM01269A | 23.35 | 1.600e−20 | 68-95 | DM01269 | 303 kw ACTIVATING RAN |
| | | | | | | GTPASE ISOZYME. |
| 1665 | DM01269B | 11.71 | 3.323e−09 | 138-147 | DM01269 | 303 kw ACTIVATING RAN |
| | | | | | | GTPASE ISOZYME. |
| 1665 | PF00638 | 11.91 | 4.600e−18 | 67-81 | PF00638 | RanBP1 domain proteins. |
| 1666 | BL00633B | 13.82 | 7.097e−16 | 166-190 | BL00633 | Bromodomain proteins. |
| 1666 | PR00503B | 9.96 | 9.571e−13 | 165-181 | PR00503 | BROMODOMAIN SIGNATURE |
| 1666 | PR00503C | 19.84 | 7.563e−09 | 181-199 | PR00503 | BROMODOMAIN SIGNATURE |
| 1666 | PR00503D | 20.81 | 2.313e−11 | 199-218 | PR00503 | BROMODOMAIN SIGNATURE |
| 1670 | BL00282 | 16.88 | 8.875e−12 | 464-486 | BL00282 | Kazal serine protease |
| | | | | | | inhibitors family |
| | | | | | | proteins. |
| 1670 | BL00612A | 12.09 | 3.136e−11 | 3-18 | BL00612 | Osteonectin domain |
| | | | | | | proteins. |
| 1670 | BL00612B | 11.35 | 6.625e−29 | 431-463 | BL00612 | Osteonectin domain |
| | | | | | | proteins. |
| 1670 | BL00612C | 9.90 | 1.000e−40 | 496-543 | BL00612 | Osteonectin domain |
| | | | | | | proteins. |
| 1670 | BL00612D | 10.06 | 1.000e−40 | 563-613 | BL00612 | Osteonectin domain |
| | | | | | | proteins. |
| 1670 | BL00612E | 13.12 | 1.000e−40 | 617-661 | BL00612 | Osteonectin domain |
| | | | | | | proteins. |
| 1671 | BL00061A | 9.41 | 6.684e−11 | 83-93 | BL00061 | Short-chain |
| | | | | | | dehydrogenases/reductases |
| | | | | | | family proteins. |
| 1671 | BL00061B | 25.79 | 7.158e−19 | 136-173 | BL00061 | Short-chain |
| | | | | | | dehydrogenases/reductases |
| | | | | | | family proteins. |
| 1671 | PR00080A | 9.32 | 9.667e−11 | 83-94 | PR00080 | ALCOHOL DEHYDROGENASE |
| | | | | | | SUPERFAMILY SIGNATURE |
| 1671 | PR00080C | 17.16 | 2.125e−10 | 156-175 | PR00080 | ALCOHOL DEHYDROGENASE |
| | | | | | | SUPERFAMILY SIGNATURE |
| 1671 | PR00081A | 10.53 | 7.000e−12 | 5-22 | PR00081 | GLUCOSE/RIBITOL |
| | | | | | | DEHYDROGENASE FAMILY |
| | | | | | | SIGNATURE |
| 1671 | PR00081B | 10.38 | 3.368e−10 | 83-94 | PR00081 | GLUCOSE/RIBITOL |
| | | | | | | DEHYDROGENASE FAMILY |
| | | | | | | SIGNATURE |
| 1671 | PR00081C | 15.13 | 6.586e−10 | 130-146 | PR00081 | GLUCOSE/RIBITOL |
| | | | | | | DEHYDROGENASE FAMILY |
| | | | | | | SIGNATURE |
| 1672 | BL00139A | 10.29 | 1.000e−14 | 132-141 | BL00139 | Eukaryotic thiol |
| | | | | | | (cysteine) proteases |
| | | | | | | cysteine proteins. |
| 1672 | BL00139B | 10.19 | 6.571e−09 | 175-183 | BL00139 | Eukaryotic thiol |
| | | | | | | (cysteine) proteases |
| | | | | | | cysteine proteins. |
| 1672 | BL00139C | 9.23 | 2.800e−10 | 275-284 | BL00139 | Eukaryotic thiol |
| | | | | | | (cysteine) proteases |
| | | | | | | cysteine proteins. |
| 1672 | BL00139D | 9.24 | 1.818e−18 | 295-311 | BL00139 | Eukaryotic thiol |
| | | | | | | (cysteine) proteases |
| | | | | | | cysteine proteins. |
| 1672 | PD01919E | 19.31 | 7.582e−10 | 73-98 | PD01919 | PROTEIN PROCESSING |
| | | | | | | TRANSPORT CAPSID |
| | | | | | | ASSEMBLY PR. |
| 1672 | PR00704C | 11.88 | 6.162e−09 | 132-148 | PR00704 | CALPAIN CYSTEINE |
| | | | | | | PROTEASE (C2) FAMILY |
| | | | | | | SIGNATURE |
| 1672 | PR00705A | 10.55 | 4.000e−21 | 132-147 | PR00705 | PAPAIN CYSTEINE |
| | | | | | | PROTEASE (C1) FAMILY |
| | | | | | | SIGNATURE |
| 1672 | PR00705B | 10.22 | 2.385e−10 | 276-286 | PR00705 | PAPAIN CYSTEINE |
| | | | | | | PROTEASE (C1) FAMILY |
| | | | | | | SIGNATURE |
| 1673 | BL00610A | 17.73 | 1.000e−40 | 60-109 | BL00610 | Sodium: neurotransmitter |
| | | | | | | symporter family |
| | | | | | | proteins. |
| 1673 | BL00610B | 23.65 | 1.000e−40 | 123-172 | BL00610 | Sodium: neurotransmitter |
| | | | | | | symporter family |
| | | | | | | proteins. |
| 1673 | BL00610C | 12.94 | 1.000e−40 | 233-284 | BL00610 | Sodium: neurotransmitter |
| | | | | | | symporter family |
| | | | | | | proteins. |
| 1673 | BL00610D | 20.97 | 1.000e−40 | 299-351 | BL00610 | Sodium: neurotransmitter |
| | | | | | | symporter family |
| | | | | | | proteins. |
| 1673 | BL00610E | 20.34 | 3.423e−39 | 392-434 | BL00610 | Sodium: neurotransmitter |
| | | | | | | symporter family |
| | | | | | | proteins. |
| 1673 | BL00610F | 29.02 | 1.000e−40 | 491-545 | BL00610 | Sodium: neurotransmitter |
| | | | | | | symporter family |
| | | | | | | proteins. |
| 1673 | BL00610G | 12.89 | 4.706e−25 | 551-573 | BL00610 | Sodium: neurotransmitter |
| | | | | | | symporter family |
| | | | | | | proteins. |
| 1673 | PR00176A | 16.82 | 8.500e−28 | 60-81 | PR00176 | SODIUM/NEUROTRANSMITTER |
| | | | | | | SYMPORTER SIGNATURE |
| 1673 | PR00176B | 7.31 | 7.250e−18 | 89-108 | PR00176 | SODIUM/NEUROTRANSMITTER |
| | | | | | | SYMPORTER SIGNATURE |
| 1673 | PR00176C | 10.84 | 8.714e−27 | 132-158 | PR00176 | SODIUM/NEUROTRANSMITTER |
| | | | | | | SYMPORTER SIGNATURE |
| 1673 | PR00176D | 9.02 | 1.783e−19 | 260-277 | PR00176 | SODIUM/NEUROTRANSMITTER |
| | | | | | | SYMPORTER SIGNATURE |
| 1673 | PR00176E | 11.41 | 7.000e−21 | 342-362 | PR00176 | SODIUM/NEUROTRANSMITTER |
| | | | | | | SYMPORTER SIGNATURE |
| 1673 | PR00176F | 10.73 | 2.333e−20 | 396-415 | PR00176 | SODIUM/NEUROTRANSMITTER |
| | | | | | | SYMPORTER SIGNATURE |
| 1673 | PR00176G | 12.48 | 7.857e−20 | 480-500 | PR00176 | SODIUM/NEUROTRANSMITTER |
| | | | | | | SYMPORTER SIGNATURE |
| 1673 | PR00176H | 15.27 | 5.500e−21 | 520-540 | PR00176 | SODIUM/NEUROTRANSMITTER |
| | | | | | | SYMPORTER SIGNATURE |
| 1674 | BL00309C | 18.65 | 1.621e−09 | 62-86 | BL00309 | Vertebrate galactoside- |
| | | | | | | binding lectin |
| | | | | | | proteins. |
| 1675 | BL00113A | 12.74 | 9.585e−09 | 157-173 | BL00113 | Adenylate kinase |
| | | | | | | proteins. |
| 1675 | BL00690A | 6.87 | 3.455e−12 | 160-169 | BL00690 | DEAH-box subfamily ATP- |
| | | | | | | dependent helicases |
| | | | | | | proteins. |
| 1675 | BL00690B | 13.38 | 4.938e−18 | 191-208 | BL00690 | DEAH-box subfamily ATP- |
| | | | | | | dependent helicases |
| | | | | | | proteins. |
| 1675 | BL00690C | 7.51 | 8.650e−11 | 257-266 | BL00690 | DEAH-box subfamily ATP- |
| | | | | | | dependent helicases |
| | | | | | | proteins. |
| 1675 | DM00406 | 7.73 | 9.514e−10 | 392-404 | DM00406 | GLIADIN. |
| 1676 | BL01082 | 20.37 | 3.500e−09 | 47-86 | BL01082 | Ribosomal protein L7Ae |
| | | | | | | proteins. |
| 1676 | BL01189A | 14.27 | 1.000e−40 | 35-70 | BL01189 | Ribosomal protein S12e |
| | | | | | | proteins. |
| 1676 | BL01189B | 13.49 | 1.000e−40 | 71-124 | BL01189 | Ribosomal protein S12e |
| | | | | | | proteins. |
| 1676 | PR00972A | 8.01 | 6.625e−17 | 21-34 | PR00972 | RIBOSOMAL PROTEIN S12E |
| | | | | | | FAMILY SIGNATURE |
| 1676 | PR00972B | 8.62 | 9.000e−21 | 35-51 | PR00972 | RIBOSOMAL PROTEIN S12E |
| | | | | | | FAMILY SIGNATURE |
| 1676 | PR00972C | 10.31 | 1.500e−26 | 76-97 | PR00972 | RIBOSOMAL PROTEIN S12E |
| | | | | | | FAMILY SIGNATURE |
| 1676 | PR00972D | 10.15 | 1.000e−18 | 101-114 | PR00972 | RIBOSOMAL PROTEIN S12E |
| | | | | | | FAMILY SIGNATURE |
| 1677 | PF00043 | 21.83 | 3.647e−22 | 54-83 | PF00043 | Glutathione S- |
| | | | | | | transferases. |
| 1677 | PR00455B | 17.47 | 5.227e−09 | 60-83 | PR00455 | TETR BACTERIAL |
| | | | | | | REGULATORY PROTEIN HTH |
| | | | | | | SIGNATURE |
| 1678 | BL00501A | 21.02 | 7.333e−18 | 106-131 | BL00501 | Signal peptidases I |
| | | | | | | serine proteins. |
| 1678 | BL00501B | 12.58 | 9.735e−11 | 132-147 | BL00501 | Signal peptidases I |
| | | | | | | serine proteins. |
| 1678 | BL00501C | 9.61 | 4.000e−10 | 156-167 | BL00501 | Signal peptidases I |
| | | | | | | serine proteins. |
| 1678 | BL00501D | 16.69 | 1.000e−15 | 179-198 | BL00501 | Signal peptidases I |
| | | | | | | serine proteins. |
| 1678 | PR00728A | 13.14 | 1.750e−20 | 125-140 | PR00728 | EUKARYOTIC SIGNAL |
| | | | | | | PEPTIDASE (S27) FAMILY |
| | | | | | | SIGNATURE |
| 1678 | PR00728B | 11.12 | 1.000e−15 | 184-195 | PR00728 | EUKARYOTIC SIGNAL |
| | | | | | | PEPTIDASE (S27) FAMILY |
| | | | | | | SIGNATURE |
| 1683 | BL01019A | 13.20 | 3.859e−10 | 57-96 | BL01019 | ADP-ribosylation |
| | | | | | | factors family |
| | | | | | | proteins. |
| 1683 | BL01115A | 10.22 | 9.735e−12 | 23-66 | BL01115 | GTP-binding nuclear |
| | | | | | | protein ran proteins. |
| 1683 | PR00449A | 13.20 | 3.400e−15 | 23-44 | PR00449 | TRANSFORMING PROTEIN |
| | | | | | | P21 RAS SIGNATURE |
| 1683 | PR00449B | 14.34 | 2.800e−10 | 46-62 | PR00449 | TRANSFORMING PROTEIN |
| | | | | | | P21 RAS SIGNATURE |
| 1683 | PR00449C | 17.27 | 8.941e−19 | 64-86 | PR00449 | TRANSFORMING PROTEIN |
| | | | | | | P21 RAS SIGNATURE |
| 1683 | PR00449D | 10.79 | 3.864e−12 | 126-139 | PR00449 | TRANSFORMING PROTEIN |
| | | | | | | P21 RAS SIGNATURE |
| 1683 | PR00449E | 13.50 | 6.478e−15 | 161-183 | PR00449 | TRANSFORMING PROTEIN |
| | | | | | | P21 RAS SIGNATURE |
| 1684 | BL00604A | 9.13 | 8.842e−20 | 49-103 | BL00604 | Synaptophysin/ |
| | | | | | | synaptoporin proteins. |
| 1684 | BL00604B | 9.95 | 1.329e−19 | 114-143 | BL00604 | Synaptophysin/ |
| | | | | | | synaptoporin proteins. |
| 1684 | BL00604C | 14.66 | 5.639e−12 | 144-175 | BL00604 | Synaptophysin/ |
| | | | | | | synaptoporin proteins. |
| 1684 | BL00604D | 12.28 | 5.410e−11 | 176-210 | BL00604 | Synaptophysin/ |
| | | | | | | synaptoporin proteins. |
| 1684 | BL00604E | 8.32 | 1.444e−23 | 210-251 | BL00604 | Synaptophysin/ |
| | | | | | | synaptoporin proteins. |
| 1684 | PR00220A | 10.93 | 8.244e−24 | 46-68 | PR00220 | SYNAPTOPHYSIN/SYNAPTOPORIN |
| | | | | | | FAMILY SIGNATURE |
| 1684 | PR00220B | 15.48 | 4.462e−24 | 70-95 | PR00220 | SYNAPTOPHYSIN/SYNAPTOPORIN |
| | | | | | | FAMILY SIGNATURE |
| 1684 | PR00220C | 11.05 | 4.477e−25 | 127-151 | PR00220 | SYNAPTOPHYSIN/SYNAPTOPORIN |
| | | | | | | FAMILY SIGNATURE |
| 1684 | PR00220D | 8.32 | 7.585e−26 | 159-182 | PR00220 | SYNAPTOPHYSIN/SYNAPTOPORIN |
| | | | | | | FAMILY SIGNATURE |
| 1684 | PR00220E | 3.46 | 6.932e−23 | 225-243 | PR00220 | SYNAPTOPHYSIN/SYNAPTOPORIN |
| | | | | | | FAMILY SIGNATURE |
| 1685 | BL00142 | 8.38 | 5.909e−11 | 352-362 | BL00142 | Neutral zinc |
| | | | | | | metallopeptidases, |
| | | | | | | zinc-binding region |
| | | | | | | proteins. |
| 1685 | BL00427 | 13.93 | 6.918e−24 | 449-503 | BL00427 | Disintegrins proteins. |
| 1685 | PR00289A | 13.62 | 5.000e−19 | 463-482 | PR00289 | DISINTEGRIN SIGNATURE |
| 1685 | PR00289B | 11.79 | 2.500e−12 | 492-504 | PR00289 | DISINTEGRIN SIGNATURE |
| 1685 | PR00480B | 15.41 | 8.500e−10 | 347-365 | PR00480 | ASTACIN FAMILY |
| | | | | | | SIGNATURE |
| 1686 | BL00421A | 11.79 | 4.600e−15 | 67-85 | BL00421 | Transmembrane 4 family |
| | | | | | | proteins. |
| 1686 | BL00421B | 17.62 | 9.000e−34 | 118-156 | BL00421 | Transmembrane 4 family |
| | | | | | | proteins. |
| 1686 | BL00421C | 12.89 | 2.333e−11 | 203-214 | BL00421 | Transmembrane 4 family |
| | | | | | | proteins. |
| 1686 | BL00421E | 20.97 | 4.500e−21 | 287-316 | BL00421 | Transmembrane 4 family |
| | | | | | | proteins. |
| 1686 | PR00174A | 8.67 | 8.105e−09 | 71-93 | PR00174 | LACY PROTON/SUGAR |
| | | | | | | SYMPORTER SIGNATURE |
| 1686 | PR00259A | 9.27 | 2.742e−21 | 71-94 | PR00259 | TRANSMEMBRANE FOUR |
| | | | | | | FAMILY SIGNATURE |
| 1686 | PR00259B | 14.81 | 6.727e−23 | 112-138 | PR00259 | TRANSMEMBRANE FOUR |
| | | | | | | FAMILY SIGNATURE |
| 1686 | PR00259C | 16.40 | 1.265e−22 | 139-167 | PR00259 | TRANSMEMBRANE FOUR |
| | | | | | | FAMILY SIGNATURE |
| 1686 | PR00259D | 13.50 | 6.250e−23 | 290-316 | PR00259 | TRANSMEMBRANE FOUR |
| | | | | | | FAMILY SIGNATURE |
| 1688 | BL00291A | 4.49 | 5.345e−09 | 138-172 | BL00291 | Prion protein. |
| 1688 | BL00291A | 4.49 | 7.724e−09 | 132-166 | BL00291 | Prion protein. |
| 1688 | DM01724 | 8.14 | 4.553e−09 | 156-175 | DM01724 | kw ALLERGEN POLLEN CIM1 |
| | | | | | | HOL-LI. |
| 1689 | PD01861A | 14.06 | 4.836e−11 | 60-83 | PD01861 | PROTEIN NUCLEAR |
| | | | | | | RIBONUCLEOPROTEIN SMALL |
| | | | | | | MRNA RNA. |
| 1691 | BL00107A | 18.39 | 6.760e−13 | 280-310 | BL00107 | Protein kinases ATP- |
| | | | | | | binding region |
| | | | | | | proteins. |
| 1691 | BL00107B | 13.31 | 1.000e−14 | 344-359 | BL00107 | Protein kinases ATP- |
| | | | | | | binding region |
| | | | | | | proteins. |
| 1691 | DM00191A | 8.16 | 4.840e−09 | 663-675 | DM00191 | w SPAC8A4.04C |
| | | | | | | RESISTANCE SPAC8A4.05C |
| | | | | | | DAUNORUBICIN. |

### Example 6

### Prediction of Signal Peptide Sequences contained in the Polypeptides of the Invention

[0287] The signal peptide regions for a plurality of the polypeptides of the invention were predicted using the Neural Network SignalP V1.1 program (Nielsen et al, (1997) Int. J. Neural Syst. 8, 581-599 herein incorporated by reference). One of skill in the art will recognize that the actual cleavage site may be different than that predicted by the computer program. The following table depicts the polypeptides of the invention that are predicted to have an N-terminal signal peptide, and lists the output from the SignalP program:

TABLE 5

| SEQ ID NO: | Max_score | Mean_score | Cleavage_Position |
|---|---|---|---|
| 865 | 0.979 | 0.879 | 34 |
| 870 | 0.896 | 0.685 | 23 |
| 876 | 0.979 | 0.854 | 33 |
| 893 | 0.941 | 0.838 | 15 |
| 895 | 0.989 | 0.619 | 44 |
| 897 | 0.954 | 0.805 | 25 |
| 898 | 0.897 | 0.486 | 21 |
| 904 | 0.959 | 0.826 | 28 |
| 906 | 0.931 | 0.729 | 30 |
| 919 | 0.958 | 0.608 | 39 |
| 921 | 0.980 | 0.932 | 26 |
| 923 | 0.970 | 0.872 | 22 |
| 930 | 0.943 | 0.602 | 23 |
| 934 | 0.897 | 0.678 | 23 |
| 937 | 0.956 | 0.597 | 43 |
| 938 | 0.882 | 0.547 | 25 |
| 939 | 0.967 | 0.532 | 16 |
| 942 | 0.926 | 0.509 | 36 |
| 943 | 0.896 | 0.540 | 25 |
| 954 | 0.997 | 0.951 | 36 |
| 959 | 0.979 | 0.751 | 39 |
| 960 | 0.983 | 0.637 | 36 |
| 964 | 0.964 | 0.819 | 26 |
| 968 | 0.943 | 0.645 | 38 |
| 969 | 0.969 | 0.597 | 30 |
| 970 | 0.958 | 0.821 | 30 |
| 973 | 0.945 | 0.587 | 37 |
| 974 | 0.910 | 0.623 | 25 |
| 988 | 0.991 | 0.971 | 27 |
| 994 | 0.914 | 0.628 | 26 |
| 999 | 0.970 | 0.659 | 21 |
| 1000 | 0.958 | 0.526 | 49 |
| 1004 | 0.979 | 0.941 | 19 |
| 1016 | 0.987 | 0.926 | 23 |
| 1025 | 0.894 | 0.561 | 28 |
| 1030 | 0.994 | 0.965 | 30 |
| 1033 | 0.962 | 0.865 | 26 |
| 1040 | 0.941 | 0.805 | 32 |
| 1041 | 0.981 | 0.795 | 45 |
| 1045 | 0.935 | 0.833 | 26 |
| 1046 | 0.962 | 0.558 | 46 |
| 1051 | 0.986 | 0.597 | 49 |
| 1058 | 0.975 | 0.901 | 19 |
| 1060 | 0.933 | 0.705 | 17 |
| 1062 | 0.982 | 0.513 | 49 |
| 1063 | 0.939 | 0.545 | 33 |
| 1066 | 0.945 | 0.754 | 47 |
| 1067 | 0.944 | 0.819 | 25 |
| 1072 | 0.989 | 0.673 | 44 |
| 1085 | 0.974 | 0.512 | 49 |
| 1087 | 0.958 | 0.770 | 16 |
| 1094 | 0.968 | 0.571 | 36 |
| 1095 | 0.968 | 0.617 | 42 |
| 1096 | 0.976 | 0.893 | 25 |
| 1102 | 0.961 | 0.933 | 20 |
| 1103 | 0.932 | 0.552 | 19 |
| 1114 | 0.980 | 0.568 | 47 |
| 1115 | 0.990 | 0.815 | 22 |
| 1119 | 0.985 | 0.935 | 21 |
| 1130 | 0.955 | 0.661 | 37 |
| 1134 | 0.985 | 0.614 | 21 |
| 1138 | 0.975 | 0.872 | 34 |
| 1140 | 0.965 | 0.749 | 23 |
| 1149 | 0.960 | 0.775 | 18 |
| 1151 | 0.991 | 0.727 | 34 |
| 1155 | 0.982 | 0.496 | 47 |
| 1156 | 0.944 | 0.794 | 29 |
| 1160 | 0.947 | 0.603 | 47 |
| 1162 | 0.954 | 0.745 | 31 |
| 1164 | 0.927 | 0.651 | 43 |
| 1194 | 0.948 | 0.680 | 27 |
| 1201 | 0.957 | 0.899 | 18 |
| 1207 | 0.975 | 0.935 | 18 |
| 1210 | 0.977 | 0.935 | 26 |
| 1211 | 0.985 | 0.822 | 47 |
| 1224 | 0.983 | 0.904 | 21 |
| 1228 | 0.951 | 0.544 | 47 |
| 1238 | 0.966 | 0.713 | 45 |
| 1255 | 0.939 | 0.495 | 39 |
| 1263 | 0.991 | 0.619 | 46 |
| 1266 | 0.992 | 0.806 | 39 |
| 1271 | 0.929 | 0.666 | 34 |
| 1279 | 0.966 | 0.857 | 20 |
| 1280 | 0.921 | 0.777 | 28 |
| 1282 | 0.993 | 0.927 | 19 |
| 1283 | 0.995 | 0.867 | 22 |
| 1286 | 0.965 | 0.894 | 18 |
| 1287 | 0.986 | 0.935 | 24 |
| 1288 | 0.979 | 0.733 | 32 |
| 1291 | 0.987 | 0.785 | 28 |
| 1304 | 0.920 | 0.712 | 24 |
| 1307 | 0.927 | 0.586 | 45 |
| 1308 | 0.979 | 0.963 | 18 |
| 1309 | 0.963 | 0.840 | 24 |
| 1310 | 0.967 | 0.839 | 22 |
| 1314 | 0.995 | 0.929 | 23 |
| 1316 | 0.978 | 0.873 | 24 |
| 1331 | 0.975 | 0.888 | 19 |
| 1332 | 0.961 | 0.796 | 29 |
| 1333 | 0.965 | 0.873 | 27 |
| 1339 | 0.910 | 0.631 | 25 |
| 1342 | 0.973 | 0.884 | 34 |
| 1346 | 0.933 | 0.725 | 29 |
| 1356 | 0.975 | 0.821 | 34 |
| 1365 | 0.929 | 0.632 | 39 |
| 1367 | 0.962 | 0.919 | 22 |
| 1376 | 0.955 | 0.849 | 33 |
| 1384 | 0.987 | 0.576 | 39 |
| 1389 | 0.984 | 0.889 | 26 |
| 1390 | 0.980 | 0.559 | 36 |
| 1395 | 0.974 | 0.933 | 22 |
| 1396 | 0.967 | 0.941 | 16 |
| 1398 | 0.943 | 0.829 | 24 |
| 1402 | 0.969 | 0.721 | 41 |
| 1403 | 0.934 | 0.815 | 26 |
| 1405 | 0.920 | 0.505 | 22 |
| 1409 | 0.985 | 0.939 | 24 |
| 1412 | 0.963 | 0.878 | 29 |
| 1417 | 0.957 | 0.640 | 35 |
| 1418 | 0.946 | 0.873 | 18 |
| 1419 | 0.975 | 0.645 | 37 |
| 1420 | 0.976 | 0.867 | 24 |
| 1421 | 0.985 | 0.917 | 20 |
| 1429 | 0.980 | 0.908 | 17 |
| 1430 | 0.910 | 0.712 | 28 |
| 1431 | 0.984 | 0.939 | 22 |
| 1433 | 0.974 | 0.908 | 20 |
| 1437 | 0.966 | 0.542 | 38 |
| 1438 | 0.981 | 0.941 | 27 |
| 1445 | 0.959 | 0.771 | 26 |
| 1449 | 0.988 | 0.897 | 18 |
| 1452 | 0.966 | 0.782 | 31 |
| 1455 | 0.978 | 0.944 | 22 |
| 1456 | 0.950 | 0.919 | 19 |
| 1458 | 0.974 | 0.913 | 22 |
| 1465 | 0.983 | 0.957 | 22 |
| 1467 | 0.977 | 0.937 | 20 |
| 1471 | 0.906 | 0.601 | 22 |
| 1478 | 0.959 | 0.491 | 45 |
| 1479 | 0.968 | 0.883 | 24 |
| 1480 | 0.976 | 0.916 | 22 |
| 1484 | 0.981 | 0.897 | 28 |
| 1485 | 0.972 | 0.956 | 17 |
| 1488 | 0.983 | 0.838 | 20 |
| 1489 | 0.965 | 0.869 | 18 |
| 1492 | 0.914 | 0.677 | 17 |
| 1495 | 0.945 | 0.825 | 21 |
| 1496 | 0.993 | 0.975 | 16 |
| 1498 | 0.957 | 0.891 | 19 |
| 1500 | 0.984 | 0.832 | 33 |
| 1509 | 0.996 | 0.921 | 42 |
| 1512 | 0.977 | 0.835 | 16 |
| 1515 | 0.986 | 0.945 | 20 |
| 1518 | 0.978 | 0.885 | 26 |
| 1520 | 0.996 | 0.924 | 22 |
| 1527 | 0.955 | 0.521 | 46 |
| 1528 | 0.991 | 0.502 | 48 |
| 1532 | 0.989 | 0.903 | 17 |
| 1533 | 0.987 | 0.971 | 15 |
| 1536 | 0.983 | 0.956 | 17 |
| 1538 | 0.978 | 0.915 | 25 |
| 1539 | 0.983 | 0.940 | 20 |
| 1540 | 0.965 | 0.799 | 28 |
| 1542 | 0.981 | 0.865 | 26 |
| 1545 | 0.939 | 0.502 | 9 |
| 1549 | 0.966 | 0.902 | 26 |
| 1551 | 0.990 | 0.965 | 16 |
| 1552 | 0.991 | 0.927 | 18 |
| 1554 | 0.979 | 0.895 | 31 |
| 1557 | 0.963 | 0.884 | 24 |
| 1559 | 0.977 | 0.922 | 24 |
| 1560 | 0.969 | 0.901 | 27 |
| 1561 | 0.980 | 0.946 | 25 |
| 1565 | 0.982 | 0.886 | 24 |
| 1568 | 0.962 | 0.801 | 27 |
| 1575 | 0.984 | 0.958 | 18 |
| 1576 | 0.938 | 0.818 | 25 |
| 1581 | 0.963 | 0.887 | 23 |
| 1583 | 0.970 | 0.935 | 13 |
| 1585 | 0.900 | 0.641 | 34 |
| 1587 | 0.968 | 0.902 | 19 |
| 1590 | 0.981 | 0.955 | 20 |
| 1592 | 0.966 | 0.909 | 27 |
| 1594 | 0.970 | 0.931 | 15 |
| 1597 | 0.977 | 0.905 | 23 |
| 1613 | 0.970 | 0.910 | 22 |
| 1618 | 0.976 | 0.840 | 21 |
| 1619 | 0.982 | 0.908 | 31 |
| 1622 | 0.978 | 0.879 | 26 |
| 1625 | 0.929 | 0.805 | 24 |
| 1631 | 0.991 | 0.972 | 16 |
| 1633 | 0.979 | 0.871 | 28 |
| 1635 | 0.959 | 0.816 | 19 |
| 1636 | 0.918 | 0.692 | 13 |
| 1643 | 0.990 | 0.901 | 21 |
| 1649 | 0.962 | 0.921 | 20 |
| 1654 | 0.979 | 0.865 | 31 |
| 1663 | 0.989 | 0.966 | 16 |
| 1667 | 0.980 | 0.916 | 37 |
| 1669 | 0.953 | 0.496 | 34 |
| 1670 | 0.988 | 0.951 | 16 |
| 1672 | 0.966 | 0.913 | 17 |
| 1681 | 0.927 | 0.671 | 20 |
| 1685 | 0.967 | 0.593 | 36 |
| 1695 | 0.986 | 0.919 | 18 |
| 1697 | 0.898 | 0.716 | 24 |
| 1702 | 0.940 | 0.837 | 19 |
| 1703 | 0.994 | 0.620 | 43 |

### Example 7

### Prediction of Transmembrane Regions of the Polypeptides of the Invention

[0288] Regions of the polypeptides of the invention that cross a cellular lipid bilayer or membrane were predicted using the TMPRED computer program (Hofmann et al. Biol. Chem. Hoppe-Seyler 374,166 hereby incorporated herein by reference). The following table describes the plurality of polypeptides of the invention that contain at least one predicted transmembrane domain:

TABLE 6

| | Number of | | |
|---|---|---|---|
| | Predicted | | Domain |
| | Transmembrane | Total | Location: |
| SEQ ID NO: | Regions | Score | Score |
| 854 | 1 | 2088 | 115-138: 2088 |
| 864 | 6 | 12660 | 56-78: 2631 |
| | | | 150-169: 1686 |
| | | | 243-258: 1737 |
| | | | 336-359: 1556 |
| | | | 379-394: 2572 |
| | | | 456-473: 2478 |
| 871 | 1 | 1947 | 434-454: 1947 |
| 873 | 4 | 8479 | 53-69: 2714 |
| | | | 136-152: 2014 |
| | | | 203-220: 1906 |
| | | | 509-526: 1845 |
| 875 | 1 | 1722 | 118-138: 1722 |
| 878 | 4 | 7527 | 68-86: 1551 |
| | | | 105-123: 1875 |
| | | | 272-290: 1556 |
| | | | 340-356: 2545 |
| 879 | 6 | 11423 | 127-148: 1678 |
| | | | 281-300: 2640 |
| | | | 393-412: 1662 |
| | | | 427-447: 1670 |
| | | | 543-559: 2249 |
| | | | 638-653: 1524 |
| 886 | 4 | 8588 | 104-120: 2019 |
| | | | 243-267: 2346 |
| | | | 335-350: 2222 |
| | | | 401-425: 2001 |
| 894 | 3 | 7997 | 141-156: 3090 |
| | | | 167-190: 1601 |
| | | | 207-226: 3306 |
| 896 | 1 | 2642 | 44-66: 2642 |
| 898 | 1 | 2578 | 87-106: 2578 |
| 908 | 1 | 1569 | 958-974: 1569 |
| 914 | 1 | 3089 | 502-524: 3089 |
| 918 | 1 | 2577 | 469-485: 2577 |
| 919 | 1 | 2819 | 233-254: 2819 |
| 926 | 3 | 6476 | 161-177: 2207 |
| | | | 254-270: 2180 |
| | | | 449-467: 2089 |
| 929 | 1 | 2228 | 121-136: 2228 |
| 934 | 6 | 12682 | 172-187: 2293 |
| | | | 237-258: 2056 |
| | | | 279-299: 1759 |
| | | | 329-351: 2812 |
| | | | 371-386: 2117 |
| | | | 408-429: 1645 |
| 937 | 1 | 2548 | 248-264: 2548 |
| 939 | 1 | 2181 | 93-114: 2181 |
| 941 | 2 | 3480 | 89-110: 1685 |
| | | | 135-154: 1795 |
| 946 | 1 | 2450 | 385-401: 2450 |
| 957 | 1 | 2151 | 97-117: 2151 |
| 960 | 3 | 5457 | 598-614: 1857 |
| | | | 707-724: 1544 |
| | | | 748-764: 2056 |
| 968 | 2 | 4661 | 49-71: 2672 |
| | | | 165-185: 1989 |
| 969 | 4 | 7843 | 89-105: 2039 |
| | | | 164-183: 2176 |
| | | | 224-243: 1514 |
| | | | 282-299: 2114 |
| 971 | 1 | 2123 | 100-118: 2123 |
| 978 | 1 | 2143 | 135-148: 2143 |
| 979 | 1 | 2131 | 49-66: 2131 |
| 986 | 1 | 1710 | 128-143: 1710 |
| 989 | 1 | 1979 | 112-130: 1979 |
| 997 | 1 | 1929 | 288-303: 1929 |
| 999 | 1 | 3084 | 178-199: 3084 |
| 1005 | 1 | 3072 | 73-90: 3072 |
| 1008 | 1 | 3073 | 641-660: 3073 |
| 1012 | 1 | 2019 | 910-925: 2019 |
| 1015 | 1 | 3454 | 396-416: 3454 |
| 1016 | 1 | 3369 | 581-605: 3369 |
| 1017 | 1 | 1618 | 644-663: 1618 |
| 1027 | 6 | 13013 | 80-96: 2887 |
| | | | 150-169: 2073 |
| | | | 227-243: 2086 |
| | | | 307-324: 1960 |
| | | | 404-419: 1773 |
| | | | 481-495: 2234 |
| 1028 | 1 | 1790 | 92-107: 1790 |
| 1030 | 1 | 1710 | 63-86: 1710 |
| 1035 | 1 | 2506 | 94-111: 2506 |
| 1040 | 1 | 1561 | 718-733: 1561 |
| 1041 | 4 | 8350 | 71-88: 1896 |
| | | | 291-307: 2812 |
| | | | 387-406: 1755 |
| | | | 474-490: 1887 |
| 1062 | 1 | 3368 | 258-278: 3368 |
| 1065 | 1 | 2643 | 336-358: 2643 |
| 1066 | 1 | 2406 | 49-70: 2406 |
| 1067 | 1 | 2700 | 493-510: 2700 |
| 1073 | 2 | 4203 | 135-168: 2597 |
| | | | 200-214: 1606 |
| 1075 | 4 | 6874 | 50-66: 1560 |
| | | | 139-155: 1995 |
| | | | 190-213: 1787 |
| | | | 291-305: 1532 |
| 1080 | 3 | 7420 | 116-132: 2923 |
| | | | 197-212: 2709 |
| | | | 223-239: 1788 |
| 1085 | 1 | 2097 | 195-216: 2097 |
| 1088 | 1 | 1996 | 74-89: 1996 |
| 1090 | 7 | 13484 | 68-88: 2007 |
| | | | 105-119: 1501 |
| | | | 141-159: 1687 |
| | | | 220-238: 2030 |
| | | | 296-311: 2033 |
| | | | 395-410: 1727 |
| | | | 452-471: 2499 |
| 1101 | 1 | 2000 | 403-423: 2000 |
| 1102 | 1 | 3504 | 743-764: 3504 |
| 1105 | 1 | 2219 | 351-369: 2219 |
| 1106 | 6 | 12120 | 68-88: 2342 |
| | | | 128-145: 1914 |
| | | | 185-206: 1521 |
| | | | 312-329: 2024 |
| | | | 365-380: 2531 |
| | | | 433-448: 1788 |
| 1111 | 1 | 1517 | 51-68: 1517 |
| 1113 | 1 | 3180 | 356-380: 3180 |
| 1116 | 1 | 2206 | 56-75: 2206 |
| 1124 | 2 | 4091 | 83-111: 2452 |
| | | | 130-148: 1639 |
| 1125 | 1 | 2998 | 160-181: 2998 |
| 1129 | 1 | 3163 | 779-799: 3163 |
| 1130 | 1 | 2744 | 102-126: 2744 |
| 1133 | 1 | 2029 | 112-129: 2029 |
| 1134 | 1 | 2206 | 736-757: 2206 |
| 1140 | 1 | 2750 | 87-99: 2750 |
| 1142 | 1 | 2922 | 105-123: 2922 |
| 1148 | 1 | 3113 | 294-316: 3113 |
| 1164 | 5 | 9520 | 483-502: 1826 |
| | | | 516-531: 1837 |
| | | | 584-605: 2275 |
| | | | 626-642: 1515 |
| | | | 674-690: 2067 |
| 1165 | 6 | 11860 | 92-112: 2331 |
| | | | 121-141: 1535 |
| | | | 209-230: 2031 |
| | | | 336-353: 1755 |
| | | | 389-406: 2107 |
| | | | 457-472: 2101 |
| 1166 | 4 | 7475 | 164-179: 1986 |
| | | | 229-248: 2015 |
| | | | 254-269: 1577 |
| | | | 286-306: 1897 |
| 1168 | 6 | 12530 | 109-122: 2345 |
| | | | 195-212: 1649 |
| | | | 344-366: 2101 |
| | | | 424-439: 2493 |
| | | | 455-474: 2000 |
| | | | 476-496: 1942 |
| 1170 | 1 | 2318 | 349-376: 2318 |
| 1175 | 1 | 1582 | 90-108: 1582 |
| 1176 | 1 | 1516 | 742-764: 1516 |
| 1179 | 1 | 2508 | 135-154: 2508 |
| 1185 | 1 | 1649 | 58-74: 1649 |
| 1190 | 1 | 2235 | 296-312: 2235 |
| 1194 | 1 | 2823 | 44-70: 2823 |
| 1196 | 1 | 2041 | 187-202: 2041 |
| 1199 | 1 | 3788 | 99-116: 3788 |
| 1201 | 1 | 1553 | 551-566: 1553 |
| 1207 | 4 | 8078 | 134-150: 2201 |
| | | | 237-258: 1652 |
| | | | 375-397: 2178 |
| | | | 484-501: 2047 |
| 1210 | 1 | 2222 | 118-132: 2222 |
| 1233 | 1 | 1704 | 49-67: 1704 |
| 1255 | 1 | 2677 | 84-106: 2677 |
| 1266 | 3 | 7330 | 59-76: 2685 |
| | | | 90-108: 1580 |
| | | | 195-221: 3065 |
| 1271 | 2 | 3771 | 634-650: 1766 |
| | | | 691-709: 2005 |
| 1273 | 2 | 4814 | 85-105: 2193 |
| | | | 216-241: 2621 |
| 1280 | 3 | 6011 | 58-74: 2642 |
| | | | 171-188: 1509 |
| | | | 228-250: 1860 |
| 1301 | 1 | 1651 | 112-131: 1651 |
| 1304 | 1 | 1960 | 187-209: 1960 |
| 1308 | 1 | 2729 | 212-229: 2729 |
| 1309 | 1 | 2154 | 564-579: 2154 |
| 1316 | 1 | 1634 | 90-105: 1634 |
| 1320 | 1 | 1847 | 134-150: 1847 |
| 1322 | 2 | 5403 | 83-98: 2412 |
| | | | 160-175: 2991 |
| 1324 | 1 | 2129 | 128-147: 2129 |
| 1327 | 1 | 1645 | 115-131: 1645 |
| 1333 | 1 | 2378 | 122-138: 2378 |
| 1334 | 1 | 2681 | 52-76: 2681 |
| 1342 | 1 | 1520 | 365-380: 1520 |
| 1343 | 1 | 2312 | 139-155: 2312 |
| 1356 | 1 | 2292 | 101-129: 2292 |
| 1376 | 1 | 1606 | 606-621: 1606 |
| 1377 | 4 | 8637 | 100-113: 2419 |
| | | | 294-313: 2702 |
| | | | 787-808: 1889 |
| | | | 985-1001: 1627 |
| 1379 | 2 | 5222 | 197-218: 2416 |
| | | | 277-297: 2806 |
| 1380 | 1 | 2398 | 102-120: 2398 |
| 1389 | 4 | 9882 | 177-192: 3257 |
| | | | 235-261: 2052 |
| | | | 276-291: 1761 |
| | | | 363-381: 2812 |
| 1393 | 2 | 4456 | 66-82: 2701 |
| | | | 110-126: 1755 |
| 1395 | 2 | 3335 | 263-279: 1511 |
| | | | 325-342: 1824 |
| 1400 | 1 | 1793 | 95-113: 1793 |
| 1402 | 2 | 4648 | 229-245: 1641 |
| | | | 313-333: 3007 |
| 1417 | 2 | 3802 | 92-114: 2061 |
| | | | 152-175: 1741 |
| 1425 | 6 | 13420 | 59-75: 1823 |
| | | | 112-127: 3392 |
| | | | 132-147: 1707 |
| | | | 180-193: 2193 |
| | | | 231-246: 1810 |
| | | | 331-346: 2495 |
| 1428 | 1 | 1923 | 60-78: 1923 |
| 1434 | 1 | 3041 | 111-129: 3041 |
| 1436 | 2 | 4541 | 103-118: 2057 |
| | | | 295-309: 2484 |
| 1444 | 1 | 1540 | 257-275: 1540 |
| 1445 | 1 | 2610 | 199-219: 2610 |
| 1449 | 3 | 6892 | 143-158: 1938 |
| | | | 181-198: 2860 |
| | | | 270-289: 2094 |
| 1455 | 1 | 2481 | 241-256: 2481 |
| 1459 | 5 | 10350 | 115-133: 2128 |
| | | | 183-195: 2109 |
| | | | 229-245: 1520 |
| | | | 288-307: 2678 |
| | | | 356-372: 1915 |
| 1478 | 1 | 2281 | 56-71: 2281 |
| 1484 | 1 | 2689 | 229-245: 2689 |
| 1495 | 1 | 2478 | 146-162: 2478 |
| 1496 | 2 | 5761 | 68-84: 2749 |
| | | | 144-163: 3012 |
| 1500 | 3 | 6144 | 81-99: 2768 |
| | | | 118-132: 1551 |
| | | | 166-182: 1825 |
| 1511 | 1 | 1528 | 76-91: 1528 |
| 1515 | 1 | 1775 | 201-233: 1775 |
| 1516 | 1 | 3335 | 71-93: 3335 |
| 1523 | 3 | 5593 | 128-145: 1794 |
| | | | 348-365: 1730 |
| | | | 438-455: 2069 |
| 1556 | 1 | 1521 | 147-166: 1521 |
| 1559 | 1 | 2828 | 628-650: 2828 |
| 1565 | 1 | 2718 | 306-332: 2718 |
| 1567 | 1 | 2660 | 54-72: 2660 |
| 1574 | 1 | 1922 | 504-519: 1922 |
| 1575 | 1 | 2773 | 306-332: 2773 |
| 1576 | 1 | 2661 | 218-239: 2661 |
| 1583 | 1 | 2635 | 352-369: 2635 |
| 1587 | 1 | 3196 | 518-538: 3196 |
| 1589 | 1 | 2059 | 78-99: 2059 |
| 1593 | 4 | 8614 | 164-178: 2254 |
| | | | 259-274: 2312 |
| | | | 325-340: 2378 |
| | | | 392-410: 1670 |
| 1594 | 1 | 2673 | 339-357: 2673 |
| 1616 | 1 | 2581 | 120-136: 2581 |
| 1618 | 1 | 3544 | 324-344: 3544 |
| 1619 | 1 | 1551 | 695-711: 1551 |
| 1622 | 1 | 1516 | 765-780: 1516 |
| 1635 | 1 | 3694 | 1258-1274: 3694 |
| 1638 | 1 | 1606 | 105-121: 1606 |
| 1640 | 1 | 4013 | 2045-2062: 4013 |
| 1645 | 1 | 1722 | 80-96: 1722 |
| 1655 | 1 | 2392 | 68-90: 2392 |
| 1673 | 8 | 14475 | 61-80: 1745 |
| | | | 129-154: 1690 |
| | | | 235-251: 1560 |
| | | | 262-277: 1971 |
| | | | 350-368: 2264 |
| | | | 398-415: 1642 |
| | | | 521-537: 1609 |
| | | | 559-577: 1994 |
| 1680 | 1 | 2286 | 145-162: 2286 |
| 1684 | 3 | 6111 | 131-149: 2670 |
| | | | 162-176: 1558 |
| | | | 223-243: 1883 |
| 1685 | 1 | 3127 | 709-725: 3127 |
| 1686 | 4 | 8443 | 73-88: 2001 |
| | | | 114-132: 2487 |
| | | | 143-168: 1531 |
| | | | 288-311: 2424 |
| 1687 | 1 | 2972 | 285-303: 2972 |
| 1701 | 1 | 3206 | 88-113: 3206 |

### Example 8

### Prediction of Chromosomal Location of the Polynucleotides of the Invention

[0289] Chromosomal location of the polynucleotide sequences of the invention was determined by using the BLASTN algorithm (Altschul et al. Nucleic Acids Res. 25 pp. 3389-3402 herein incorporated by reference). SEQ ID NO: 1 through 852 were aligned to the sequence of the human genome (Version date Nov. 3, 2002 from Genbank) using the BLASTN computer program. The chromosomal locations of the aligned human genome sequences were determined through the Genbank accession numbers of the aligned human genome sequences, which enabled retrieval of annotated chromosomal location from the Genbank database. The following table depicts the predicted chromosomal location of the polynucleotides of the invention (SEQ ID NO 1 through 852).

TABLE 7

| SEQ ID NO: | Chromsomal_location |
|---|---|
| 1 | 11q |
| 2 | 11q |
| 3 | 10 |
| 4 | 3 |
| 6 | 16 |
| 7 | 15 |
| 8 | 6 |
| 10 | 5 |
| 12 | 1 |
| 13 | 15 |
| 14 | 7 |
| 18 | 5 |
| 19 | 1 |
| 20 | 14 |
| 21 | 11 |
| 22 | Xp11.3-11.4 |
| 23 | 11 |
| 25 | 19 |
| 26 | 1 |
| 28 | 11 |
| 29 | 19 |
| 32 | 9 |
| 34 | 17 |
| 35 | 19 |
| 36 | 3 |
| 37 | 17 |
| 38 | 4 |
| 40 | 4 |
| 41 | 6 |
| 43 | 2 |
| 44 | 19 |
| 45 | 11 |
| 46 | X |
| 47 | 1 |
| 49 | 20 |
| 50 | 1 |
| 51 | 5 |
| 52 | 1 |
| 53 | 19 |
| 55 | 19 |
| 56 | 4 |
| 57 | 4 |
| 59 | 11q |
| 60 | 17 |
| 62 | 10 |
| 63 | 5 |
| 64 | 15 |
| 65 | 16 |
| 67 | 20 |
| 68 | Xq22.1-23 |
| 70 | 10 |
| 71 | 8 |
| 72 | 21 |
| 73 | 2 |
| 75 | 8 |
| 76 | 3 |
| 77 | 9 |
| 78 | 7 |
| 79 | 19 |
| 80 | 16 |
| 81 | 3 |
| 82 | 5 |
| 83 | 13 |
| 84 | 1p36.11-36.31 |
| 85 | 1p32.1-33 |
| 86 | 1p36.11-36.31 |
| 87 | 8 |
| 88 | 3 |
| 89 | 15 |
| 90 | 6p24.1-25.3 |
| 91 | 1 |
| 94 | 3 |
| 95 | 20 |
| 96 | 17 |
| 97 | 4 |
| 99 | 19 |
| 101 | 2 |
| 103 | 11q |
| 104 | 2 |
| 105 | X |
| 106 | 19 |
| 108 | 4 |
| 109 | 13q12.11-12.3 |
| 110 | 17 |
| 111 | 12 |
| 112 | 2 |
| 113 | X |
| 114 | 3 |
| 117 | 10 |
| 118 | 5 |
| 119 | 16 |
| 120 | 19 |
| 121 | X |
| 122 | 1 |
| 123 | 5 |
| 124 | 12 |
| 125 | 1 |
| 126 | 16 |
| 127 | 11q |
| 128 | 1 |
| 129 | 4 |
| 130 | 9q13-21.2 |
| 131 | 10 |
| 132 | 19 |
| 133 | 10 |
| 134 | 13 |
| 135 | 17 |
| 136 | 11q |
| 137 | 8 |
| 138 | 2 |
| 140 | 5 |
| 141 | 6 |
| 142 | 1 |
| 143 | 19 |
| 144 | 5 |
| 146 | 3 |
| 147 | 5 |
| 148 | 11 |
| 149 | 7 |
| 151 | 19 |
| 152 | 14 |
| 154 | 16 |
| 155 | 3 |
| 156 | 16 |
| 157 | 9p23-24.3 |
| 160 | 20 |
| 162 | 10 |
| 163 | 1 |
| 164 | 20p11.1-11.23 |
| 165 | 3 |
| 166 | 5 |
| 167 | 1 |
| 168 | 6 |
| 169 | 14 |
| 170 | 10 |
| 171 | 8 |
| 172 | 11 |
| 173 | 7 |
| 174 | 3 |
| 175 | 2 |
| 176 | 1p36.21-36.33 |
| 177 | 19 |
| 180 | 1q25.1-25.3 |
| 181 | X |
| 183 | 4 |
| 184 | 7 |
| 185 | 10 |
| 186 | 19 |
| 187 | 11q |
| 188 | 10 |
| 189 | Xp |
| 191 | 16 |
| 192 | 8 |
| 193 | 2 |
| 195 | 3p |
| 196 | 1 |
| 197 | 13 |
| 198 | 6q26-27 |
| 199 | 13 |
| 201 | 11 |
| 202 | 4 |
| 203 | 4 |
| 204 | 11 |
| 205 | 5 |
| 206 | 1 |
| 207 | 16 |
| 208 | 3 |
| 209 | 20 |
| 210 | 3 |
| 212 | 11 |
| 213 | 1 |
| 214 | 20 |
| 215 | 8 |
| 216 | 11q |
| 217 | 11q |
| 218 | 13 |
| 219 | 3 |
| 222 | 19 |
| 223 | 16 |
| 224 | 20 |
| 226 | 3 |
| 227 | 9q22.1-22.33 |
| 228 | 12 |
| 229 | 6p12.3-21.2 |
| 230 | 11q |
| 233 | 7 |
| 235 | 1 |
| 236 | 7 |
| 237 | 12 |
| 238 | 14 |
| 239 | 10 |
| 240 | 19 |
| 241 | 22q11.2 |
| 242 | 8 |
| 243 | 1q24 |
| 244 | 17 |
| 245 | 4 |
| 246 | 7 |
| 247 | 17 |
| 249 | 6 |
| 250 | 18 |
| 251 | 1 |
| 252 | 1 |
| 253 | 1 |
| 255 | Xq23 |
| 256 | 12 |
| 258 | 1 |
| 259 | 22 |
| 260 | X |
| 261 | 1p31.2-32.3 |
| 263 | 6 |
| 264 | 3 |
| 265 | 17 |
| 266 | 16 |
| 268 | 10 |
| 270 | 2 |
| 271 | 2 |
| 272 | 9 |
| 273 | 5 |
| 274 | 1 |
| 275 | 9 |
| 276 | 1 |
| 277 | 18 |
| 278 | 21 |
| 281 | 12 |
| 282 | 1 |
| 284 | 5 |
| 285 | 3 |
| 286 | 5 |
| 287 | 12 |
| 289 | 6 |
| 290 | 3 |
| 291 | 10 |
| 292 | 16 |
| 293 | 3 |
| 294 | 1p31.2-32.3 |
| 295 | 4 |
| 296 | 11q |
| 297 | 9 |
| 298 | 10 |
| 299 | 19 |
| 300 | 7 |
| 302 | 2 |
| 303 | 1 |
| 304 | 17 |
| 305 | 14 |
| 306 | 6q22.22-23.3 |
| 307 | 11 |
| 308 | 16 |
| 310 | 5 |
| 312 | 19 |
| 313 | 1 |
| 314 | 6 |
| 315 | 19 |
| 316 | 16 |
| 317 | 12 |
| 320 | 6 |
| 321 | 12 |
| 322 | 1 |
| 324 | 15 |
| 325 | 10 |
| 326 | 4 |
| 327 | 11 |
| 328 | 1 |
| 329 | 1q24.1-25.2 |
| 330 | 9 |
| 332 | 6q14.2-16.1 |
| 333 | 19 |
| 334 | 7 |
| 335 | 19 |
| 336 | 5 |
| 338 | 22 |
| 339 | 22 |
| 340 | 1 |
| 341 | 3 |
| 342 | 16 |
| 343 | 9 |
| 344 | 19 |
| 345 | 5 |
| 346 | 20p11.21-11.23 |
| 347 | Xp11.4-21.2 |
| 348 | 8 |
| 349 | 7 |
| 351 | 17 |
| 352 | 6 |
| 354 | 1 |
| 355 | 2 |
| 359 | 11 |
| 361 | 9 |
| 368 | 11 |
| 370 | 20 |
| 374 | 17 |
| 381 | 9 |
| 387 | 5 |
| 388 | 8 |
| 389 | 9 |
| 391 | 16 |
| 393 | 1 |
| 395 | 5 |
| 396 | 19 |
| 399 | 2 |
| 400 | 1 |
| 407 | 5 |
| 410 | 3 |
| 413 | 6 |
| 415 | 1 |
| 417 | 5 |
| 419 | 16 |
| 420 | 10 |
| 421 | 6 |
| 424 | X |
| 429 | 1 |
| 431 | 9 |
| 433 | 14 |
| 434 | 1 |
| 435 | 1 |
| 436 | 3 |
| 437 | 5 |
| 438 | 7 |
| 441 | 11 |
| 445 | 14 |
| 446 | 10 |
| 448 | 1 |
| 449 | 19 |
| 450 | X |
| 451 | X |
| 455 | 10 |
| 457 | Xq25-Xq26 |
| 460 | 14 |
| 461 | 17 |
| 463 | 15 |
| 466 | 3 |
| 468 | 18 |
| 471 | 10 |
| 473 | 11 |
| 474 | 1 |
| 477 | 5 |
| 478 | 3 |
| 480 | 19 |
| 488 | 10 |
| 495 | 5 |
| 498 | 19 |
| 500 | 1 |
| 505 | 9 |
| 506 | 2 |
| 507 | 1 |
| 509 | 8 |
| 516 | X |
| 520 | 1 |
| 522 | 1p36.1-36.2 |
| 526 | 1p36.13-36.31 |
| 531 | 5 |
| 532 | 7 |
| 533 | 5 |
| 535 | 5 |
| 540 | 9 |
| 545 | 16 |
| 548 | 12 |
| 549 | 8 |
| 557 | 7 |
| 559 | 4 |
| 561 | 2 |
| 562 | 1p35.1-36.13 |
| 563 | 3 |
| 564 | 3 |
| 566 | 12 |
| 570 | 10 |
| 571 | 3 |
| 572 | 3 |
| 573 | 15 |
| 574 | 13 |
| 582 | 4 |
| 585 | 11 |
| 586 | 1 |
| 591 | 3 |
| 592 | 14 |
| 595 | 1 |
| 596 | 19 |
| 597 | 3 |
| 598 | 11 |
| 601 | 12 |
| 604 | 1 |
| 606 | 11 |
| 607 | 17 |
| 609 | 11 |
| 611 | 17 |
| 613 | 10 |
| 618 | 3 |
| 619 | 16 |
| 624 | 8 |
| 627 | 3p21.3 |
| 629 | 10 |
| 631 | 6 |
| 637 | 3 |
| 638 | 6q16-21 |
| 639 | 11q |
| 641 | 2 |
| 646 | 11 |
| 648 | 7 |
| 651 | 4 |
| 654 | 4 |
| 655 | 9 |
| 656 | 14 |
| 660 | X |
| 663 | 6 |
| 667 | 6 |
| 669 | 12 |
| 670 | 20p12.1-13 |
| 671 | 11 |
| 672 | 1 |
| 676 | 11 |
| 682 | 20 |
| 687 | 19 |
| 689 | 17 |
| 693 | 2 |
| 696 | 9 |
| 699 | 11 |
| 703 | 15 |
| 704 | 14 |
| 705 | 17 |
| 707 | 1 |
| 710 | 1 |
| 714 | 1 |
| 715 | 21q21.1-q21.2 |
| 717 | 5 |
| 718 | 22 |
| 720 | 9 |
| 721 | 11 |
| 725 | 12q |
| 726 | 16 |
| 727 | 16 |
| 728 | 11 |
| 733 | 19 |
| 737 | 1 |
| 739 | 19 |
| 742 | 19 |
| 746 | 14 |
| 748 | 3 |
| 749 | 1 |
| 752 | 20 |
| 754 | 6 |
| 755 | 18 |
| 756 | 7 |
| 760 | 19 |
| 765 | Xq22.1-22.3 |
| 766 | 17 |
| 768 | 1 |
| 770 | 3 |
| 771 | 11 |
| 772 | 10 |
| 775 | 19 |
| 776 | 19 |
| 777 | 14 |
| 778 | 3 |
| 782 | 17 |
| 783 | 1 |
| 787 | Xq12-13.1 |
| 789 | 17 |
| 791 | 1 |
| 793 | 1 |
| 794 | 3 |
| 799 | 15 |
| 800 | X |
| 804 | 19 |
| 808 | 11 |
| 809 | 3 |
| 812 | 19 |
| 813 | X |
| 814 | 6 |
| 818 | 4 |
| 824 | 11q |
| 826 | 15 |
| 829 | 17 |
| 830 | 5 |
| 831 | 11 |
| 833 | 8 |
| 834 | 11 |
| 835 | 22q12.2-13.1 |
| 836 | 18 |
| 839 | 21q22.2 |

### Example 9

### Purification of the Polypeptides of the Invention

[0290] The polypeptides of the invention can be produced by first cloning the corresponding polynucleotides of the invention into a mammalian expression vector using established protocols that are familiar to those in skill of the art (for example, pCDNA3.1/His A, B, C Catalog Number V385-20 from Invitrogen, Carlsbad, Calif., herein incorporated by reference). Briefly, polynucleotides of the invention are amplified and isolated via agarose gel electrophoresis and gel excision. The polynucleotides are subsequently cloned into the pCDNA3.1/His A, B, C vectors to facilitate in-frame cloning with a polyhistidine metal-binding tag. The vectors with polynucleotides of the invention inserted can then be transfected into a mammalian cell line like COS-7 for high-level expression of the corresponding polypeptides of the invention.

[0291] The corresponding polypeptides of the invention that are produced by the transfected mammalian cell line can then be purified according to established protocols that are familiar to those of skill in the art (for example, the Ni-NTA Magnetic Agarose Beads protein purification protocol, Qiagen, Valencia, Calif., herein incorporated by reference). Briefly, assays utilizing Ni-NTA Magnetic Beads involve capture of the 6×His-tagged protein—from a cell lysate or a purified-protein solution—followed by washing, binding of interaction partners, further washing, and finally elution of the interacting partner from the still immobilized 6×His-tagged protein or elution of the interacting-partner-6×His-tagged-protein complex. Between each step, the beads are collected by attracting them to the side of the vessel, after placing near a magnet for 30-60 seconds. Purification procedures may even use crude cell extracts for binding of 6×His-tagged protein.

[0292] The resulting purified polypeptides of the invention are then quantified, lyophilized and stored at 4 degrees Celcius or below, and used for standards in diagnostic kits for pre-eclampsia.

### Example 10

### Production of Specific Antibodies for the Polypeptides of the Invention

[0293] Cells expressing any of the polypeptides of the invention are identified using antibodies specific for SEQ ID NO: 853 through 1704. Polyclonal antibodies are produced by DNA vaccination or by injection of peptide antigens into rabbits or other hosts. An animal, such as a rabbit, is immunized with a peptide specific for one of SEQ ID NO: 853 through 1704 conjugated to a carrier protein, such as BSA (bovine serum albumin) or KLH (keyhole limpet hemocyanin). The rabbit is initially immunized with conjugated peptide in complete Freund's adjuvant, followed by a booster shot every two weeks with injections of conjugated peptide in incomplete Freund's adjuvant. Antibodies specific for a polypeptide of the invention are affinity purified from rabbit serum using peptides corresponding to the polypeptides of the invention coupled to Affi-Gel 10 (Bio-Rad), and stored in phosphate-buffered saline with 0.1% sodium azide. To determine that the polyclonal antibodies are specific for a polypeptide of the invention, an expression vector encoding a polypeptide of the invention is introduced into mammalian cells. Western blot analysis of protein extracts of non-transfected cells and the cells containing a polypeptide of the invention is performed using the polyclonal antibody sample as the primary antibody and a horseradish peroxidase-labeled anti-rabbit antibody as the secondary antibody. Detection of a band in the cells containing a polypeptide of the invention and lack thereof in the control cells indicates that the polyclonal antibodies are specific for the polypeptide of the invention in question.

[0294] Monoclonal antibodies are produced by injecting mice with a peptide derived from a polypeptide of the invention, with or without adjuvant. Subsequently, the mouse is boosted every 2 weeks until an appropriate immune response has been identified (typically 1-6 months), at which point the spleen is removed. The spleen is minced to release splenocytes, which are fused (in the presence of polyethylene glycol) with murine myeloma cells. The resulting cells (hybridomas) are grown in culture and selected for antibody production by clonal selection. The antibodies are secreted into the culture supernatant, facilitating the screening process, such as screening by an enzyme-linked immunosorbent assay (ELISA). Alternatively, humanized monoclonal antibodies are produced either by engineering a chimeric murine/human monoclonal antibody in which the murine-specific antibody regions are replaced by the human counterparts and produced in mammalian cells, or by using transgenic “knock out” mice in which the native antibody genes have been replaced by human antibody genes and immunizing the transgenic mice as described above.

### Example 11

### Determination of mRNA Expression of the Polynucleotides of the Invention in Normal and Pre-Eclampic Placental Tissues

[0295] Relative gene expression, at the mRNA level, across multiple placental tissues was measured using a real-time PCR system. This system consisted of a GeneAmp 5700 Sequence Detection System (Applied Biosystems) and GeneAmp 5700 SDS software (Applied Biosystems). The reaction mixture consists of SYBR Green PCR MasterMix (Applied Biosystems), oligos specific to one gene, and DEPC treated water. 20 ng mRNA equivalent cDNA (synthesized using MMLV RT enzyme from Invitrogen) is added to each reaction mixture. The samples are run on the GeneAmp 5700 Sequencing Detection System with a 30 second extension time and are analyzed at a fluorescence threshold of 0.5. Each cDNA is also run against an appropriate Housekeeping Gene Control that is used for normalization.

[0296] The real-time PCR protocol was performed on both SEQ ID NO: 357 and 551. After this analysis was performed, the relative expression ratios of the two polynucleotides of the invention were determined across a selection of placental tissues. The raw cycle count scores for each gene in the measured tissues were selected, with each score representing the number of doublings required to detect the message. Next, the inverse expression ratios were computed for each gene in each measured tissue using the following formula:
[0297] (2 raised to the power of the SEQ ID NO 347 raw cycle count score) divided by (2 raised to the power of the SEQ ID NO 551 raw cycle count score)

[0298] Finally, the computed ratios for each measured tissue were plotted on a log 10 scale as shown in FIG. 1 of the drawings. The following table relates the X-axis labels of FIG. 1 to the respective placental tissue source information.

TABLE 8

| Label on X-axis | |
|---|---|
| for FIG. 1 | Detailed Tissue Source Information |
| 10.1. PE BP | 23 weeks of pregnancy, severe pre-eclampsia, basal- |
| | plate region |
| 1.1 PE BP | 23 weeks of pregnancy, severe pre-eclampsia, basal- |
| | plate region |
| 7.1 PE BP | 24 weeks of pregnancy, severe pre-eclampsia, basal- |
| | plate region |
| 4.1 PE BP | 29 weeks of pregnancy, severe pre-eclampsia, basal- |
| | plate region |
| 5.1 PE BP | 32 weeks of pregnancy, severe pre-eclampsia, basal- |
| | plate region |
| 11.1 PE BP | 38 weeks of pregnancy, pre-eclampsia, basal-plate |
| | region |
| ECL003 | 34 weeks of pregnancy, non-pre-eclamptic placenta, |
| NP BP | basal-plate region |
| 9.1 NP BP | 39 weeks of pregnancy, non-pre-eclamptic placenta, |
| | basal-plate region |
| 8.1 NP BP | 40 weeks of pregnancy, non-pre-eclamptic placenta, |
| | basal-plate region |
| 6.3 NP BP | 41 weeks of pregnancy, non-pre-eclamptic placenta, |
| | basal-plate region |
| 13.1 NP BP | 39 weeks of pregnancy, elective Caesarian section, |
| | non-pre-eclamptic placenta, basal-plate region |

### Example 12

### Diagnostic Kit for Polypeptides of the Invention

[0299] A diagnostic kit can be made in order to determine the levels of selected polypeptides of the invention that are present in tissue samples obtained from a patient who is undergoing pregnancy. Such tissue samples may be from blood plasma, blood serum, amniotic fluid, or urine.

[0300] The components of the kit can be as follows: 1) one or more standards comprised of one or more polypeptides of the invention, prepared as described in example 9; 2) an antibody or a plurality of antibodies that are specific for the polypeptides of the invention that are being tested by the kit, prepared as described in example 10; 3) written instructions; 4) diluents for tissue samples and the standards; 5) a wash buffer; 6) color reagents; 7) stop solution; and 8) a microplate with bound antibody.

[0301] An example of such a kit is an ELISA (enzyme-linked immunosorbent assay) quantification that determines the concentration or concentrations of a polypeptide or polypeptides of the invention. The principle of the assay is to use the quantitative sandwich enzyme immunoassay technique where a Polyclonal antibody selective for binding a polypeptide of the invention is pre-coated onto a microplate into its wells. The standards and sample are then pipetted into the wells and any of the polypeptide of the invention that is present is bound to this immobilized Polyclonal antibody. Next, the wells are washed with washing buffer, and an enzyme-linked Polyclonal antibody that is specific for the polypeptide of the invention is added to the wells. Washing again is performed, then a substrate solution is added to the wells. Color subsequently develops in proportion to the amount of polypeptide of the invention that is bound in the first step. The color development is stopped using a stop solution, and the intensity of the color is measured by a microplate reader.

[0302] This results of this assay are used to determine one or more concentration levels of the polypeptides of the invention. The assay reaction is performed in the same tube or well, or may be in separte tubes or wells. The level or levels of polypeptides of the invention that are being determined by this assay can be used to diagnose those patients with pre-eclampsia.

### Example 13

### Diagnostic Chip for Polypeptides of the Invention in Tissue Samples

[0303] The levels of polypeptides of the invention in biological tissue samples can be determined through the use of ProteinChip technology (Wright Jr., et al. Expert Review of Molecular Diagnositcs 2002, Vol. 2 pp. 549-63 hereby incorporated herein by reference). This process includes the additon of a few microliters of tissue sample onto the ProteinChip surface, which has both chemical (e.g., anionic, catioinic, hydrophobic, hydrophilic, metal) and biochemical (antibody, receptor, DNA, enzyme probes attached to its surface. Subsequently, binding occurs between the polypeptides of the invention and their respective probes, and the chip is washed at least three times in order to elute unbound protein, lipids, salts, and other substances. Next, an energy-absorbent molecule (EAM) such as sinapinic acid is added to the chip, and the chip is placed into a ProteinChip Reader which measures the molecular mass of the bound polypeptides. Peaks are subsequently produced from the ProteinChip Reader that are used to quantify the amount of polypeptides of the invention in the tissue sample

1. A method of identifying a patient with a higher risk of preeclampsia comprising:
a) assaying a sample from said patient to determine the level of a mRNA or other polynucleotide within said sample that hybridizes specifically to a polynucleotide of SEQ ID NO: 1-852; and
b) comparing said level to a standard indicative of a higher risk of diagnosis of preeclampsia.

2. A method of identifying a patient with a higher risk of preeclampsia comprising:
a) contacting a sample from said patient with an antibody that specifically binds to a polypeptide of SEQ ID NO 853-1704 to determine the level of polypeptide within said sample; and
c) comparing said level to a standard indicative of a higher risk of diagnosis of preeclampsia.

3. The method of claim 1 or 2, wherein the specimen is serum.

4. The method of claim 1 or 2, wherein the specimen is plasma.

5. The method of claim 1 or 2, wherein the specimen is urine.

6. The method of claim 1 or 2, wherein the specimen is cervicovaginal mucous.

7. The method of claim 1 or 2, wherein the specimen is amniotic fluid.

8. The method of claim 1 or 2, wherein the specimen is fetal cells.

9. The method of claim 1, wherein said nucleotides further comprise any polymorphism or splice variants of the polynucleotide sequences of SEQ ID 1-852.

10. The method of claim 2, wherein said proteins further comprise any fragments of the polypeptide sequences of SEQ ID 853-1704.

11. A diagnostic kit for detecting preeclampsia comprising:
a) an antibody specific for any of the polypeptides of SEQ ID 853-1704 or fragments thereof; and
b) a standard for any of the polypeptides of SEQ ID 853-1704 indicative of a higher risk of diagnosis of preeclampsia.

12. A diagnostic kit for detecting preeclampsia comprising:
a) a polynucleotide sequence comprising any of SEQ ID 1-852 coupled to a surface; and
b) A standard for any of the polynucleotides of SEQ ID 1-852 indicative of a higher risk of diagnosis of preeclampsia.

13. A pharmaceutical composition comprising an antibody specific for any of the polypeptides of SEQ ID NO: 853-1704, effective to ameliorate signs or symptoms of preeclampsia.

14. The pharmaceutical composition of claim 13, wherein said antibody is a monoclonal antibody or fragment thereof.

15. A pharmaceutical composition comprising one or more purified polypeptides of SEQ ID NO: 853-1704, effective to ameliorate signs or symptoms of preeclampsia.

16. A method of treating preeclampsia comprising the steps of:
a) detecting increased levels of any of the polynucleotides of SEQ ID NO: 1-852 or the polypeptides of SEQ ID NO: 853-1704 in preeclamptic sample specimens; and
b) administering an effective dose of any of said compositions as in claims 13 or 14.

17. A method of treating preeclampsia comprising the steps of:
a) detecting decreased levels of any of the polynucleotides of SEQ ID NO: 1-852 or the polypeptides of SEQ ID NO: 853-1704 in preeclamptic sample specimens; and
b) administering an effective dose of any of said compositions as in claim 15.

The application's sequence listing, which the Patent Office published only in electronic form, follows.

SEQUENCE LISTING (1704 sequences)

SEQ ID NO: 1 - DNA, 1238 bp, Homo sapiens
gcttctgccctcaaccaaaatggcgctagctcggaagctgccgaggtgctaggagttgccgaagcaagtccggaagctaccgagcgagtccggaagttgccgaaagggagcagcggggaaggaggatggcggatatcatcgcaagactccgggaggacgggatccaaaaacgtgtgatacaggaaggccgaggagagctcccggactttcaagatgggaccaaggccacgttccactaccggacgctgcacagtgacgacgagggcaccgtgctggacgacagccgggctcgtggcaagcccatggagctcatcattggcaagaagttcaagctgcctgtgtgggagaccatcgtgtgcaccatgcgagaaggggagattgcccagttcctctgtgacatcaagcatgtggtcctgtacccgctggtggccaagagtctccgcaacatcgcggtgggcaaggaccccctggagggccagcggcactgctgcggtgttgcacagatgcgtgaacacagctccctgggccatgctgacctggacgccctgcagcagaacccccagcccctcatcttccacatggagatgctgaaggtggagagccctggcacgtaccagcaggacccatgggccatgacagacgaagagaaggcaaaggcagtgccacttatccaccaggagggcaaccggttgtaccgcgaggggcatgtgaaggaggctgctgccaagtactacgatgccattgcctgcctcaagaacctgcagatgaaggaacagcctgggtcccctgaatggatccagctggacaagcagatcacgccgctgctgctcaactactgccagtgcaagctggtggtcgaggagtactacgaggtgctggaccactgctcttccatcctcaacaagtacgacgacaacgtcaaggcctacttcaagcggggcaaggcccacgcggccgtgtggaatgcccaggaggcccaggctgactttgccaaagtgctggagctggacccagccctggcgcctgtggtgagccgagagctgcgggccctggaggcacggatccggcagaaggacgaagaggacaaagcccggttccgggggatcttctcccattgacaggagcacttggccctgccttacctgccaagcccactgctgcagctgccagcccccctgcccgtgctgcgtcatgcttctgtgtatataaaggcctttatttatctctcaaaaaaaaaa

SEQ ID NO: 2 - DNA, 2409 bp, Homo sapiens
aattatgatcaacttttattgattttacataaatagcttatagaatgcctttacaaactatgtttttgcaatatatttgttacaacacacatttccttatgaatgtatttgttaaatctttttgcagaggaagtagggaaaagtgaggggagaagaggaggaataagattttagaactaatcgtcagcaatgggcctaggtatttggcaattatttcctttacaaaaaaattacaggtttgtaacttcaaacatcaaaagtgtagtgcatcaatttaactaaaaaatcagtagtgcctaatatattatctgggcatcaaatttctttttttaaatatatccagattcacatatttttactcttattaaataatggttttaaataataatcatcacaatgtttagctacataatcccagatctggattaaatcatggtgatatcgatatttttaaattccaatttatttgttaatcagtaaaatgtaataggtgatagtgtgtccagagaatgagcctcctatgtgtaggaagacgatagtcttattacacctgctatcaattaggtcatttacatagctgctaatgtatcagaatttttttccacactgatgtagtactttattcaagtcaaaacaagttatcattatcataccaacgttgaagaattaaccattcctgaaacaagaaacaatctttacattagtatttcttggttatggtgcttagtcttggtattattaagcacaatgattcttaataaacatgggtggatgaaggcaaatgcatatagcctagtcccctcaataatttattctccatcttatttaaaattgttgttgaggctatacaaactacagatctgctgctagaaagatacaagttgtcccccgaacaacatctggcattttaagcataagattaaagtcctggtgttcacagcatcttcttctgacctaccactaggatcattcctcagcagtgcccacgatgctgatttccaaatgataccatttactatgtatcttgactgtatggatattattttttccttattaaaaaaaagaaatacgatgatatttccttctttgtccttacttaagaataactgggcaataatctattcagtctttgtaaactctccattgaataatttttcattcttacacgaaaatcaccgtcatgaatggaaattgtccagatattaaccaagatgtacagacttaaataaaccaccttgtgtaatggaaagataaaagggtatatatggtaaggtagactctgaagaaagccatcaatagggtgaaaagcatgacttgcaaatggagtaggaatcttccaaatatggtgaggtttatgtaggcgcttatataccagtctatgatgaaggcctctgtgaatccagtagatgaacatgtcagtgaaaaagaggaaagatattatactaacgacaagttcaaacaatccatatggaaactctcctaggtcatcatgtaatttgctgtaacctcttatctccagcaagaacagtgcaacagtaagaatacttatccatggcaatgcctggacagtaaacttaatctctcgacggacttgattctttaaaaattgtggatgtttcattaatgcatgatcgaagacaaaataatagctcagtgttgcacagaagaaataaaggatgtaagcaccaacatttgttacaatcagaagactaatagcttgtcggaagatgtcatcttctggccatgtggctggatacacgtatggtgtaaaaaaatagtaatctgcaacacggagtacaagatccatcacttagcccctggaggtggtccgccgccgctccgcacgccatgtctgacaaacccgatatggctgagatcgagaaattcgataagtcgaaactgaagaagacagagacgcaagagaaaaatccactgccttccaaagaaacgattgaacaggagaagcaagcaggcgaatcgtaatgaggcgtgcgccgccaatatgcactgtacattccacaagcattgccttcttattttacttcttttagctgtttaactttgtaagatgcaaagaggttggatcaagtttaaatgactgtgctgcccctttcacatcaaagaactactgacaacgaaggccgcgcctgcctttcccatctgtctatctatctggctggcagggaaggaaagaacttgcatgttggtgaaggaagaagtggggtggaagaagtggggtgggacgacagtgaaatctagagtaaaaccaagctggcccaaggtgtcctgcaggctgtaatgcagtttaatcagagtgccattttttttttttgttcaaatgattttaattattggaatgcacaatttttttaatatgcaaataaaaagtttaaaaacttaaaaaaaaaa

SEQ ID NO: 3 - DNA, 674 bp, Homo sapiens
ctggtcttaaactcctgacctcaagtgatctgcctgccctggcctcccgaagtgttgggattataggcacgagccaccgtgcctggcccatatcactattttctatactttggatgttatgtatgtccactgtgtctgtgtggagggaggccaccacgtgatggtttgctcgtgcgtgtctcttcctgactctgagctcgacaccgtcaggttgatagctggaaatgggccacggtgtgaatatttacaccattgcaattggcaaatgctgtaaatcaaggcttgacttatggttctgttgattattcttcacagtgatgttagtaatacagattaaacttaacagtgcattgtacctgtagccattccattgtgaataacacaaaaagtggaggaaatatttttctcgcatttggaaattattctgtgattcagcaaagaagttgttcatgtcattaacaagttcagaaatacatgctgccaaagccaaaaagagtcttcagtttaataaaaataattaacaggaaggtgagaaatggtttaccagctgttcacttactggatttaaggttacttgttggggaaagagcagagtaagatgcaactctgtcaaatcatggctgaatatgttcggcaaaaaatcaataaaaattctgaaaacatcaaaaaaaaaa

SEQ ID NO: 4 - DNA, 2324 bp, Homo sapiens
ggcacgaggctcgttagtccacggtctggtcttcagctacccgccttcgtctccgagtttgcgactcgcggaccggcgtccccggcgcgaagaggctggactcggattcgttgcctgagcaatggctgccatccggaagaaactggtgattgttggtgatggagcctgtggaaagacatgcttgctcatagtcttcagcaaggaccagttcccagaggtgtatgtgcccacagtgtttgagaactatgtggcagatatcgaggtggatggaaagcaggtagagttggctttgtgggacacagctgggcaggaagattatgatcgcctgaggcccctctcctacccagataccgatgttatactgatgtgtttttccatcgacagccctgatagtttagaaaacatcccagaaaagtggaccccagaagtcaagcatttctgtcccaacgtgcccatcatcctggttgggaataagaaggatcttcggaatgatgagcacacaaggcgggagctagccaagatgaagcaggagccggtgaaacctgaagaaggcagagatatggcaaacaggattggcgcttttgggtacatggagtgttcagcaaagaccaaagatggagtgagagaggtttttgaaatggctacgagagctgctctgcaagctagacgtgggaagaaaaaatctgggtgccttgtcttgtgaaaccttgctgcaagcacagcccttatgcggttaattttgaagtgctgtttattaatcttagtgtatgattactggcctttttcatttatctataatttacctaagattacaaatcagaagtcatcttgctaccagtatttagaagccaactatgattattaacgatgtccaacccgtctggcccaccagggtccttttgacactgctctaacagccctcctctgcactcccacctgacacaccaggcgctaattcaaggaatttcttaacttcttgcttctttctagaaagagaaacagttggtaacttttgtgaattaggctgtaactactttataactaacatgtcctgcctattatctgtcagctgcaaggtactctggtgagtcaccacttcagggctttactccgtaacagattttgttggcatagctctggggtgggcagttttttgaaaatgggctcaaccagaaaagcccaagttcatgcagctgtggcagagttacagttctgtggtttcatgttagttaccttatagttactgtgtaattagtgccacttaatgtatgttaccaaaaataaatatatctaccccagactagatgtagtattttttgtataattggatttcctaatactgtcatcctcaaagaaagtgtattggttttttaaaaaagaaagtgtatttggaaataaagtcagatggaaaattcattttttaaattcccgttttgtcactttttctgataaaagatggccatattaccccttttcggccccatgtatctcagtaccccatggagctgggctaagtaaataggaattggtttcacgcctgaggcaattagacgcttaagtccaggtgagacaggttatgccatcttccaaagtgtctaattgcctcaggcgtgaaaccaattcctatttacttagcccagctccatggggtactgagatacatggggccgaaaaggggtaatatggccatcttttatcagaaaaagtgacaaaacgggaatttaaaaaatgaattttccatctgactttatttccaaatacactttcttttttaaaaaaccaatacactttctttgaggatgacagtattaggaaatccaattatacaaaaaatactacatctagtctggggtagatatatttatttttggtaacatacattaagtggcactaattacacagtaactataaggtaactaacatgaaaccacagaactgtaactctgccacagctgcatgaacttgggcttttctggttgagcccattttcaaaaaactgcccaccccagagctatgccaacaaaatctgttacggagtaaagccctgaagtggtgactcaccagagtaccttgcagctgacagataataagcagacttgtagtataaatagttacggctaattcacaaagttccagctgttcttcttttaaaagaaccagaagttagaattccttgattacccctggtgtgtaggtggatggacaagggggctgttaacatggtaaagggcttgggggcccacggtggacaagcaaaaaaaggtgggtttaaccgggacaaaactttgtgttatcttggaattcaaagagacggcccttttact

SEQ ID NO: 5 - DNA, 655 bp, Homo sapiens
ttttttttttttacttttccttcctttaatcttatgcaaaagggacacaggggttcaaaaataaaaatttctcttccccctccccaaacctgtaccccagctccccgaccacaacccccttcctcccccggggaaagcaagaaggagcaggtgtggcatctgcagctgggaagagagaggccggggaggtgccgagctcggtgctggtctctttccaaatataaatacgtgtgtcagaactggaaaatcctccagcacccaccacccaagcactctccgttttctgccggtgtttggagaggggcggggggcaggggcgccaggcaccggctggctgcggtctactgcatccgctgggtgtgcaccccgcgagcctcctgctgctcattgtagaagagatgacactcggggtccccccggatggtgggggctccctggatcagcttcccggtgttggggttcacacaccagcactccccacgctgcccgttcagagacatcttgcactgtttgaggttgtacaggccatgcttgtcacagttggggatgtgcagggagtagaggtgctccagagggccccgctcatccggaaagcgcatggtgagatcgcttcaagaactggtccatatcctgtggctgggaatctgccaggagg

SEQ ID NO: 6 - DNA, 1199 bp, Homo sapiens
gcctgatgggctggagccagactgtggtctgaggaggagacacagccttataagctgagggagtggagaggcccggggccaggaaagcagagacagacaaagcgttaggagaagaagagaggcagggaagacaagccaggcacgatggccaccttcccaccagcaaccagcgccccccagcagcccccaggcccggaggacgaggactccagcctggatgaatctgacctctatagcctggcccattcctacctcggaggtggaggccggaaaggtcgcaccaagagagaagctgctgccaacaccaaccgccccagccctggcgggcacgagaggaaactggtgaccaagctgcagaattcagagaggaagaagcgaggggcacggcgctgagacagagctggagatgaggccagaccatggacactacacccagcaatagagacgggactgcggaggaaggaggacccaggacaggatccaggccggcttgccacaccccccacccctaggacttattcccgctgactgagtctctgaggggctaccaggaaagcgcctccaaccctagcaaaagtgcaagatggggagtgagaggctgggaatggaggggcagagccaggaagatcccccagaaaagaaagctacagaagaaactggggctcctccagggtggcagcaacaataaatagacacgcacggcagccacagcttgggtgtgtgttcaaaaaaaaaaccaacagcattcggccacctacagcagcacatcacaccgacacacaacaaaaagagaggagggagcagctcataagagtcccccaagagggggcaccaatatagcgcgagacaagcaggtatttgtgccaaaaggggcgcccaaaagaaggcgccacataacgaaacgcagagggcacagagggcgactggtatattcaaccaccaggccgcgacacggggcacaacaactgcccccagcgagcgagaccatgacgagagaagagcacccaaccacacgcgggggaggagcacacatatgtgcgcagaccaaacccacgcaacacagaacatgaacgaacgccgcaggggaagaacataaacctagtacaggtggtcaagcggcgtggtaaccacccggccgaatctctctccgcgcgaagaaagaaggcggagaccaggacggatgctagaaaatatacgcg

SEQ ID NO: 7 - DNA, 956 bp, Homo sapiens
ttttttttttttaacagtcgctgtggaattttattaagccatcaaaatttccttcacactcaatactgttgaacaacaagataacacatcttcttgctcatcccacttgaactcaagtcatcagttttaggcacaaaggttttagttttctcgggaaatcaagttttaaccacttgaggttactactgcagcaagcagattttgttgacaaatgtgaacagctttcaccctctgttagtacaaattaatatcctttccttaaataaagttagttagctatttttggtttcaaaatcagtttccatcataaaataacagcaagacactgtacacctttacgttcaatactagaaatttcacccagtgcatcagcatctgtgcggcattccctcagcacgggctctgctggcgggcagcaggggtgctgagctctctctagtgcgccctgtgcagccacaccactgctgtcaccacatgtccctctgacggcagaggtggtataagcagcttcaccctggcccgactgaaggctgtcatagttgtttttcatattatgcacaataaactgtagcacaataatcatgatataacaactgtccagcaaaaataaaagtattttacatttgattatcatacaaaaatatgcatttttctatttttaaccattattaatagtacctaatatttttaaacttgtaaattaacaacaataaaatactacaagagttaaaataaaataaacgtgaaggaagaaaattacagagggaaaaatgctcaatccaaaacatttagtaataataaaaaagcagctaaatgaaaaagggagaattgtgattacactgtcaatggcaggatacgctgtggtgttataaggagattgggtctggtttctaatcaaggactgtaaaatgtttaataattctatttgtataactgaaactagcccttattttcta

SEQ ID NO: 8 - DNA, 2712 bp, Homo sapiens
ttttttttttttaaaaaaaaagagtttatttagaaagtatcatagtgtaaacaaacaaattgtaccactttgattttcttggaatacaagactcgtgatgcaaagctgaagttgtgtgtacaagactcttgacagttgtgcttctctaggaggttgggtttttttaaaaaaagaattatctgtgaaccatacgtgattaataaagatttcctttaaggcagaggctggtcgagatgctgctgttatcttctgcctcagacagacagtataagtggtcttgtttctaagattcctaccaccagttactttgggccaagtatccacatccccttgcgtatgggaggtgggtgaagagtgttggatgcaaagtggttattatgggaagtagctcgatggtaaaaggacaaacacctatctatcttagagcttaagcctgtatgtgcttattcccaagggagatagaggtgtttaatcacaaggacagcatgagttagaggacactggcatcaacagctgccacagccgtgcacaccagggccagagcagcccactgacatctgtctttggtcttgagatcaaatgcatcccattcttcatacattagaaggtcgacctccttgaagcagaccaagtatagcaagcctctaaaaggactactgagaaacagaatcagaaactctagaactctagttagggcccttcagcagggctgcagagcctccctggatacccaggcctgggaaagcctgtctggtcttgtcaccccaggtgacaaatacaactggaatctttcaatgagttaatgagatactgagaatgagcctcgtggaattttccatgcctaccctttctaaggaagacatccaacagttcatgtgggctctggcttcgtgttaacatgaggaactaaagacatgtttcaccccgtgagaaacagaaggatcccctgaacagtaactgatttgacaagtatcgacacataaagttatggcatcagcattctcttactcaggcacggtcagaagtaacgctgctttcatcacggctaacctctcacactgagagaagtattcacagcaacagaagctccagcagcggccgtgaaggtatcttccagaggtgtgggtttttgcatttcaatctgctccatgctacggaccaacacagtattgagtcaactgtgaccttaagatcagaggaacgtcaatactgccacaaggccacctttccagaactcgtgggcaggtaaactatgctttggatgtgctttctttcaccaaaatcactcaactcaggagccacaaatagtccagcaatttcatttccctcaacgctattttagtctcaaaggaaaccatgtaaatttcatcaagagaaggtcaaaggggatatatcgccactgaaaatgtttacacagtgaccatgagttacacatttacttagagaaacttaacttaataaagaatctgtagagtgtgttggcttggaaaacacacacacaaagaagatacctcacgcttagtatgttctgctttctgaacagccaccactgggaacccagtggcctctgtgggactgaactcctaaacgcagggtgcgggagctgggcaggagaggtgacctccaactgtgttcctaaagttcgtctttcgcttggctcaggacaaagcggtgtaacgagtcaaggtctctgcctccactgtgctcactgactttcttccctcctcggaaaagcaataacgtggggtagcctcgtaccgaatacttgctgcagatattccgttcagcagtgcagtctacttcggcgatcttgacccccgccagaccagggaattcctttttagagagttcctcccaagtaggagccagagtcttacaatgaccacaccatggagcataaaacttgatgaaggttattccttctgcaatggtgtcatcgaagttattttcagtgagtgccaacacagtgcccttgtcagcctcgggctcagctgccagcaccggggcctctgagggcgtgacggtctccgtcgctccagtctctgtgcgctgcagctgcgactccacgtactccctcagtgactccaaatcccgctttcccttgtactgatccacctggccgagacacgggcacgcggctgagtgagtccactgaggtgttctgaatcacttaagccttcctgcaacccctgcttgcccgggtcagagctcccagatgtcttagcggtggtgcaaagtctgcatgttcatatttagacgggaatgtagagaggataactgaatgcctcggctttggtgagagaactgtacaggcccctcttccctccacggggttacacatcatagaagtctggggcagaggcctgccagcaagccgttgtgctgatggggaactctgagctgctgaccatcggccagggaaggagggagggaggcaggcagaaccggaccaagtgcaagccttagctctgttcaaaggcctgaaggtttgtgtttacgaccagagcacagttaccctgtgactgtaagatgtgggttattctagtgataacctgggccactgaaatgtttcaaggttcatctccacaacccaaatcttatcaattaagagaaagacgtttgtttcattatacacatttctccaaaccagtgccctaacaatcaagattggcaattcactgtgcccattaaaccactcagtagctcagcctg

SEQ ID NO: 9 - DNA, 1277 bp, Homo sapiens
tactactactactaaattcgcggccggtcgaccgccccttggcttctgcactgatggtgggtggatgagtaatgcatccaggaagcctggaggcctgtggtttccgcacccgctgccacccccgcccctagcgtggacatttatcctctagcgctcaggccctgccgccatcgccgcagatccagcgcccagagagacaccagagaacccaccatggccccctttgagcccctggcttctggcatcctgttgttgctgtggctgatagcccccagcagggcctgcacctgtgtcccaccccacccacagacggccttctgcaattccgacctcgtcatcagggccaagttcgtggggacaccagaagtcaaccagaccaccttataccagcgttatgagatcaagatgaccaagatgtataaagggttccaagccttaggggatgccgctgacatccggttcgtctacacccccgccatggagagtgtctgcggatacttccacaggtcccacaaccgcagcgaggagtttctcattgctggaaaactgcaggatggactcttgcacatcactacctgcagtttcgtggctccctggaacagcctgagcttagctcagcgccggggcttcaccaagacctacactgttggctgtgaggaatgcacagtgtttccctgtttatccatcccctgcaaactgcagagtggcactcattgcttgtggacggaccagctcctccaaggctctgaaaagggcttccagtcccgtcaccttgcctgcctgcctcgggagccagggctgtgcacctggcagtccctgcggtcccagatagcctgaatcctgcccggagtggaagctgaagcctgcacagtgtccaccctgttcccactcccatctttcttccggacaatgaaataaagagttaccacccaggcaaaaaaaaaaaaaatcgggggcaccaagccggggggacaaaacaggtactgcacagggacagtgtcatagcggtttcggaacccgacttttttgtcacaagggggcacaacctggcgggcccccccaagagggacccacatcatttgcacagccgcggtagcgtctcatagcgagcccgagaggatcacaggcgaggagtgaacgcaagaggcaacacagaagaagcgaggcaccaacgggagacaccaagaagcacgagaagagacaacgaaaaaacactaaacagcgcgcacataaaacgaggatcgatcacatacagcaataaatactaggccacacaa

SEQ ID NO: 10 - DNA, 1619 bp, Homo sapiens
ttttttttttttcatttccactgaccaataaacagaactacaggtgcacccaaccacggacatgcattaactcgtcatgagaaatctaggtaggctaagtaggatgagagaatgtttgtcactcccaaaaatatctggagaggaagaatggaggattggcattgagatccatgtggacaagctaagtgggctctgtctgaaagctggcattcatccacaacattaaaaaaatatcaaaataagaaaggctgtaaattaaaaagaaaacacagaaaatactgctctcataaagatctgattgccttggcacaggccctgtgggcagaatcaaacgcatcactcccaactcccattgcagaagaaaagctattcaactctcagcggtggaggagtgcatgtggcggcagtttcaggtacaaacgatgtactgcactttcagacgcggatcttggaaatccaggacttcttggtaaagttgactgaaggtatattagatatttccccacaaaaatactatttggattctcccaccccctccctcccttgatgggacaacatcctgtatttttccttgggcaatacatatcattacttccaatttgaaacaagttagtataggagagagagagaggagagataggagaggagagagagagaggagatagagagagagatagagagagagagagagagagagaggagattgttttaagtggtattgtttttcctataggctgtccttgtcactctttcacggttacggtttggtcggaattagctgccggggcctccaccggcttgggctcttctgcagaggctgcggggccctgggccttgggtgtggaactaggcgcttccgtggctgcggggggtctccttggaagagggggcagccctccgagctgccgggttttgagtctgaagctggggccccgtcacttttggtctcctgggcggcaggagctgcgggcgcctcagtctttttgggttccccttcctccttgctgggctcctccccggcggcaggggccgcgctctcggccgggggccggcggcggcctcagcagctttgggggcctcgccgccccgcagcggggccgggggccgcctgctcctgctcgggcgccttcgggggctcagccttggcctctgccgcgccctccgtcttctcgggctccgccttcggggcctcctccttggcagccgccgcgtccttctcgccctccttctcctcggccttgccctcggcgtcctggtcgggcttctccttgccctccttggcctcggcgggctctgcgggcgcctggggctcactctccttcggggtcccctcctcttccgtcgccgcgccctcggccttcttgtctttctccttggctttctcgtcgttcacattgtagcccttcttcttcttgctgagcttgcctcccatcttggagttcggctctgggtgcctatgcagcccctgagttagcgcggtgccgccgagaggccggggtcgctggcgtcgtctggctggtgcctggccgctggcggaggctctctcccggctcgacggcggagcccggagcgaggagccagttggagcgctgccgccgccgtcgtcgccgcctcgtgcc

SEQ ID NO: 11 - DNA, 1016 bp, Homo sapiens
aaggatccttaattaaattaatccccccccccccccccactcttctggtccccacagactcagagagaacccaccatggtgctgtctcctgccgacaagaccaacgtcaaggccgcctggggtaaggtcggcgcgcacgctggcgagtatggtgcggaggccctggagaggatgttcctgtccttccccaccaccaagacctacttcccgcacttcgacctgagccacggctctgcccaggttaagggccacggcaagaaggtggccgacgcgctgaccaacgccgtggcgcacgtggacgacatgcccaacgcgctgtccgccctgagcgacctgcacgcgcacaagcttcgggtggacccggtcaacttcaagctcctaagccactgcctgctggtgaccctggccgcccacctccccgccgagttcacccctgcggtgcacgcctccctggacaagttcctggcttctgtgagcaccgtgctgacctccaaataccgttaagctggagcctcggtagccgttcctcctgcccgctgggcctcccaacgggccctcctcccctccttgcaccggcccttcctggtctttgaataaagtctgagtgggcggcaaaaaacgcgacctcgcatcgagacgataggaccgcaccgcgcctaaccgccagtacgagggatgggctacacagcgccggctacctcgaacacacagggtgcggggccgcgcgctgctggacagaagagatgttccgcacacctcagttgtcgtggcggcaggcgcgccccaccttgacacgtccgtagagcctagacgatctcattagtgctgtctctcaacgagaggctagctcctgagccaactcagaagatggcgacgagtggtcgccaccccagaactaaaacacccggccgtggcgctcactgtgtgtttttttccgaaacatcacgcagagcgggacagcagtggccacttcgtgtcatctcatcaggcggcagcataacgagcccatataattc

SEQ ID NO: 12 - DNA, 1948 bp, Homo sapiens
atgttcgccgaccgttgactattctctacaaaccacaaagacattggaacactatacctattattcggcgcatgagctggagtcctaggcacagctctaagcctccttattcgagccgagctgggccagccaggcaaccttctaggtaacgaccacatctacaacgttatcgtcacagcccatgcatttgtaataatcttcttcatagtaatacccatcataatcggaggctttggcaactgactagttcccctaataatcggtgcccccgatatggcgtttccccgcataaacaacataagcttctgactcttacctccctctctcctactcctgctcgcatctgctatagtggaggccggagcaggaacaggttgaacagtctaccctcccttagcagggaactactcccaccctggagcctccgtagacctaaccatcttctccttacacctagcaggtgtctcctctatcttaggggccatcaatttcatcacaacaattatcaatataaaaccccctgccataacccaataccaaacgcccctcttcgtctgatccgtcctaatcacagcagtcctacttctcctatctctcccagtcctagctgctggcatcaccatactactaacagaccgcaacgctcaacaccaccttcttcgaccccgccggaggaggagaccccattctataccaacacctattctgatttttcggtcaccctgaagtttatattcttatcctaccaggcttcggaataatctcccatattgtaacttactactccggaaaaaaaagaaccatttggatacataggtatggtctgagctatgatatcaattggcttcctagggtttatcgtgtgagcacaccatatatttacagtaggaatagacgtagacacacgagcatatttcacctccgctaccataatcatcgctatccccaccggcgtcaaagtatttagctgactcgccacactccacggaagcaatatgaaatgatctgctgcagtgctctgagccctaggattcatctttcttttcaccgtaggtggcctgactggcattgtattagcaaactcatcactagacatcgtactacacgacacgtactacgttgtagctcacttccactatgtcctatcaataggagctgtatttgccatcataggaggcttcattcactgatttcccctattctcaggctacaccctagaccaaacctacgccaaaatccatttcactatcatattcatcggcgtaaatctaactttcttcccacaacactttctcggcctatccggaatgccccgacgttactcggactaccccgatgcatacaccacatgaaacatcctatcatctgtaggctcattcatttctctaacagcagtaatattaataattttcatgatttgagaagccttcgcttcgaagcgaaaagtcctaatagtagaagaaccctccataaacctggagtgactatatggatgccccccaccctaccacacattcgaagaacccgtatacataaaatctagacaaaaaaggaaggaatcgaaccccccaaagctggtttcaaggccaaccccatggcactccatgacttttacgaaacaaataacaagcagacaaaacaacaagaggggaccaaagcatacacaaggggccgaacatcactaccaacaaggtaacaacggcgccccatgacggagcataacacgagacgcgcggcacaacaccagagagaaaacacgcaggaaccgggaggcgcaccacgtggggaacacgagaacacccagacaacacagagagcagacagagataggaaagaagcataaaagagaggcgaagacacagaagaagaagagaagagagagagaaagccaaacagcagaagtagcaagcacaagaaacaaccggtcacctaccgccgtcctgccttc

SEQ ID NO: 13 - DNA, 1356 bp, Homo sapiens
cttctcgcgagccgtgtttttgcgccggcgcctcttttgttttgtgccgccctttcgttggcccctgctttcgaccttacggggtgttcggctgattagggccccccccggcgttgagtagttttttggccgccccccccctccttgcttttttgttttgttcgtcgcctgtgtctttgtctctcgcttcttgccagcgttgtgtggtcggtgggtgtgtgtcggtggtgtgctgctgttgtcgttgtctgtgtgtgctttttgtgtgtctggtgttttttttctggattaagatgttttaattaatatacataatgtatagtagttcatataatttattaatggcattttctataggacactgtaattaattcagtgacatcaatattgacctcatacagacaaaagatgaaagctgggttttctcgtgtaccaagtacaaaacatgtgctaaaaagttaacatacacagttgtaagagatcaacgtcgggatgactcaagtttatagtagttgcttcacacggttttccaagacttggatgccacccagtgttgccgtgtttgtgcaaatgccagctctggacggcctgactacctccttttgccagccccacttttgcctgttttactgctgccgctgctagatttgccagatgattttgaagagaagagtcttgtcatgaactcagaaacatcaggcaactcatggttggaattcagcatattcattgactgctccatttcccgtctcatgtcaggatcacttgtgttgaccactttaggcagaagcacaaatatcaataaaggaagaaccatcatcataaccattgggttcattagaaagtctgtccagccccacgattcccttttaataaagtaagaaggtggacctgaagatttcatttggagaggatagggcagtctgacaacctctgatgttttgatgtaattcacatatcttgctctcatttttcctttcgaagtgatatccactcgaacgggatcaaatctgtaagctggagatacaacttccactacataagatccagaaggtatatcatgaaccacaaaactcccatctgtcttaaggaaaccgacgtgctcttctccgtctaccagcactcgggccgccgagatccagtcctgaggcttcacccctggaacaactgcacgcccctcaatcttgaagcgatctcctatgccgaccccactccctcccgatccctcagcagcagccccgggcacctccgagctctggacatcccccgatagcagcagcagcagcaggacgggaaagaagccccacagagcggccgccatgacagcagctctgcactcagaccggcagccccgga

SEQ ID NO: 14 - DNA, 1762 bp, Homo sapiens
cgtctggttcaggggctagaaaagagcgtcgatgccggcggcagtgatgagtcctaggaggcgctggctctttggcggctcggaggagcggctgctgctgctgctgctgctgctggtggcccctttgcagatgtattgctgtccttgaatattagcccatttgaaaacgcctgggaagttcagccatcagtatgtccaagtacaaacttattatgttaagacatggagagggtgcttggaataaggagaaccgtttttgtagctgggtggatcagaaactcaacagcgaaggaatggaggaagctcggaactgtgggaagcaactcaaagcgttaaactttgagtttgatcttgtattcacatctgtccttaatcggtccattcacacagcctggctgatcctggaagagctaggccaggaatgggtgcctgtggaaagctcctggcgtctaaatgagcgtcactatggggccttgatcggtctcaacagggagcagatggctttgaatcatggtgaagaacaagtgaggctctggagaagaagctacaatgtaaccccgcctcccattgaggagtctcatccttactaccaagaaatctacaacgaccggaggtataaagtatgcgatgtgcccttggatcaactgccacggtcggaaagcttaaaggatgttctggagagactccttccctattggaatgaaaggattgctcccgaagtattacgtggcaaaaccattctgatatctgctcatggaaatagcagtagggcactcctaaaacacctggaaggtatctcagatgaagacatcatcaacattactcttcctactggagtccccattcttctggaattggatgaaaacctgcgtgctgttgggcctcatcagttcctgggtgaccaagaggcgatccaagcagccattaagaaagtagaagatcaaggaaaagtgaaacaagctaaaaaatagtctttctcaactgttggctaagaagaaatgcaaaagaagtggcataggagtgtgttatgggtgctgaactctctctctttttccccgattttccagagctaggctgtggagtagagtttgtataggtaactaggtaacttattgtggcccagataaggctttaggatgcctcagtgcttatgtcatagccttatgagttagctttcttgctagccccctagtcggtcaccaaactagtaactagtggggcttaatgaaggtcataagtttctgagatgggagagcaacaagtagagatgaagttaaaggtatttatcattcaagaaatcattattgagtcaccattgacaggcactattctaatcagtagttcactttaatatttaataagattttctgggataacagtaagggatattagataatataccgtatgtatttattactagtcttttcctctaggaaaagggatactttgataattaaggccagaggcccattagttgagaaagtcacagatatatttctccaagaaagccaacaaccaccaccacaatgacagaaatgacaacaaggccctttaacttgtcttctagtttagagacatccttcatttgacatttagtagaattcctctttggccacaagaataagcagcaaataaacaactatggctgttgaggttctcattttggtttgttttaattttttgaactttgggtacctgtaattagtttaaaaataaagttcctgataataaagtgactgaaaatggatccccaaaaaaaaaa

SEQ ID NO: 15 - DNA, 2017 bp, Homo sapiens
ggcacgaggcgaacaggaagaggacgaaaaaaataaccgtccgcgacgccgagacaaaccggacccgcaaccaccatgaacagcaaaggtcaatatccaacacagccaacctaccctgtgcagcctcctgggaatccagtataccctcagaccttgcatcttcctcaggctccaccctataccgatgctccacctgcctactcagagctctatcgtccgagctttgtgcacccaggggctgccacagtccccaccatgtcagccgcatttcctggagcctctctgtatcttcccatggcccagtctgtggctgttgggcctttaggttccacaatccccatggcttattatccagtcggtcccatctatccacctggctccacagtgctggtggaaggagggtatgatgcaggtgccagatttggagctggggctactgctggcaacattcctcctccacctcctggatgccctcccaatgctgctcagcttgcagtcatgcagggagccaacgtcctcgtaactcagcggaaggggaacttcttcatgggtggttcagatggtggctacaccatctggtgaggaaccaaggccacctttgtgccgggaaagacatcacataccttcagcacttctcacaatgtaactgctttagtcatattaacctgaagttgcagtttagacacatgttgttggggtgtctttctggtgcccaaactttcaggcacttttcaaatttaataaggaaccatgtaatggtagcagtacctccctaaagcattttgaggtaggggaggtatccattcataaaatgaatgtgggtgaagccgccctaaggattttcctttaatttctctggagtaatactgtaccatactggtctttgcttttagtaataaaacatcaaattaggtttggagggaactttgatcttcctaagaattaaagttgccaaattattctgattggtctttaatctcctttaagtctttgatatatattacttgttataaatggaacgcattagttgtctgccttttcctttccatcccttgccccacccatcccatctccaaccctagtcttccatttcctcccgccagtctccattgaatcaatggtgcaggacagaaagccagtcagactaatttccttctttcctcgcacttctccccactcgtcatcttttaactagtgtttcacaaggatcctctgaaaccctctctgtgccccaagtacagatgccattacttctgctttcgtatctcctcaggcaaaagtggagggtgccttatgggccctcctcataggttgtctctgcatacacgaacctaacccaaatttgctttggtgccagaaaaactgagctatgtttgaacaaagatgtcgtgcaaactgtactgtgaacaacagttggtttaaaatatgaggggcaaggaggaggatgcatttcaaaagcttgattgatgtgttcagagctaaattaagaggagttttcagatcaaaaattggttaccattttttgtcagagtgtctgatgcggccactcattcggctccccagaattcctagactgggttgatagggtcatattgtgaatgtctcactacaaaatgacttgagtccagtgaaatctcattagggtttaagaatatttcagggatccttaatgttttgatttttgttttctgaaattggattttattttattttatcttataatttcagttcatctaaattgtgtgttctgtacatgtgatgtttgactgtaccattgactgttatggaagttcagcgttgtatgtctctctctacactgtggtgcacttaacttgtggaatttttatactaaaaatgtagaataaagactattttgaagatttgaataacggtgcttagattgcctttcaacaacagcaaaacaaaaaaaaaagagggggcgcagaagaaccccagggccagtacagccaccgtttggaaaggccccctggggcaatcaacacacgcggcccgtaac

SEQ ID NO: 16 - DNA, 1150 bp, Homo sapiens
tcccagcctccagaactgtgaagtccaagcaagggactggcagattcagtgtctggtgagcattcaccttctggttcacacatggagccctctagctttgtcctcacatagcgaaaggggcatgcgagttctctcgtgccgaattcggcacgaggaggctgcggtcatggagggagcaggagctggatccggcttccggaaggagctggtgagcaggctgctgcacctgcacttcaaggatgacaagaccaaagaagcagcagtccgcggcgtgcggcaggcccaggcagaagacgcgctccgtgtggacgtggaccagctggagaaggtgcttccgcagctgctcctggacttctagggatctcagccgtggctgaggccacccccagaggagcccctggtccacagaagcaggccttgtgtttccagcggcctctgataagaggcagggaaggacctgaaggatttggagttgattcaaacaagatctctgggagtctccagcctgtgcagaaggggcaggactgcagtgcactgcgggccttggagtgtccagtggggacactggtgtgggaaggggcagcacctggggagtccctgcctctcctccctgggacaatagtgtgcatgccacccggggtcctacaggcaggtgctgggaaaggcctggccagcaggtagcctgtgtgtttgacaaacagcagctggcagcgctgcctcctgcccacattcctgccacccgacatcaaagctggcgtgtgacctttccagccatgcgatattccccttggaagatgcttccccaggctataaatttgttctcacaaagcaacatcaataaatcaaaactgtctcttcccaaaacatcaacagctcagaaccaacccacacaccaaagacaacacacacaaaaaaaagggggcgcataaaaatcaccaggggcccacattaccccccccctttttttacaaggggcccaacgatgattataacagaccccgcgcgattaacacccggaccggaaaactcgagccctgagaaccccttcgtgggtatagggacccacataaacccgaatactatgtttgtccacatgcgcacttgtaaaccacccatacccacataacccccaccgacaacaacccgacac

SEQ ID NO: 17 - DNA, 446 bp, Homo sapiens
gtaccgtgtccggaattcccgggtcgactggaaggagcagtacatccacgagaactacagccgggccctggaagtggaaggaatcgtggagcagccatgcccggacgtgtactggttcccactgctgtcagaacaaatgtgtgatgagctgttggcagagatggagcactacggccagtggtcaggcggccggcatgaggattcaaggctggcttggaggctacgagaatgtgcccaccgtggacatccacatgaagcaggtggggtacgaggaccagttgctgcagctgctgcggacgtatgtgggccccatgaccgagagcctgtttcccggttaccacacaagaagcgggcggtgatgaactttgtggttcgctaccggccagacgagcagccgtctctgcggccacaccacgactcatccaccttcaccctcaacgttgccc

SEQ ID NO: 18 - DNA, 2294 bp, Homo sapiens
ttaaaacaaacgcatatgacattttacttaacagactggcaaaaatgaaaaaagaaacataatatcctgagctggcaggagcacaaggaaatgggtctcgtgctgatgatgaatgtgaattgataacagtttttttgtgatttgcgatagcacaaaattgaaaacagcacaaatgtacgttactctgggctcgctaaataggcactaaataaaacgagtcagtttcttctcccgagcaagtaaactagagggtagatccacgcgacccggagtctaggacacatcctcgggagtgaacagccacaattcacagacgatgtgtgcagccggggcatgaaaggcccaaggcaaacacaccacgaggtaaacgccgggactctgaggagaggggtggaagccgggacttcgaggaggggtggaattgacttagagacaggagggagcctcttggagggcaaagctgccctgggcaagtgttcttttctttctaaaccttccttctggtctctgtctggaaatttaagcgcgccccctggtgggagagaggaaggggaagaaaagggggtctcggaggagaataaagtgctcgtgggtggaagaaacctggaacagaaaatgccagaaaaacctggaacagaagtgcagacggcccgcggcggccccggtgatctccacactcaatcaccctctccaggggagcgatcgctcctgaggctgccagcaccccaccaccacccccaacccgctagtgccgatgacggccacagaggcctttctcgcccccagctcacctttgcacacacagttcccccgtgcagagtttgtgcctccctcatctcttagttctcagctaagactttccctgaccccacccaggtcatacctcctgtcgtcgcgccgcacgcagcatcccagacctcaccttcgtattactagagctggcccgttgtgattcaggtctgccttccacccaggctgtggccccttcagggcagcatggtacccgtcctgctcactactgcacccagagcctaggacatgcctggcacctaagcagatactactgtactcgggagccatgcatggcctgcgcaggagggtggcaggccaggtgacaggttcaaggtggagcagaggagctttattagagggacagggtgaaacatatttacaccggccgagcagggaccttaagaagcaggcgtgggagcagggtcccagctcagacgagttccaccttggcattggggtacaccgccaccacgtcgtagccctcgggcggcttcacgcgcgccttggcgtggctctcacagtagagccgctcgtccagaaagaagtaaccacgctgcttgaggttcaggccgcagtcactgcacatgaagcactcgggatggtagagcttgtcccgtgccttgacgatggtgcccacgatgccgtggccgcagcgcgtgcactcgggcagcccctgcaggccgctcagcggagcgcccagcttgctggccgtgggcttgaggttccgggggccgccaggcccgggccaatccccgccctcgccggcctctagcatgccctgcaagtagcggaaggagcctgactgcttgggctccgcggccacgggctcggctggctcccgcagcatcctgtacacctcggagcccaggtcgactctgcagtcccggctccgcgggaggcctctggctgggtcagcgctggggggtggagacacatgcagggtgctcatctgggctggcagggtggcctcgctgctgccattgtgagggactggaaagcgagggggttgtccatatggagatcccaggcttggtctgccatcttctggcccagtcccggtgcctgagggccgcctgctggttgttgggctgccgtcctggatctcaggatcgatgtggatcctgtgtgcctgagccttgctgtcatcaggggcactgggccagctcctgccctcaggcctgctcacagacagtgtgaggtgatcgtggcagcccttgatgcggttctgtgcctccaggtgtgtcatgagctctgtgctctcaccattgatggcctggatcaggtctcctgggcacagggcagccaatgcagccttgctgccagcatggacccgtgagatggtgaggggcgcgctgaagtcccggccgcccaccaggcggaagccccagggcgaaggcccgcgcagggtcacggaatggggcatcgcgggctggagccgcagccggagcctgagccggactctgaggagccgccgccgccgccgccgcctggacgccgccccc

SEQ ID NO: 19 - DNA, 1558 bp, Homo sapiens
agcggaacgcgctgtggaaaacatgctgctcgggggacccccccgcagtccccgctcggggacgagccccaaggggccctggagcagtacaggccacgtgcagtttggcaagagcccccagacctggcccaggcgcacaagaccccgctctccagagcctgccgcgccttcaggggttcggggctccacttggacgaggcgccgtgacactccgaggcgcgccgggccgacagcgctgtcccgctacgtgggccacctctggatgggccggcggccgccctcccccgaggcccgcggcccagtcccccgcagttcagctgccagtcgggccagaagaagcctcgcctccccggggatctccccaggccccctgaccgcaacgatcggaggggcggtggcggggggcgggcccaggcaggggagggcagaagcacacaaggaagtgtttccgggacagagggtgggcaagatggcggcgcccatggagctgttctgctggtcagggggctgggggctgccgtcagtggacctggacagcctggccgtgctgacctatgccagatttactggtgctccactgaaggtacacaagatcagcaacccctggcagagcccttcaggaactctgcctgcccttcggaccagtcatggagaggtcatctcagttccacacaagatcatcacccaccttcgaaaagagaagtacaatgctgattatgatctgtcagctcggcaaggggcagacaccctggccttcatgtctctcctggaggagaagttgctcccggtgctggtacatactttttggatagacaccaagaactacgtggaagtgacccggaagtggtatgcagaggctatgccctttcccctcaacttcttcctgcctggccgcatgcagcggcagtacatggaacggctacagctgctgactggggagcacaggcctgaggacgaggaagagctggagaaggagctgtaccgagagggctcgggagtgtctgaccctgctctctcagcgcctgggctctcaaaaagttcttctttggagatgcccctgcctccttggacgccttcgtcttcagcctacttgggcccctggctggctgcaggcaaagcttggcccagtgggaaagcttgcaggttcccacctgcgtgggcttgcacaaaacctctgtgcctattgtacccacatttctcagtctctacttccccctgggatgggagcttgagggtaccaccggcaacgccagaaaccagcagggcccagagactgaggaggagccataccggcgccgggaaccagatcctatctgtgctggcaggactggcagccatggtgggctacgccttgctcagcggcattgtctccatccagcgggcaacgcctgctcgggccccaggcacccggaccctgggcatggctgaggaggatgaagaggaatgatttgtcctcacgctcccaagactggtttttctactctcatgcattccagaggcccccgtgcctcctcgttgttggtacagccggacacggggtgctgccacccagaataaa

SEQ ID NO: 20 - DNA, 2652 bp, Homo sapiens
gatgcaggaactgagcttcatcgctcttcaatgttagctgaagcaatggctaatttagtagttgacaaatctaaaaggagccaagggtcaagctctaaaatgggaaaatgttataattgtggaaaaactggacatttaaaaaaggaatgccaccagatctcaggacagaaaggatcttacaatgcagttcccccatcagcggaaaaaacgccaggactttgtcctcgctgtaacaaaggaaatcactgggctaatcactgctgctcaaaatttcatcggaatggcaccccgttttaggcatgggttcctggaggcacattgattccatcaccccaggaacaccaggaagtgcaggattagatctacctgccagagaaagaatcacattagttgggggagacaaacccatcaaagttcccactggtatttggggaacttcaccagcaggatacatgggactaattttaggcaaaagccgccttaacttgcaaggcatgactgtagtcccaggagctgttgactctgattatgaaggagaaactcaagtagttttaatgtcacaagatctttgggtttttgaactgggagaatatattgctcaattattgcttattccctgcaaattacacccttctccatgaaaggagaaacgaggaaataaagggtttgggagcacaactacatgggaaatctatctatcccgacccatagcctctaatagacccacctgtgtagtacaaattaaaggaaagaaattttatgggcttatggatacgggaactgatgtatcagtaatatctaaagacaattggcccacatcctggctcttgcaattaacttctacatccctagtggaagtaggaacagctcaaagtgttcaacagagtgctgagattttaccttgtcttggtccggatgggcagtcatgtacttttcagccttatgttgcaaatatagctatcagtttatggggctgagacttacttacagcatgggagatgagacttacaaatgaaaactttgataacccaggatttaaaatgttgaaggacatggatatcagagtgaaaaaggtttagggaaattcctacaggaaaatcctaacctgatatcagtaactggcaaaacagatagaaaaaggctaggaaatcaggatttctgacagaggtcattgatatttctcccctgcccactgccttaccattagaatggcttagtgacaaacctgtgcgggtggatcaatggcccctaacacaggagaagctagatacctctggtgcttcagcgcaatgctgagagctaattacagtcattcaggttttacagctcacagcttcagatcctatcaacattgtctgtaattcagcttatgttgtaaacgtagccagtcacattcacatggaaactgctacagttaaaagtacactagacccagaactgcttaatttgtttcacttattctcaaatgctgcatgctacatgccaaacaggtgagacagctggtcatgtacagtgacattgtctgtcatcatttgctcatatggggatacttaaacaattaaaaactgacaatggactcgcttatactagtcatgcttttcaaaatttcttatagctttgggctataacccataaaataggaattccttataatcctaaaggacaaggcattgtagagcaggcacattgaacattacaacacatgttgaaaagacgaaaggggtataggaggccaactaccacctcaatcaaaactacatttagccttatttacttcacatttttggactcctggtacagatggtaagactccagcagaaagacattggcaagtgttagaggaaaagaggaaagtttatctgaaagcattatggaaatccctggaaggacaatggaaaggtcgggtggatttactgacgtggagaagagggtatgcttgtgttttcacaggagatggacaagccgtgtgggtgccctcaaggtgtgtgcaaccatggaatgggagactggaggaacccagggtggccaaccatgggtccggtccctctggtgtgagccatgagccagctgagcctgagtgcgaagacggagagaaggccgaccacagtcatgacatcaacccccataacctggggacaactcaagaaaaccacacaggaggctgagaaactactggagcaccagggacagtctgtaaagttggatggaccatcaatgggaaaatgagagctgcccaccctggccttacactccttcaattaatacataaacagaaaggaggatatacagagagccaaaggcccatgggacgtgaccaacattccactgagtctatacgatcaaacagcaaactgtttatcatgaatacagaatgtgggcaaactcatgactgtgcctgccccagaaggtttgctgagggcaattgcttcctgacgccaagctccttgaggttatctattgggacatccagagaatgcagtcttgcaagcctactctggaccgagcagctgaccccctcttccacttcccttcacactatctcttttgcctaataaatacggaaggctgtgtacaaggtcaggtcccttgtccactagaggcaaggtgcttcctgacccttcttccaaatatactcttttgtctttgtctttt

SEQ ID NO: 21 - DNA, 3231 bp, Homo sapiens
ggctgctttagaagaacaagctggtttggcagctacctcagagaagcaggaccctgggcagcgtgaaagggcctctgcccccagggtggctgggctttggatcctggatccgtgggtcctggaggggcaggagtggttcaggaaacagctctcccagtgaagtgatatcactgcctctgtggacaagacacctccaggagcccagctcacagccaccggtaccttcttccagggctgctgttatagtttctgcatggaaagcacttggaacaatgcctggttgttcccctctttggccctctcagggccctaggagcctttgtgtgtcctgctcacattgtctccagggcctcggacagggcctggtacagaacatatgactgagtttctggagtcccacaggccagcgttggagtcctgacacctcagtatagctgtgcacctctgggcaaatagtttctctgctctgagccccaggacaagctgggggcctccatgggcgcctgagggccaggcgccagggccgtgggcacgagtatggtgagacaccagcccctgcagtactacgagccacagctgtgcctctcctgcctcacgggcatctacggctgccgttggaagcgctaccagcgctcccatgatgataccacaccgtgggagcgcctctggttcctgctcctcaccttcacctttggcctcacgctcacctggctttacttctggtgggaagtccacaatgactatgatgaattcaactggtacctctacaaccgcatgggctactggagcgactggcccgtacccatccttgtgaccacagctgctgccttcgcatacatcgctggcctcctggtcctggcactatgtcacattgccgtggggcagcagatgaacctgcactggctgcacaagatcgggctggtggtcatcctggcttccacggtggtggccatgtcggccgtggcccagctgtgggaggacgagtgggaggtgctgctgatctccctgcagggcacagcgccattcctgcatgtgggggctgtggcagcagtcaccatgctctcctggatcgtggcaggacagttcgcccgtgcagagcggacctcctcccaggtgaccattctctgtaccttcttcaccgtggtgtttgccctctacctggcccctctcaccatctcctctccctgcatcatggagaagaaagacctcggccccaagcctgctctcattggccaccgcggggcccccatgctggctccagagcacacgctcatgtccttccggaaggccctcgagcagaagctgtacgggctccaggctgacattaccatcagcctggacggcgtgcccttcctcatgcatgacaccaccctgcggcgcaccaccaacgtggaggaggagttcccggagctggcccgcaggcctgcctccatgcttaactggaccaccctgcagagactcaacgctggccagtggttcctgaagactgaccccttctggacagccagctccctgtcaccctccgaccacagagaggcccagaaccagtccatctgcagcctggcagagctcctggagctggccaagggcaatgccacactgctgctcaacctgcgtgacccgccccgggagcacccctaccgcagcagttttatcaacgtgactctggaggccgtgctgcactccggcttcccccagcaccaggtcatgtggctgcctagcaggcagaggcccctggtgcggaaggtggctcccggcttccaacagacatcaggctccaaggaggcagtcgccagcctgcggagaggccacatccagcggctgaacctgcgctacactcaggtgtcccgccaggagctcagggactacgcgtcctggaacctgagtgtgaacctctacacagtcaacgcaccgtggctcttctccctgctgtggtgtgcgggggtcccatccgtcacctctgacaactcccacaccctgtcccaggtgccttcccccctctggatcatgcccccggacgagtactgtctcatgtgggtcactgccgacctggtctccttcaccctcatcgtgggcatcttcgtgctccagaagtggcgcctgggtggcatacggagctacaaccctgagcagatcatgctgagtgctgcggtgcgccggaccagccgggacgtcagcatcatgaaggagaagcttattttctcagagatcagcgatggtgtagaggtctccgatgtgctctccgtatgttcagacaacagttatgacacatatgccaacagcaccgccacccctgtgggcccccgagggggtggcagccacaccaagaccctcatagagcggagtgggcgttagctgaagacatgtctgtcccacctgtacctgacacagaagctggggagcctaggagagctggtggaagtgtgtctgaactcggagtgctctgggagcgggctccacagcctccttgtgggctccagccccttgtcagccgcagcctctcttgagggggactccctgtcccctgaggcccagctgggccaggactccatcctttcagatgcccctgcaggcctggggctccttctgggaagtatggggcctagggcttggtccccctcttctgaggccctctcctgtatcccgacctggaagctttgatgggtcatgggccatgccataccccctgtggcaatggagtgtgtggatgctcacctgtgccatctgtcctcctgtctgtgccaggaggcacctgagttctctgctgttatcctgccccaagggcctgggccgagcctctacctgaagcaactctgctcttcctgtcagtctcaaagcacaaggaggttcagcccaggaggaagccagctgcaatgtggagacacgtcctcctccccaacccacctcatgccaccgccaaccccctgccccaggagcgggcctgagccacgtcccctaggagcagctggagatggccaaaagagtgagctcaggactactggatcccatgcccaggtgtccagcagacctcaaggcagaagggtcacctaacccaggagtccacagactgatgtgacctcaggttcccacatcagtggccacagggcagggcccacctggtagaagtgttctggatatggccagggtgggtgtgtggctaagtgggcctgaacagagggaacctagggcccttggccaatgtgattaaagctgccatcttgaaaaaaaaaa

SEQ ID NO: 22 - DNA, 2613 bp, Homo sapiens
cgggctgggcggttccgcggcctgggcctaggggcttaacagtagcaacagaagcggcggcggcggcagcagcagcagcagcagcagcaatctcttcccgaacacgagcaccacaggcgcccgaaggccggaacaggcgtttagagaaaatggcagacgatattgatattgaagcaatgcttgaggctccttacaagaaggatgagaacaagttgagcagtgccaacggccatgaagaacgtagcaaaaagaggaaaaaaagcaagagcagaagtcgtagtcatgaacgaaagagaagcaaaagtaaggaacggaagcgaagtagagacagagaaaggaaaaagagcaaaagccgtgaaagaaagcgaagtagaagcaaagagaggcgacggagccgctcaagaagtcgagatcgaagatttagaggccgctacagaagtccttactccggaccaaaatttaacagtgccatccgaggaaagattgggttgcctcatagcatcaaattaagcagacgacgttcccgaagcaaaagtccattcagaaaagacaagagccctgtgagagaacctattgataatttaactcctgaggaaagagatgcaaggacagtcttctgtatgcagctggcggcaagaattcgaccaagggatttggaagagtttttctctacagtaggaaaggttcgagatgtgaggatgatttctgacagaaattcaagacgttccaaaggaattgcttatgtggagttcgtcgatgttagctcagtgcctctagcaataggattaactggccaacgagttttaggcgtgccaatcatagtacaggcatcacaggcagaaaaaaacagagctgcagcaatggcaaacaatttacaaaagggaagtgctggacctatgaggctttatgtgggctcattacacttcaacataactgaagatatgcttcgtgggatctttgagccttttggaagaattgaaagtatccagctgatgatggacagtgaaactggtcgatccaagggatatggatttattacattttctgactcagaatgtgccaaaaaggctttggaacaacttaatggatttgaactagcaggaagaccaatgaaagttggtcatgttactgaacgtactgatgcttcgagtgctagttcatttttggacagtgatgaactggaaaggactggaattgatttgggaacaactggtcgtcttcagttaatggcaagacttgcagagggtacaggtttgcagattccgccagcagcacagcaagctctacagatgagtggctctttggcatttggtgctgtggcagaattctcttttgttatagatttgcaaacaagactttcccagcagactgaagcttcagctttagctgcagctgcctctgttcagccacttgcaacacaatgtttccaactctctaacatgtttaaccctcaaacagaagaagaagttggatgggataccgagattaaggatgatgtgattgaagaatgtaataaacatggaggagttattcatatttatgttgacaaaaattcagctcagggcaatgtgtatgtgaagtgcccatcaattgctgcagctattgctgctgtcaatgcattgcatggcaggtggtttgctggtaaaatgataacagcagcatatgtacctcttccaacttaccacaacctgtttcctgattctatgacagcaacacagctactggttccaagtagacgatgaaggaagatatagtcccttatgtatatagctttttttctttcttgagaattcatcttgagttatcttttatttagataaaaataaagaggcaaggatctactgtcatttgtatgcaatttcctgttaccttgaaaaaataaaaatgttaacaggaatgcagtgtgctcattctccctaaatagtaaatcccactgtatacaaaactgttctcttgttctgccttttaaaatgttcatgtagaaaattaatgaactataggaatagctctaggagaacaaatgtgctttctgtaaaaaggcagaccagggatgtaatgtttttaatgtttcagaagcctaactttttacacagtggttacatttcacatttcactaatgttgatatttggctgatggttgagcagtttctgaaatacacatttagtgtatggaaatacaagacagctaaagggctgtttggttagcatctcatcttgcattctgatcaattggcaagaaagggagatttcaaaattatatttcttgatggtatcttttcaattaatgtatctgtaaaagtttctttgtaaatactatgtgttctggtgtgtcttaaaattccaaacaaaatgatccctgcatttcctgaagatgtttaaacgtgagagtctggtaggcaaagcagtctgagaaagaaataggaaatgcagaaataggttttgtctggttgcatataatctttgctctttttaagctctgtgagctctgaaatatatttttgggttacttcagtgtgtttgacaagacagcttgatatttctatcaaacaaatgactttcatattgcaacaatctttgtaagaaccactcaaataaaagtctcttaaaaaggcc

SEQ ID NO: 23 - DNA, 2323 bp, Homo sapiens
ggcacgaggctctcctccagcctctcacactctcctcagctctctcatctcctggaaccatggccagcacatccaccaccatcaggagccacagcagcagccgccggggtttcagtgccagctcagccaggctccctggggtcagccgctctggcttcagccagcgtctccgtgtcccgctccaggggcagtggtggcctgggtggtgcatgtggaggagctggctttggcagccgcagtctgtatggcctggggggctccaagaggatctccattggagggggcagctgtgccatcagtggcggctatggcagcagagccggaggcagctatggctttggtggcgccgggagtggatttggtttcggtggtggagccggcattggctttggtctgggtggtggagccggccttgctggtggctttgggggccctggcttccctgtgtgcccccctggaggcatccaagaggtcaccgtcaaccagagtctcctgactcccctcaacctgcaaatcgatcccaccatccagcgggtgcgggccgaggagcgtgagcagatcaagaccctcaacaacaagtttgcctccttcatcgacaaggtgcggttcctggagcagcagaacaaggttctggaaacaaagtggaccctgctgcaggagcagggcaccaagactgtgaggcagaacctggagccgttgttcgagcagtacatcaacaacctcaggaggcagctggacagcattgtcggggaacggggccgcctggactcagagctcagaggcatgcaggacctggtggaggacttcaagaacaaatatgaggatgaaatcaacaagcgcacagcagcagagaatgaatttgtgactctgaagaaggacgtggatgctgcctacatgaacaaggttgaactgcaagccaaggcagacactctcacagacgagatcaacttcctgagagccttgtatgatgcagagctgtcccagatgcagacccacatctcagacacatctgtggtgctgtccatggacaacaaccgcaacctggacctggacagcatcatcgctgaggtcaaggcccaatatgaggagattgctcagagaagccgggctgaggctgagtcctggtaccagaccaagtacgaggagctgcaggtcacagcaggcagacatggggacgacctgcgcaacaccaagcaggagattgctgagatcaaccgcatgatccagaggctgagatctgagatcgaccacgtcaagaagcagtgcgccaacctgcaggccgccattgctgatgctgagcagccgtgggcgagatggccctcaagggatgccaagaacaagctggaagggctggaggatgccctgcagcaaggcccaagcagggaccctggcccggcctgctgaaggagtaccaggagctgatgaatgtcaagctggccctggacgtgggagatcgccacctaccgcaagctgctggcagggtgaggagtgccaggctgaatggcgaagggcgttggacaagtcaacatctctgtggtgcagtccaccgtctccagtggctatgggcggtgccagtggtgtcggcagtggcttaggcctgggtggaggaagcagctactcctatggcagtggtcttggcgttggaggtggcttcagttccagcagtggcagagccattgggggtggcctcagctctgttggaggcggcagttccaccatcaagtacaccaccacctcctcctccagcaggaagagctataagcactaaagtgcgtctgctagctctcggtcccacagtcctcaggcccctctctggctgcagagccctctcctcaggttgcctgtcctctcctggcctccagtctcccctgctgtcccaggtagagctggggatgaatgcttagtgccctcacttcttctctctctctctataccatctgagcacccattgctcaccatcagatcaacctctgattttacatcatgatgtaatcaccactggagcttcactgttactaaattattaatttcttgcctccagtgttctatctctgaggctgagcattataagaaaatgacctctgctccttttcattgcagaaaattgccaggggcttatttcagaacaacttccacttactttccactggctctcaaactctctaacttataagtgttgtgaacccccacccaggcagtatccatgaaagcacaagtgactagtcctatgatgtacaaagcctgtatctctgtgatgatttctgtgctcttcactctttgcaattgctaaataaagcagatttataatacaataaaaaaaaaa

SEQ ID NO: 24 - DNA, 448 bp, Homo sapiens
gaccggtccgcaattcccgggtcgacttcgctgtcgacgatttcgctttttttttttttttggggttaaaaggtctttattaccccctcaataaaaaaaaaagggggacgctgccatccacattttcatctttgtgatctggccttgacctctggtctcttcaatttctcctttggggggcgtgattaacctacttttttttttttttttgagatggcttctcactctgtcacccgggctggagtgtagtgacacgatctcggctcactgcattttcctcctctcaggttcaagtggttctcctgcctcagcctctcaagtagctgggattacaggtgtccagcacctcccccgacttatttttatatttttagtagagacgggatttcgccatgttggccaggctggtctcaaactcctgacctcaagtgatctgcccaccttggct

SEQ ID NO: 25 - DNA, 3570 bp, Homo sapiens
ccctgctcttttgtttcttttgttttttttcccgcagcaggggagagcgcacagcacaccttgtgcgcccccgctttgtacccccttcgcgttgtgacatatcttttttgtcccccacatgttatttttcgcgcgccccgccacattttttttttgtccaaatgtttgtttgttcgtgttgtgttttgttgtgtaaggaacagttttattctgttttagaataaaaactttgctttaatattgtaaggggtactgcaggtatgccatgctgccagttattgctggggcacaaaacgccccagtcagtgattcggagggctgggaaaacgcataaactcataatttcagagcaagtagaactagtatttacagttttctttcttgaaattggcccgggacatctccaacagtctacacatgtattgccatggtacttgctctgatgctctgaatgcctcggaactgtgttcaatatcatgatttgtgggtcctctaaaaggttttgttgttaacatgcaagcaaacagcactgaacaatattgtctaaactatggctgccaagtactggatcttcataatgaaaccaaattacaaaacactgccttgtagagctatacaaaagatataaaatgaaaataaaaaatgtcaaccagccttaaatattccaattctcctacagtgcagtttctatatctttatcactactgaatgttttaaggagaaagttaagaaaacaatcaaaatattagataaaaatatttaaatctttggatccttttattccatggccttcataaaaacacaaaagtggccagatttttcccactagagcttaaaatatcaaaaagattcactagtaatttataattagcaatgaactctatactgagtcatctgtgggtcatcataggcccaaggaccagtgttgccgtgtgttacaggctaccaaaataatttctagcactctgaatcctcttgaaatatgatggaatgagtcaaggtatcatgatatcatgactaaattccaggcataataggaaaaacaggttcattgatgcctagttttaaagtcctacaaaaggggggaagattacttatttgaaaatacagctaagtacattctcatctgtgattatttacatttgtatactgaaaatatcgattatctggacagatcctgtgatatgccatttgctacaaaatgaagttcttacaatgagcatgaataattaatcctttttagataatgaaataatgtatcaaatcttcatttatgttccaaacattaaaaaacaaaatcaaaaatgttaagcctggaaaactaagaaaaaaagacccacccataaggctgctgctcagcacatcaacttctgcaaggacacagtatgtttgctgactttaaaatgtttattctttaaaaaattagttgctttttatacagctatacaaagttcttaatgtttctttggcaatggaatataatggaattttacaactatataaaaaagttacctttgcctaagaaacagtatttactgtgtgtacatagttgactgacaaaattctctaccatccagcaccctaattaattgacgaaataagctacctcatattacaggattccccaaaagaaaggaggaaaaagacacacacatacacacacacacacacacacacacacacacacacacacacacaaccttctgtggctcaaaacacagtatcacggccctatctgcaggcaacttgcaattgccaaatacaatttagtgataaaaaaaaaaaaacctttcagtgatgaaaaaatacttgttaagtcccactgaagtactgctttagtttaactatacataagaaattacttaaccttctgctattccaaatatatttaatgctcatgttttaagatgagccttccacccccaaaagtaactgcattttatctttgaaattaagcggaaaaacaaacaaaaaacaaaaacccagtgctggtgacaaatgtacagcgaattcacttcttcattctttgcaaagactgaaatcaatgttcaggaccatgaagagctagaaattcacctattttcagagacttgtttgtagactatgcagcaactttgttgtctttcctatattcaaaatccgcaaactcccggcccccacgacctcctctgaatccaccgcgaaatcctcgaggggcagtgaaggtaccacctctgccaccaccacgccctctgccaccacggaaaccaagacctcctctgcctctgtatcccccacggccacggtttggacgaagtgggattccaaatgtttcagcatttaatcttctttcttcagcccaggttggtctccgttctctattgtcatcacaagaaatattatcaaagaaggatttagttttgtcataatagcaattaggtccaagtggatcttcttcatcggcatttccttcactgttttgggtatcaactcctgagtctcctttatcttcaccatttacaggcttctcctgtttctcaagtttatcttcttttaatttaagtttattatgaaactctctgtcaatctcttccttgttgaattgtgcatttgcactttcaaagtcaaagtctttctcaaatttcattggcccatctcgccgaataccaaatcttcccctgccaccccgatgacccccacgccctctccttggagctgaaggagcacctggagctacttgtctcttgttatcatttctgagttgctcattttctggccttgaaactttgtgtacttcagcttgcctgtgctcctgattctctcctgccttttggctggcagatggcaaaggcctggttgatacaggactccttctcccaacagctgctggagcaggtaagtgggctgaggcggtctgcactgcttgttccatggttgggctttttctcaaagggtctaactgagggcttgagcgaccttgagataactgtgtttttagagatcttgtatcctgtgtaaaggcagaaccaaccgcactactttggggtaaggtaccactgtttgatgtttctgttccaaaggatgtcaaagagcttccagcaacaccaacagcaccaaactgctgcccaactaaggaactcggactgaactgactgtatgtgggcatcctgccgaaaggtccataagaacccatggactggaatgaagaagtcgatgagcctagtgaggactgaacaatagctgggtcttgaggcaaagaacactgtggttttggtggctcacaaacagtaaggtctttaatgtcactcccacggaatataatgtattcaaagacttcatctcgaggtggtattggacgatctgtcggtctgtcttctgtaccaaaggatcgaactttggcaagggctacggtggagttttcggtgtcgatggtgtagaggatgccctcgtagcggatctccgccttggagatgaggctgatcttgctgccgatgtaaggggtgcccccgctcatggcgccgccgccgccgctcccagctgctcgcagagaggcagatcccacgccactgtcgcccgctccgcacgcccgct

SEQ ID NO: 26 - DNA, 2456 bp, Homo sapiens
ggcacgaggaggagagtcaggccaatggggccgcagttctttcttttttttttctttattcttatttttggagacagggtctcgctctgttgcccaggctggagtgcggtggtgcgatcacggttccatgcagcccccgacctcccgggctcaggtgattctcccgcctcagcaccgcgagcagctaggaccacaggcgcgagccactgcgtccggccggcgggacttatttgtcaggcggggattgggttccgccagcctaaagggaggggtaagcgccagaatatgaatcgccgggaagctgggagaaagctccgggaaaccctgagcagccaggtcgcctgctccgcccgctcccgctcccgatctctgattgctcctaactgacgtcactcccggtctgtccccgcccactcggtgctgccattggcagtcggtcgtgggtctgagagtcactggagctaccagaagcatcatggggccctggggagagccagagctcctggtgtggcgccccgaggcggtagcttcagagcctccagtgcctgtggggctggaggtgaagttgggggccctggtgctgctgctggtgctcaccctcctctgcagcctggtgcccatctgtgtgctgcgccggccaggagctaaccatgaaggctcagcttcccgccagaaagccctgagcctagtaagctgtttcgcggggggcgtctttttggccacttgtctcctggacctgctgcctgactacctggctgccatagatgaggccctggcagccttgcacgtgacgctccagttcccactgcaagagttcatcctggccatgggcttcttcctggtcctggtgatggagcagatcacactggcttacaaggagcagtcagggccgtcacctctggaggaaacaagggctctgctgggaacagtgaatggtgggccgcagcattggcatgatgggccaggggtcccacaggcgagtggagccccagcaaccccctcagccttgcgtgcctgtgtactggtgttctccctggccctccactccgtgttcgaggggctggcggtagggctgcagcgagaccgggctcgggccatggagctgtgcctggctttgctgctccacaagggcatcctggctgtcagcctgtccctgcggctgttgcagagcccaccttagggcacaggtggtggctggctgtgggatcctcttctcatgcatgacacctctaggcatcgggctgggtgcagctctggcagagtcggcaggacctctgcaccagctggcccagtctgtgctagagggcatggcagctggcacctttctctatatcacctttctggaaatcctgccccaggagctggccagttctgagcaaaggatcctcaaggtcattctgctcctagcaggctttgccctgctcactggcctgctcttcatccaaatctagggggcttcaagagaggggcaggggagattgatgatcaggtgcccctgttctcccttccctcccccagttgtggggaataggaaggaaaggggaagggaaatactgaggaccaaaaagttctctgggagctaaagatagagcctttggggctatctgactaatgagagggaagtgggcagacaagaggctggccccagtcccaaggaacaagagatggtcaagtcgctagagacatatcaggggacattaggattggggaagacacttgactgctagaatcagaggttggacactatacataaggacaggctcacatgggaggctggaggtgggtacccagctgctgtggaacgggtatggagaggtcataaacctagagtcagtgtcctgttggtcctagcccatttcagcaccctgccacttggagtggacccctcctactcttcttagcgcctaccctcatacctatctccctcctcccatctcctaggggactggcgccaaatggtctctccctgccaattttggtatcttctctggcctctccagtcctgcttactcctctatttttaaagtgccaaacaaatccccttcctctttctcaaagcacagtaatgtggcactgagccctacccagcacctcagtgaagggggcctgcttgctctttattttggtcccggatcctggggtggggcagaaatattttctgggctggggtaggaggaaggttgttgcagccatctactgctgctgtaccctaggaatatggggacatggacatggtgtcccatgcccagatgataaacactgagctgccaaaacatttttttaaatacacccgaggagcccaagggggaagggcaatgcctacccccagcgttatttttggggagggagggctgtgcatagggacatattctttagaatctattttattaactgacctgttttgggacctgttacccaaataaaagatgtttctagacatctgtacaaaaaaaaaa

SEQ ID NO: 27 - DNA, 4272 bp, Homo sapiens
gtcgcctctcacccgccccggccgctccagcccgaggcgccccgaccccgcgccactccgcgcccggccagccgcccgcagccatggggctcctgcccaagctcggcgtgtcccagggcagcgacacctctactagccgagccggccgctgtgcccgctcggtcttcggcaacattaaggtgtttgtgctctgccaaggcctcctgcagctctgccaactcctgtacagcgcctacttcaagagcagcctcaccaccattgagaagcgctttgggctctccagttcttcatcgggtctcatttccagcttgaatgagatcagcaatgccatcctcatcatctttgtcagctactttggcagccgggtgcaccgtccacgtctgattggcatcggaggtctcttcctggctgcaggtgccttcatcctcaccctcccacacttcctctccgagccctaccagtacaccttggccagcactgggaacaacagccgcttgcaggccgagctctgccagaagcattggcaggacctgcctcccagtaagtgccacagcaccacccagaacccccagaaggagaccagcagcatgtggggcctgatggtggttgcccagctgctggctggcatcgggacagtgcctattcagccatttgggatctcctatgtggatgacttctcagagcccagcaactcgcccctgtacatctccatcttatttgccatctctgtatttggaccggctttcgggtacctgctgggctctatcatgctgcagatctttgtggactatggcagggtcaacacagctgcagttaacttggtcccgggtgacccccgatggattggagcctggtggctaggcctgctcatttcttcagctttattggttctcacctctttccccttttttttcttccctcgagcaatgcccataggagcaaagagggctcctgccacagcagatgaagcaaggaagttggaggaggccaagtcaagaggctccctggtggatttcattaaacggtttccatgcatctttctgaggctcctgatgaactcactcttcgtcctggtggtcctggcccagtgcaccttctcctccgtcattgctggcctctccaccttcctcaacaagttcctggagaagcagtatggcacctcagcagcctatgccaacttcctcattggtgctgtgaacctccctgctgcagccttggggatgctgtttggaggaatcctcatgaagcgctttgttttctctctacaaaccattccccgcatagctaccaccatcatcaccatctccatgatcctttgtgttcctttgttcttcatgggatgctccaccccaactgtggccgaagtctacccccctagcacatcaagttctatacatccgcagtctcctgcctgccgcagggactgctcgtgcccagattctatcttccacccggtctgtggagacaatggaatcgagtacctctccccttgccatgccggctgcagcaacatcaacatgagctctgcaacctccaagcaactgatctatttgaactgcagctgtgtgaccgggggatccgcttcagcaaagacaggatcgtgccctgtcccctgtgcccacttcctgctcccggccatcttcctcatctccttcgtgtccctgatagcctgcatctcccacaaccccctctacatgatggttctgcgtgtggtgaaccaggaggaaaagtcatttgccatcggggtgcagttcttgttgatgcgcttgctggcctggctgccatctccagccctctatggcctcaccattgaccactcctgcatccggtggaactcgctgtgcttggggaggcgaggggcctgcgcctactatgacaacgatgctctccgagacaggtacctgggcctgcagatgggctacaaggcgctgggcatgctgctgctttgcttcatcagctggagggtgaagaagaacaaggagtacaacgtgcagaaggcggcaggcctcatctgaccccaccctgggccactgcctgctccagagagtggaccttgactcttccacacctgcctatactcactaatgttaacacgtcatttcctttttgtatttttaaacaagaaagaaaaccccagtcctcatttgccttccctacctcttcctcccagagtcctccccacagttcctaagggccactgtgtacccgggctgtgtgggccagaactggggggctgagtcttccctggccccttggaagaggcccccagatgcccaggctcacttcagtgttgagtcctccattgaggatgcccactgaggcagccaggcccctcaccagccctggggggaatcctaaacagagagagaaaaagggtatctgcccttcttgccaggcagctccactctcccgctgactgcccacaccctgcagagtggcaggggtgaaaggaagaaggaagtggctgagttattaatagccagagccactgggagactggggagactggctgtaacccccttcacacctgggtttggcatcagcacagactacgggaggggctggctccctccccctcagaccctcacttcctgtacctagaggccattctggatgctgccatgttgggaagtacagtctctgcccattacctgcatgcaggcaccagagcagggactgagaaaccccaaggatgggtcatctaagtgctgtccatatgaaccctggactttctgtccttagatcctcacatgttatccctgtctttctggggtacgtttcaaactgaggaagctacaacacagtgaagacccaaggaaggcctatgaaatggtcctgatgcccaacctcccaccccttcaatgtggggacgagaccccctcatctcagagtaatgggaagaacctcccacatctccctggcagcagatgaggtggcttcacatgcacttccctgtctggacttcagcccgtattccgaggagtagagaggcagaagagatgtcagcaaagcaagtgatgaagcagagtggatgtccactgtcaccaagctggatggcaagctgcggcccacaaaacagccagtcaggttggctttcctggtttcagacatgctcataccattcccattttctcagcctcttctcactgcctccagagaggtgggtgcctgggttgagagacacagctgctacgtgatagatgttgagagacagaagccaacgaaggaggtcattcatcaacaaatatatttattggagaccgactttgtgcaaagcaatgctaatcagggttctccatggagcttccctcagctcttacctcacctccctccatttacattagggccttctcccagggtgtgctcggtgggcagtgtgggactgggggtgtgggagttggtgagagcaggaggagaggtggggacagcaagaagccacagattggcatgaaggatcctgacctgactatccatgccatccatggcccccagactgactctgcacctggccctttgccagacagctctgtctccccatgtcctctggaacagctgggcatgggtcatggccattcatgacccttaagtgccacccttcttggaagaccccctccagaagcatactggaagccacctctggaaaagcctcatatggtgatatgccaaaatatttatgtcaatgtccaaacaaagtccaatgccatgagactgaagtctttgtggaaaccactgttacagacaagcttatttccaaagccacctcatttccaaacatctcactcaggaagggaggctcaatgtaacctcaggggccagttttagcatttgaaatggttctgcttggaaaatgatgccctgcaactaaccctggtctttcccatggcaatttaaccacatttggaaggcactgccttcagctgagtttatgaacaatgaatgccaaccttcaggttctagaagattggttgcactcccaaacctttattctctcttttcgtcttagaaatctaaattgcggtggctgtcgacacaaacaaaggggggcgcggccaaaaaaccccgggggggacccataggcaccccccttgttaagtagcgccagaaaggagataacaaaagagggccggctaaaacgcggggaggcacggatgctgtgaaccccggcgggcagcgagcaccacacgaagcaaaatcgatagtatcgactgatacatcgatgacgataaccaactcaagcaggcatgattatcgccgacgagcgaagtaacaaat

SEQ ID NO: 28 - DNA, 1259 bp, Homo sapiens
aaggatccttaattaaattaatccccccccccccccgcggccgggcccagcagcccctaggagcccagcgccgccgccatgtcctccggggctagcgcgagcgccctgcagcgcttggtagagcagctcaagttggaggctggcgtggagaggatcaaggtctctcaggcagctgcagagcttcaacagtactgtatgcagaatgcctgcaaggatgccctgctggtgggtgttccagctggaagtaaccccttccgggagcctagatcctgtgctttactctgaagactctaggagagaagtttgctgaggaatgccttcaagcacaaagtgatgaatgactgccttcaagtctcaagaaaacacttttccctaacttttagagatatttcagccctttcctgtggcctggtcctatagccaaaatcacagatattcatgagtttctacttgagtgagaaaactgggtgaaggaatagaattttaaatagtaataactgcttgttttttttgtgcaagtacttttatacataagataaacaaaaaccttaccaccaaacataccaaaatgcacctctttcataagtgagttactaagatttctatacctggaatatcatgtatgtttcatttactggatgtttacattttaggaaggaaaatagttctgtttatttaaacaactgaatacttataaactgttgttcctggaaggttatttattccataaaaaattgttcttttctcatgaattttataattcctaaatgaagaccagaaagtacaaattgctgggaggaagaataggctttattaatcaactgatgtcttgatttttctaaatgggaagattgctttatttttaacactaattatgggagcagattcttagcaaacttctttggaaaagttaatgttatgatgtgcattaggctgccccatcgtgtatataaatgaagcagatttgatttttgtattcttacgtttactctgctttgtagttgtggctgtacttaaagaaatacagaatttcatatatttaaaaatgtttaaaatgtgacccacagaacattgtaaatgattaaaaactaacatgaaaatattacaacctaaaagaattcttaacttcacaagtgttttacttcgacgatgtgcctttgatttaatttgggacacttttttagaaggatacattattcgtgtttgcaacggtctttgaagagcttggaaataaaatttctgcttaattaaaaaaaaaa

SEQ ID NO: 29 - DNA, 2148 bp, Homo sapiens
ccgaggctataagagggcgcacaagtggcgcggcgcaggagccgccgccagtggagggccgggcgctgcggccgcggccggggcgggcgcagggccgagcggacgggggggcgcgggccccccgggaggccgcggccactcccccccgggccggcgcggcgggggaggcggaggatggaaacacccttctacggcgatgaggcgctgagcggcctgggcggcggcgccagtggcagcggcggcacgttcgcgtccccgggccgcttgttccccggggcgcccccgacggccgcggccggcagcatgatgaagaaggacgcgctgacgctgagcctgagtgagcaggtggcggcagcgctcaagcctgcgcccgcgcccgcctcctacccccctgcgcgccgacggcgcccccagcgcggcaccccccgacggcctgctcgcctctcccgacctggggctgctgaagctggcctcccccgagctcgagcgcctcatcatccagtccaacgggctggtcaccaccacgccgacgagctcacagttcctctaccccaaggtggcggccagcgaggagcaggagttcgccgagggcttcgtcaaggccctggaggatttacacaagcagaaccagctcggcgcgggcgcggccgctgccgccgccgccgccgccgccggggggccctcgggcacggccacgggctccgcgccccccggcgagctggccccggcggcggccgcgcccgaagcgcctgtctacgcgaacctgagcagctacgcgggcggcgccgggggcgcggggggcgccgcgacggtcgccttcgctgccgaacctgtgcccttcccgccgccgccacccccaggcgcgttggggccgccgcgcctggctgcgctcaaggacgagccacagacggtgcccgacgtgccgagcttcggcgagagcccgccgttgtcgcccatcgacatggacacgcaggagcgcatcaaggcggagcgcaagcggctgcgcaaccgcatcgccgcctccaagtgccgcaagcgcaagctggagcgcatctcgcgcctggaagagaaagtgaagaccctcaagagtcagaacacggagctggcgtccacggcgagcctgctgcgcgagcaggtggcgcagctcaagcagaaagtcctcagccacgtcaacagcggctgccagctgctgccccagcaccaggtgcccgcgtactgagtccgcgcgcggggcgcatgcgcggccaccctccccaaggggcgggctcgcgggggggtgtcgtgggcgccccggacttggagagggtgcggccctggggacccccccctccccgagtgtgcccaggaactcagagagggcgcggcccccggggattcccccccgagggtgcccaggactcggaaggggcgccccggactcgacaagctggaccccctgctcccgggggggcgagcgcatgacccccccgccctcgcgctgcctctttcccccgcgcggccgccccgtgttgcacaaacccgcgcgtctcggctgcccctttgtacaccgcgccgcggaagggggctccgagggggcgcagcctcaaaccctgcctttcctttacttttacttttttttttttttcctttggaagagagaagaacagagtgttcgattctgccctatttatgtttctactcgggaacaaacgttggttgtgtgtgtgtgtgttttcttgtgttggttttttaaagaaatgggaagaagaaaaaaaaattctccgcccctttcctcgatctcgctccccccttcggttctttcgaccggtcccccctcccttttttgttctgttttgttttgtttttggcgtaacgagactttactgaaaacagaaaaccgggcgaaccaaggattacaaacaggaatgtggactcgtagcaaaacaaaacaaaacagaacaaaaaagggaggggggaccggtcgaaagaaccgaaggggggagcgagatcgaggaaaggggcggagaatttttttttcttcttcccatttctttaaaaaaccaacacaagaaaacacacacacacacaaccaacgtttgttcccgagtagaaacataaatagggcagaatcgaacactctgttcttctctcttccaaagaaaaaaaaaa

SEQ ID NO: 30 - DNA, 439 bp, Homo sapiens
  misc_feature (1)...(439): n = a,t,c or g
tttcgttttcaaagtnncntnncnacnatttcgtccggagatggccgcaacatccgccgctgctgcagctgcttcttccatcatgggtactcgggtggctcccggtatccatcccggttcaggtcggttcacagccgtgttcggtttcggaaagaagaaggcagctcccaaaaagagtgccaaaaagacggtgactacggaccggcctctttggtacccaggcgccatttctcctgactggcttgatggttccttggttggagattacggttttgatcccttcggtttaggcaaaccggccgagtatcttcaattcgatatcgattcactagaccagaatctggctaagaacttggccggagacgtgatcggaacccgtacggaagctgccgacgccaaatcgacgccgtttcagccgtacagtgaggtgttcggaatc

SEQ ID NO: 31 - DNA, 401 bp, Homo sapiens
tgtttctggaattcccgggtcgcccatttcgtcaaaaaagtttcaatggccgcctccacaatggctctctcctcccctgctttcgccggaaaggctgtgaacctttcccctgcggcatcagaagtccttggaagcggccgtgtgacaatgaggaagactgttgccaagccaaagggtccatcaggcagcccatggtacggatccgaccgagtcaagtacttgggtccattctctggcgagtcacccagctaccttaccggagagttccctggagactacggatgggacacagctggtctatccgctgaccccgagacattcgcaaggaaccgtgagctagaagttatccacagcaggtgggccatgctcggagccctaggctgcgtcttccctgagctttg

SEQ ID NO: 32 - DNA, 1443 bp, Homo sapiens
gtcaacttcatccacctgatcttagaagcactagtggacggcccccgcatgcaggcctcagctcatgtgactcggccctctaagaggcccagcaagatagggtttgacgaggtctttgtcatcagcctggctcgcaggcctgaccgtcgggaacgcatgctcgcctcgctctgggagatggagatctctgggagggtggtggacgctgtggatggctggatgctcaacagcagtgccatcaggaacctcggcgtagacctgctcccgggctaccaggacccttactcgggccgcactctgaccaagggcgaggtgggctgcttcctcagccattactccatctgggaagaggtggttgccaggggcctggcccgggtcctggtgtttgaggatgacgtgcgctttgagagcaacttcagggggcggctggaacggctgatggaggatgtggaagcagagaaactgtcttgggacctgatctacctcggacggaagcaggtgaacccctgagaaggagacggccgtggaggggctgccgggcctggtggtggctgggtactcctactggacgctggcctatgccctgcgtctggcgggtgcccgcaagctgctggcctcacagcctctgcgccgcatgctgcccgtggacgagttcctgcccatcatgttcgaccagcaccccaacgagcagtacaaggcacacttctggccacgggacctggtggccttctccgcccagcccctgctcgctgcccctacccactatgccggggacgccgagtggctcagtgacacggagacatcctctccatgggatgatgacagcggccgcctcatcagctggagcggctcccaaaagaccctgcgcagcccccgcctggacctgactggcagcagcgggcacagcctccaaccccagccccgagatgagctctaggtccaggtgatgactgcaaagcagtgtccaggagcaggccactactgcccagagagcagaggaggaggttgttggcagggactgcagatcctgtcagacctggccaccaccttgggcatggccactctgccctctggacctgtctttcatcgggagaaaccactcagagatggatcccattccctaaaggtctcacagcaaaggagcaggactcccaggcccctgtaccctgcctggcctgattcagggccttgtggcccccagcttctgtttcaagctgggcagaccccaggatcccttccctccctaaggactcagctgaggggcccctctgcccccttctacctccacctcagcaccctcccccagcttgatgtttgggtctccccagcaccctcctccctggccggtgcaaagtacagggaggtaaagcaggacccttgcagacatgttgcccagcacacagtaggccctcaataaaagccatttgcactttaaaaaaaaaa

SEQ ID NO: 33 - DNA, 399 bp, Homo sapiens
acgttccggaattcccgggtcgcccatctcgttcttaaacgttttactttgtgctgcactactcaacctcaatggccgcctcaacaatggctctctcctcccctgccttcgccggtaagccgtcaagctttcccccgcggcatctgaagtccttggaagcggccgtgtgacaatgaggaagactgttgccaagccaaagggcccatcaggcagcccatggtacggatctgaccgtgtcaagtacttgggtccattctctggcgaatcaccgagctaccttaccggagagttccccggagactacggatgggacaccgccggactttcagctgaccccgagacattcgcaaggaaccgtgagctagaagttatccacagcaggtgggctatgctcggagc

SEQ ID NO: 34 - DNA, 1974 bp, Homo sapiens
ttttttttttttcctaacactccacccacacgcaggtttatttccatcttccaggggtggaaagagctgtccccaagacactcaagaggggtgggcacaggccccatgtgagcccagggtaggacgggctggagagggccccacgcagcacctgccctgccagcctgtctgcggcccacccaccctcccattaaagtcacgttgtctcgaagcatgggtttccaggtccttgagcatagcagtggccgcaggccacctgggagcagcaggcggggcccctggtgaggatgccttgtaaccttgcggcttggcttcaccgcagatccactctggaatgacacggttcccaccccgccaccttccccctcaaaacactgatcgggcgacgatccgctgggccggcagctggagcccagccgtggccctgcctgagccagtccagtttgtaaaataaatagcaagcgttgccggcttctgtacctcctccctgtgcctgccggccccgcccagccactcagacacttgtttccggggtgtgaaccacctccccgtttttctcaggctcagccttcaggaaatgctccacctcccgcaagtccacccccgagtctgcaggaggcttgtggagcttctcctcctccgcggccgccacctcaggctgtggctctttgggcttcttcctaatgcagaagaagttgcccagcagcaaaatcagggaggaggtgagcacctcggcccccgccaggatgaacacgtacatgtagacgtgggtcgcatccaggagtttgcctcccgaagggggcccgacgagcacggccaccgcctccatcagcagcaccaggccaatggcactggagaacttgtgggtgcccacgatggccatgagcacctcgaactgcagggcccccaccatgccgtaggagatgccaaagaagatgcagaagaccacgaggccgccgtagtcgcccgccgtagagcccgccaggtccgcgaggccgttgaagaacatggagaagctgaagaggtagacggagtagggccgcaccttcccaagccccgccacgaagcccgcggccggccgcgcgaagatgtcaatgaagcccaggatggtgagcaggaaggcggccttggtgtcgggcacgcccaggtccttggcgtagctcaccacgaacacgggcgggacgaagagccccagcaccatgaccgaggcggccacggcgtaaagcacaaagccgcggtcccggaagacgctcaggtctagcaggcgccgggagggtcgcggcggccccgagcccggctgggccgtgaccaccaggggcctcatgagtgcggcacacacgcagcagttgagcagcaggccgcccaggatgaggaagccgccccgccagccgtagcggtcctgcagcagctgccccagcgggctcagggcacacaggaagacagggctacctgctgccgccagcccgttggccatggggcgccgcttgctgaagtagcggttcagcatgatgagcgagggctggaagttgagtgccaaacccaaccccgtgatgaccccagtggtgaggtagacctggatgatgctccggcaaaaggacgcagccaccatgcccagcgacgcaaagagaccccccacaagcatgacgggccggcagccaaagcggttcacgcacacactgcagagcggacctgtcccgtagagcatggccagcaggatggaggagatccaggctgtgtcgctgtagccgatcccaaactcctgtatgagctccttgaagaagacactgacggccttggggaaggcgtaggagaagccagtgatgacgaaacagccgaagagcacggcccagccccagccgccgtcaggggccttgacgcctgtggggccctcgtccaccacggcccctcccatggccaggagggttggttccgcctcacctgccgccgctgggccgcctcagcccgcctctcgcc

SEQ ID NO: 35 - DNA, 1818 bp, Homo sapiens
ttgcttttgggtttttttttcctgtttccacccctccccgttattttttcctttggatggttaaaagcattgcaggcacccgggaaggtgagcagagggtaggtgggtgggcttgtcccctccccggtcccccgccctgctcacctctactatgaaggtgcccccaggtcacctgtgctgcccgccatctgcccacgtggcttgcagtgactcaggagagcaggcccacagcgtttgccatcttgcagagctggggaggggcacaggaccctgccctcgtgttccctcccagcccgcagtatttcagggacaggctcttcccctctatccctcaccctgagagcacccctggtggcttggttggggaagggaggggctgcctgtctctggaggtgtcaggcaggcaggtggcaggcagctcacccacccaccccatgggatcccccagcccttcacccgcgcctgccttgtccccatgatagttgacaatcggggcttcctgcaaggcccgtctgtctgtccaggactcctggtggccagattcggcctccgaccttgaccttaaactgcagctgaccccaggggctcgccgctgcccctcccctccacaccaaggcctgagacagcaggagccctgcctagcccgaagccgtttccaccgcagcaggcagaggggctggacaggcactgtcagccaatgtggggggtcctgaagacacccccttggggcacccgagtgccccttctcagggctcagtctgaccgtagccacgtcctgcctcgcgccgcccctcgggcctgacctggaagctccgtcagctccgtccttgtccttagagctgagcccagaccccggggtctggccgaatcctcacccccagggcagtgtttttggtctgccaccttcaggaaaacggctgcggcctcggcctcccttcgggcacccaggaatgcgggggtctgctcagtccccccaccctccatgctccaacccccgggggctgcggagcctgctgccccctccccgcgggtggggacgttctatgcaatacagggttccactttagaagtgcgcgcggctagggtcaccgcccgcccttcccggcgcagcccccgagctccacagctggggcagcccctctggcttctaaatccgcggtcgggattcttcctcctgtttagttttttagtttttccttaaaaaaaaacaacacatcgatggactttgcttccctgttcttgaagaatacttgaatgtcggggggcctgggggtgggggcctcggagaccgtctgcctggccctgctgcccctcctgaatctcgtatgatggtcacagtccggtggccgtgggggtgctctgccttccctggtccccactgcccatatctgtggactgccccttccaaagacccctggggggggtggggcattccgcccacccctttcccccatcacttctcgcctgtcagtgattccatgtttcgtaacgggggattctctgcctttttgtatcaaagaacaagcaaatggacccccgcccgctgcaggcgcccatagccatcgggtctctaaagctgagtggctagcagcgtttgtttgtttgtttttttttttttttctgaaggtgggacagtcacttcctcctccctccccacccctgtcgcatccacgtgcgacctggaggactggtcagaaccgttactgtgaatgagtgaagatcctggaggaccctgggccccaggccagctcccatcgctgggggacggtgaacggccatgtgttaatgttacgatgtttttaaaagacaaaaaaaaaa

SEQ ID NO: 36 - DNA, 5412 bp, Homo sapiens
ttttttttttttaataataatagctaccatttattgagcacctactctactgtgtgccaggcactgtgctaggcacttttcgtacaatatctaatttaaatcctcacaacaaccctgtgaggtaggtattattatcatcattttacatacgagggaactgaggctcagagaggttaaataactctatcacacaaccaaaaatagtagagctggaattcaaacccaaaaccacctaactccaaatcccatgctccaatgaattaaagtagagaggggagagggagggccaaattcaagacagagtgttggagtgaaatggatatgatatgctgataagatatgggaagaaggaatgtaagctcataaatgtttctagctggtgagcctatgtagattgtgatgaagtaaccaggagaggaattcaggaggaacatacttggttgggcagatgagttgagtctatacggaactgtccatagagatgtccagtaggtaataccaatacagatctaaagtctgggggaagttgggggttggagctatgtatttgggaatcaccagcatatcagcagcaattgaggacatcaggatgaatgactccattttgggagtaaatagaaaggaaagagaagtgaatcaaagatggaacgatggaagcactgatactgacaggcatgagcaatcgttgagaaattctcaagagagtcggacaagacagagtcagagagagaagtacatgaaacagccctgtagtggtggctagaagccatggactgggttgggaacaattctagagctcccagaaggcaggcaagattgagtcacacttccaacaaagccctctgcacaccaaaaccccaggaagtattgtttttctttgttagtttgcttttgagacagaatctcactctgtcacccaggctggagtgcgatctcaactcactgcaacctccgcttgcttcctggattcaagcgattcttgtgcctcagcctcctgagtagctgagattacaggcaggtgccaaaacacccatctaatttttgtatttttagtagagacagggttttgctatgttggccaggctggtctcgaactcccgacctcaagtgatccacctgtctcagcctcccaaagtgctgggattacagacgtgagccaccgcacccgtccaaggaagtattgttaattgaaataaatgccaaaatgttcctaccttggtttaccccaaaacctggagctaagaacttcatctcacttttgacaccccagcccccaaaatatggaagcccaggagagccaggagaatttatagcagaggcttaaagagaaagttatgatttgtttaaagtagagaataaggtgaaaaataaaacctggtactctgtctggaagtcctggaagtctccttgcccaacctcaactggcctgtgggctcctgtgtccttgctctgggatgccatggtgaatgtgaaaacaggggaggttgtgtgtgggggtgggaatggcctgtcggttgcaaggcgagtcctttgctgagcccagcctgagacccagcttatgggctttatccaggtgagaaaatgctggggacatgtgtgcgaggtttaaggtctaccaggaaggggagaagggtgtcaggggaccagccccacaacctaggagaggattaggagggtccagccctttgggcagggaccagccctgaggcttaaatgaacttgcataggcacctgtgtatgcatctctgtgcatgtatgcatacatgagtgagagagaaagataaagagagctaaagaggcccccctccccccgccgcaggctgccacacgtggtgcgatccgattctctctggaaaggaggagagtctctcatgcatgggtgaagttgggccctccccagaagcctagtgactcattatgttaacgtgtgggtgtgggggctggacatccttgggaagccctgaggggctgctgaagcagggttcctggtctcctcggaggctgggcctcccctcgctgggggctcacagaaagtcaaacagcccgaaattcttggctgctccaggcccagggaaaattgggggaggaaaaaagaaagaaaagaaatgtttcaggcctggaggtgagatgagcctgctggttagtagggttaggggtctgaaggaaccagcacgcagggcaggcatggggcaggggtagagcagagatgctccctggaagccaccagctgctcaggcaactgagggggccctctgggcctctgatctaggcacaggcagggatggcatggatggctattggaggcgactacagctttaggttgcaggactgaggcagcaggcagggggatggttagtaggggcagatgaagcaaatatattttggtttcagtaatgtggggtaaagtcaagaggtttgcacacgtgcctgatggggtggggttaatagagggatgatgtagctgaataaatggtgaaagggagctaaaaggggaaacgagagaatgagggagtgagcgtgccaccaaggtcattgctggggtcaactcccaaaatgggggttgcagaggggagtaaggggtagcaccaacaagtctggtcccagagacaaaaggggtcctgggaagtcctgcgcagggattagtgggcagaggaaacgaactggggccagaggcaggttagggggctgcagagccaatcggtaggtgcaccccaccctcgcagcaccctgcgagcagttagcgcacctggatttagttccttttatttccctttcaggtaccagacaaagtaaaaaagacggacggatggagagaggaacgcagccggctggggtgggagcggaatggagctgggggaggggccctgctcacatcacatccacaaagaactcactggggtttcccatggccatgcggaaggactgtctgctggcggtcagttccgggggcactgaggccaggtcgcggcccggaggggctcctgggggccccatggccgcgggcggcgggggcatcatcagcatgggggggccgtagagagggggcactccgggaggaccgtagctcgggtgtgtgtggtggctgcgaaggctgctggccagggaatggtggctgcggtggctgtgctcgctggccgccggacctgagcgctcgctgggcgcccgctcccgcggcccccgcaggctgctgcgtgtggtgtggtccgattcgctgccgctgcccccggacttggagtccccggccttcgggtccttctccttcctccgatcgctgccgctacggttggagccactgctccgactgccttcgctgtgctgactgctggcgctgcccccgccgtagctgtagcccagctccgggaagcccgggtgcgggttgtatgggtgcgggggtggcgggtactggtacgggaaagccatgggccaaggggcggcccccgggtgcggcaaaggggccagtgtgtcctggtcagaggcgccactggagccatcgtgatcgtggagagacaggttggccatgttgccgcagaggtcaccgaagatgtagtagcactgctcggagaaggtgatcttgttgacggtatggcggatgaagccagctttcagcaggttgctggcatacttgcgggcctccctccggtccgtgaagccttccacattgtggtacagccagtccaccacatctgagccgatgaaagcattagggatggtaatcttgagccacatgcggtcacggacctccaaccctgattcaggggaggccatggcttttacgatggcagccatgtcactgtggatggacaagtggaagtcgtctaggcgctctgtgtcagggatggaactggtgatggaggagctggtggaggtgatggtgctcagggaggggctcatgccgtatgcagggaaggtgccggtcatggctgcagtgtgggagacccaggccgcagggtcaatgggccggatgggctcgctcctgggcaatgtgaagcaaccacgtggacttgggtcccagcacttggctacagtcagggtgatgggccccggtttgtgcacaatctcccgcagtacccggactgcatcgtcattactcatgttctcaaagttgatctcgtttacctgtaacaacatatctcctggctcgatgcgtccatcagcagccacggccccacccttcatgatagagccaatgtagatgccgccgtcaccacgctcgttgctttggcccacaatggagatgcccaagaagttatatttttccatgttgagagtgaccgtgatgatgttgagtgacatggtggagtccgtgatgctgctgaaggacgaggaccgctcaatccgagaaaccttctgcttccgccgccgccgcttgtgtcttctcatcaggcgtgaggcactgctctgttctgtggagctgctgaacctgctggtggagtcatcctcatctgagtcaaagaagctggtggtctccagctcactgctcataagggtggatgagctatcataaccccctggttctcgccgccgttcccccttcgcagttccatttagccgggttgcatgctctgggccatccctccggcgtggccgctctcgctgggcagacaccaaagagtccgtctctgtgtcattgtccaggttctcctggctgcccccaccagcatgagggtggaaggatgggggtcgggagtccccgatgcctcccgtgcgctccataggtggtggcagctccgatgggttatcagcacagaagggggctgggtctgggtgtgagccctcagctgacaccagccagtacacgacccggccattgaagcatggtagcttggcattgtcatccgagatctcctccttcaccactccgaaatcgtcgtccatagacttgaagaagaacttatagctgggtcgctgcaaaacgcccttaaagtccgccaaggtgacgcgctcggcgggcaggggcagcttcacaaggtacggcgtctcctgcccatccaagtggtagatgatcttggtctcgcccatggctctggcctcgggcccggcggcccgcgcgcggcctgctcgggcggccgggccgagcctcccagacggcggcggcgcgcggcgcggcccagcggctcaacccagctcggcggctgctggcggcgccagctcccttgttctccgggggctaccgggtcccagcgccgcccgccgccgccgcggccgcgcttccgctccccactctcccgactggactggcgaccgcgactcttccggtggccgcggcttcactgagagaacacattccccggatctggctggagacctggagactcacgggaaagtggacgtgccccaccctgcaagcccacgcctcttgcacatctcacctgggtacttgccgccgcgactcctcttgatgaaacagacgat

SEQ ID NO: 37 - DNA, 1889 bp, Homo sapiens
actcttcgtcatcacctctcctattcgcctggacaagctcatgtttgcaggagcaccatgtcttgctcgtctcgcgcctcctcctccagggctggaggcagcagctcagccagggtgtctgctggtggaagcagcttcagcagtggaagcagatgtggtctggggggcagctcggcccagggcttccgaggaggagccagcagctgcagcctgagtggggggtctagcgatgcttttgggggcagctttggagggggctttggtagctgctcagtagggggtggttttgggggagcttcaggctctgggacaggatttggtgggggttctagctttggcggggtctctggatttggcaggggttctggattctgtgggagttctagattcagcagtggtgctactggaggcttctacagctatggtggtggtatgggaggtggtgttggcgatggggggcttttctctggaggggaaaagcaaaccatgcagaacctcaatgaccgcttggccaattacctagacaaggtcagagccctggaggaggctaacactgatctggagaacaaaatcaaggagtggtatgacaaatatgggcctgggtctggagacggtggatcgggaagagattatagcaaatactattcaataattgaagatctcagaaaccagatcattgctgccactgttgaaaatgctgggatcattttgcacattgacaatgccagattggctgctgatgacttcagactgaagtatgagaacgagctgtgtctccggcagagcgtggaggctgacatcaatggcctgcggaaagtcctggatgacctgactatgacccgctctgacctggagatgcagattgagagtttcaccgaggagctagcctacctgaggaagaaccacgaggaggaaatgaagaatatgcaaggaagctctggaggggaggtgaccgtagaaatgaatgctgcgccagggaccgacctgaccaaattactgaatgacatgagggcgcagtacgaggagctggctgagcaaaaccgccgagaggctgaggagcggttcaacaagcagagcgcatcactacaagcacaaatctccactgatgctggggcagccacttctgccaagaatgagataacagaactaaaacgtaccctgcaagccctggaaattgagcttcagtcccaactggccatgaaaagctccctggagggaaccctggctgacacagaagctggctacgtggctcagctgtcagaaattcaaacgcagatcagtgccctggaggaggagatctgccagatctggggtgagactaaatgccagaacgcagagtacaagcaattgctggacatcaagacacgcctggaggtggagatcgagacctaccgccgcctgctcgatggagagggaggtggttctagttttgcagaatttggtggtagaaactcaggatctgtaaacatgggatccagggatctggtatctggtgactcaagatctggaagctgttctggtcaaggacgagattcaagcaagactagagtgactaagactatcgtagaggagttggtggatggcaaggttgtctcgtctcaagtcagcagtatttctgaggtgaaagttaaataaggaacttccagatcaacaaaagtgtctttcaaagaaaaaaaaatcaagaaggacacaagcgaagaaatggcatcaatctaggcatctttctggataatttcaggaaaagcttcagtccagaaatggatgactagccaacttttctgcatcttcttatttcctcattagaatgctcttgaaatagctgaattaacaactttgctttaattgtttctatgcttcaataaatttacttttgcaagttaaaaaaaaaa

SEQ ID NO: 38 - DNA, 1144 bp, Homo sapiens
ggagccccacccgctcctactccagtcctctcacgcccactgacttaccctgcgcacgcgcgctgaggctccgtggggccgccgcgggccccgccccgaggtgggagggcctgacgcatccacagctggccaatcggcggatggcctcgcgcgcccgccccctccccctgcccccggcgccgggctccacgtgccagtgtttgtgtacgtgcggccgtggcggggctggacagggtccgggtcgttgaggattaggctgctcgggcgtaaccggagctggggcgcggctgccaagggccggcccggaagtcccagcggtctttaaattctcccgtgctagggccagcctgcgcattcttacctgtcggggtgcggcgagtgtctcacctctctgcacttccaaggactcttgtcatctgccttaggcgggaaatgctgttgctggattgcaaccccgaggtggatggtctgaagcatttgctggagacaggggcctcggtcaacgcacccccggatccctgcaagcagtcgcctgtccacttagccgcaggaagcggccttgcttgctttcttctctggcagctgcaaacgggcgctgacctcaaccagcaggatgttttaggagaagctccactacacaaggcagcaaaagttggaagcctggagtgcctaagcctgcttgtagccagtgatgcccaaattgatttatgtaataagaacgggcaaacagctgaagatctcgcttggtcatgtggatttccagactgtgccaagtttcttacaacaattaaatgtatgcagacaataaaagcaagtgaacaccctgacaggaatgattgtgttgccgtgctcagacagaaacggagtctcggaagtgtagaaaataccagtgggaaaaggaagtgctgatgtcacgtgggttatgaagaagtctgaagaacgccttcatttcatgcaaatctataagctcctgcttttggctttaccatatgttgtgtctaatctccttctgagaaggacgaaaaactttcttccaagtgaagatccatttaagaacacatgtatttacatgcctataatatgctggttgtgtatgctttgtcttttaagttattaaaggaacgtctaaaaaataaaaaaaaaa

SEQ ID NO: 39 - DNA, 2281 bp, Homo sapiens
  misc_feature (1)...(2281): n = a,t,c or g
ttttttttttttggaagaaaaagagttaggttttaatgtttcatgactggtaacagagtagtctcgaggggatccttggagaacctgttctgactttagaagcacttcctgtggacaatggggtatttgagagttaggatccctcgcttgctctgagcctcatcccccacatagctgtctttctggcccattcccaccatcacaccctggtggcgagggcggcccacaatgataggaagagccgacatcgaaggatcaaaaagcgacgtcgctatgaacgcttggccgccacaagccagttatccctgtggtaacttttctgacaccagccctcagtcactgggagaagaacctctcataccctcggtgctccagtccccagctcactcagccacatacaccatgtgtgaagaggagaccaccgcgctcgtgtgtgacaatggctctggcctgtgcaaggcaggcttcgcaggagatgatgccccccgggctgtcttcccctccattgtgggccgccctcgccaccagggtgtgatggtgggaatgggccagaaagacagctatgtgggggatgaggctcagagcaagcgagggatcctaactctcaaataccccattgaacacggcatcatcaccaactgggatgacatggagaagatctggcaccactccttctacaatgagctgcgtgtagcacctgaagagcaccccaccctgctcacagaggctcccctaaatcccaaggccaacagggagaagatgacccagatcatgtttgaaaccttcaatgtccctgccatgtacgtcgccattcaagctgtgctctccctctatggcctctggccgcacgaccaggcatcgtcctgggattcaggtgatgggcgtcaccccacaatgtcccccatctatgaagggctatggcccctgcccccatgccatcatgcgctggacttgggtggcgtgactcacacggactacctcatgaagatcctcacagagagagggattacctttggtagcccctcgataagaatttggcgaccaccaggagacggctatggccggtctacagaaacaagtgcccgaccctaccccgagaaaactcccatgagagttaatcgtagagcgagccaacactcacattgaggtagcgaccatccacaatcattatatagttagaggcatctggatactgtatcatacaaacaaagccaacccatcacggaaaggaggcgaatgcggccgcgacactcacagtccaccgaccacacaagcaagcaacgtgcgcagctatcgacgacgccgcgcgcgcatcagcagacgacacgctgtacggagcacatgtaaccaagcgacgacgagacgtaccgcgcaaggcacgatgccgacgaagagggccagatgcctcgagcacacggcacgctgagcgagagggctggcacacacacactcagcgcgcgcgaaccggagcgagagcaggatccgccaccgcagaagaacgcaagatggcaggaccgcagaactgagcacactggcaggagacacagacaccgcgaacggatgaagcaggcatcacaacagcccgcacacgctgaccgcgacgagcgcgcgacactcgccgccgcacctgtgcagagcacatcggcgtcgcggcgcatagcggtcgtcgacgagacgcgagaggcgtcgcagcacgaacccgcgtcgagcacgagatacgctacagcacgtgtctctcgtacctccacgccgctcggtacaagcgtgatgcacgccagtgtcagcggcaagtcaacgacgcacatacgcacagacgaaggatagcgccgcacgggtacggcgcgtgagacgagtcgagagaacgcgatcacgctgcagagtctcagcgatctcagtcagcagacggtagtagatctagtaagcgctgaagatgagagggaganaaccggagtcaggacgagtcgagtctgagcgtacgtcgtgcgcagtagctgcacagcgagtaatagcggatgagagacagtcagacgcgaacagccgtacgcattcagacgctcgtcgaggatatgcgcatgcgagngagctcgcagagcacgcgatgcgagcgctgcattgcagacgcgctgatagaggatgagaggcgcgtcagatggtgctcgtgaatcgacgctgcgagcggggctcggtggcagctgctagtgagatccgcgtctgctgccgagacttgctcgcgcacgacgtgagcgggctgtgtgacctgatgctgcggacgtgcgtcggc

SEQ ID NO: 40 - DNA, 4564 bp, Homo sapiens
gggtggaaggcgcgccgcggtggtggtgggcgcggggtttctctgtggggcaccggcgttgtggccgacgtgggtgcgcgtgacgcgagaggggggcgcggcgggcgccgcagagcggaggtggtttttgaagaggttttcgtggggggcggaggcgctggcggaagaagggtgttgcgtgtgttgggggggggtggtgttgtgtcactttggtccgaagtatttattgatgttaaatccacattacaccagcacaacaatccaaagtagtatgattgattgatagtactttttttttataaatacaatataaaggtggcaaaataatgctagttaatcccaaacccagcaaatcagcaaaaaaaggtcacattcagaaaaatttgccaagtaagacataagtcataattctacaatagagataggtccatgagagactgtgtatggtatcttaaattccatattagcaatgcatataagtgcggtcaaagaaacttgaaccacactgcatagaacatctgccacccggtgctcaagcctattaatcacttaaaccttggttggttggtgttcttacaaagaagtagaaagctgtacatgtgaaacagtaatatgaaatatatggggtggtacacagatataaaattattttaaaaaatactacgtatgaattgagtaactgagctaagagaggccacttataaataatgaaagatacatgtgttttgcataaggaatacagtgttttcttttcatagcaaagtaccattaaagcctcatgttttatactactaggtcaaattattttttctcctttttaaaatttatcggttccgacttaaaaccatcaagtctggtcagaatcaactcagtctagctgatgcaaaatcatatgcattcaaaaagcagtctttaccgagatgcctttacaaaccttggaatccagcaccttcttaaggcaaagtttcatggcagcagggaagtgaactaataattttcatttaccacatcttggtgtctttgaaaaaatactttatggcacaaacctgtttttgtctctccttatgtctccacttccttcaagtagactagatgctacaggcaatttctcatttatgccaccatgcagtctcaatccattttcaacttgctctacatacctaaaatcttccactactacacaaacctcagacacactgcaatctccacagcatgtgtgctccacagcatgtgtgctccacacttccagctggccctgggttccttgacttgtgaatggcagtgtttttttcacctatgtttgaagaaaaccaaagaaaagcctggcctttgctacctctcctgtgccttctacttttatctaattgaacacactataatcatgctggttgcattttccttcattctcctccctactccttccaaacccctgattcctccaaatactatatatgccttggtcatttgggtggtttggatgctttctgtggaatgaactgtaatatatttctgctttattcagagcactttatattatttatatttaaattagccttttaatatggtttgtaaataagtttcctaccaaggtagcatgaaaacactacacataaagaaaaaaaatgttaagaactaaggtattaaccttgttagaaaactcttttgatattaacatttaaggcaagtagttccttccttatgatttaatataaaaacatttgcaaagacaaggcatttacttggatttctttgtcatctcttcttctttcatccttacatattgcacttggttcactgtatctgtctgaatacactgtgcttcagaatcattgtagtactgtttgtggtacaactccctcattaaacatttcacactatcaggctacacagcacctatatcttgtgtttaaaggcacttgtagataatacaaattgtagttacctgtgaacaattgatttcctttagtattttggcattttgatcactttaatcacagcaattccaaagttttaaattggacagtaaatgtgtattttctgtgcaatgtgtatatttgtattagcattatctacttaaactaagtttggtatatcaagtaagaaaaatattattttggtgtttttttttaatttcttatagtcaaaggtatgtttctgccttttacataatgtgacaaaggaatatgttggtcaaggcaatggctgtttcagtgtttcagctttaacaagaatgctggattacaggtcctcactttctaccaaggcagtattcagtgtcaggtgagatgggttggcctcaggttggaacgctgctttgatgtctagtccctggtccgaaagtgctgcatagcgactggctgagggccgtactttttttggcttggtgctctgtgactgctgatgccactgggtgtaaacgtccagcctggcagtacaggacacaatccctgcttcattcttggctgacacagtataccacccagcatcttcttttgtggctccctgaatgagcaggcagatgtagccgtggttgtcctggtgcatgctcactcggtcagtgctgtgagtgagtgattcattttctttcttccaaaatatctgaggtggtggcactcccaatacacgacattccagccgcactgggtacccatcagcaactcctgtgttttggagcttctcaataaacacagggggtttgtgtgcttctttagcagcaaccacaagctccaggctgaatgagttctgtcctgctcggttggtagctatacatgtgtagatgccggcatcacgtgacgtgactggctctatgatcagagagtgcaccccgttctcacgcaccagcatcttgtgagcactgtcagggcgtacgggctttccatctagttgccagcttagatctggggttggtaacccactgactttgcagtccattctgcagagttttccttcttgaacagtcagatctccaggagcctgcaagaagtgaggtctgaagaatcgctcctgaattggttcattttcgtctccactgtcccttgatctagaacgaggccttctgacatgaggatggcctgagggagaccggggacttcgacctctttggttgacagcctgtaccattagccgtccagtacaactgatgcggccctgagggtttgcagccataattgtataattcccatcatcatctagggtggaggctgtggtatggagggagcaggtcccatcgagatctctttgaatggtgtagtgatcactctttggagagatctgcttcccatctttaaaccaatagatctttggctttggatttccagccactctacatgtgaaagttactggcattccctcaaagatcttgtaatgtttcagcttcatctcaaaaaatggtgccattccagttttccacgaggcagcgtctgccgtacgtgaacgttcatcaccatgattcatccataggagacctttctagcctgtactctatttcactgatgagtctctgttcacagctggagactttgtattcctgattagctgtttcctcttctggctcctgaatattaaagacagttgcactgtcagcacctagcagtcgacgagccattctttcttcgtatgttaacctcggctggccattgttcaggaggtcctccttgaagcgaagttttcgttccaggtcttgaataacagcatcctttgtgccttgaatttcctcatcggaggctattctagcagttctactggccttctttggaaatcctgcgggggtgacacccttgggcagccccagggcgttgacggccgccggcggcggctgcgagggcagcagagcgctgaggaaggccgcgggcgtctggccgtggccgaagcgggtggcaggcgacgagcagtgggacgcctgtcccgggctcgggagcggcggtggtggcggcggcagtgggaacacgtcgggcaccgggaaggcagccgtggggctgaagaccgggggtggcgggggcgggggcgacggcgaggaggagccccacggggcctcgggctcagcgccgaagggctgcgcgaagggcggcacgggggcgcggccgaactgcctcggcgtcggggacatgggcgacgggaggctggacgagctggggctggaggccggcgtgccgtggcccgacgcgggcccgaggttctgcgcggcgatgaactgcttggggcgcgcgtagttgaaggagccggaggactgcatggcgggggcggagcgggaggccagcgcgctcatgggctccggggacgcgggcggcgtgcaggccgcgagctcggggaaggcgggcggcggcgggaaggggggcgagggcggcgcgctgcgcggggctggcggaggctgccgagcgccggcctcctgctccagtcggatttggttctggagttgctggagcttcagagggtccctcggctctccgggccgcctcccgctgctgcccgattccgcgtccggagcgagcgggagctgcagcgggctccgcggaccgggcgcggggcaggtatcgggctttatacctcgcccgccgggtgactcagg

SEQ ID NO: 41 - DNA, 513 bp, Homo sapiens
atattttttttttttttttttttttttccggcgttcaagatgtcgaagcgaggacgtggtgggtcctctggtgcgaaattccggatttccttgggtcttccggtaggagctgtaatcaattgtgctgacaacacaggagccaaaaacctgtatatcatctccgtgaaggggatcaagggacggctgaacagacttcccgctgctggtgtgggtgacatggtgatggccacagtcaagaaaggcaaaccagagctcagaaaaaaggtacatccagcagtggtcattcgacaacgaaagtcataccgtagaaaagatggcgtgtttctttattttgaagataatgcaggagtcatagtgaacaataaaggcgagatgaaaggttctgccattacaggaccagtagcaaaggagtgtgcagacttgtggccccggattgcatccaatgctggcagcattgcatgattctccagtatatttgtaaaaaataaaaaaaaactaaacccaaaaaaaaaa

SEQ ID NO: 42 - DNA, 2792 bp, Homo sapiens
agcactctccagcctctcaccgcaaaattacacaccccagtacaccagcagaggaaacttataacctcgggaggcgggtccttcccctcagtgcggtcacatacttccagaagagcggaccagggctgctgccagcacctgccactcagagcgcctctgtcgctgggacccttcagaactctctttgctcacaagttaccaaaaaaaaaagagccaacatgttggtattgctggctggtatctttgtggtccacatcgctactgttattatgctatttgttagcaccattgccaatgtctggttggtttccaatacggtagatgcatcagtaggtctttggaaaaactgtaccaacattagctgcagtgacagcctgtcatatgccagtgaagatgccctcaagacagtgcaggccttcatgattctctctatcatcttctgtgtcattgccctcctggtcttcgtgttccagctcttcaccatggagaagggaaaccggttcttcctctcaggggccaccacactggtgtgctggctgtgcattcttgtgggggtgtccatctacactagtcattatgcgaatcgtgatggaacgcagtatcaccacggctattcctacatcctgggctggatctgcttctgcttcagcttcatcatcggcgttctctatctggtcctgagaaagaaataaggccggacgagttcatggggatctggggggtggggaggaggaagccgttgaatctgggagggaagtggaggttgctgtacaggaaaaaccgagataggggaggggggagggggaagcaaaggggggaggtcaaatcccaaaccattactgaggggattctctactgccaagcccctgccctggggagaaagtagttggctagtactttgatgctcccttgatggggtccagagagcctccctgcagccaccagacttggcctccagctgttcttagtgacacacactgtctggggccccatcagctgccacaacaccagccccacttctgggtcatgcactgaggtccacagacctactgcactgagttaaaatagcggtacaagttctggcaagagcagatactgtctttgtgctgaatacgctaagcctggaagccatcctgcccttctgacccaaagcaaaacatcacattccagtctgaagtgcctactggggggctttggcctgtgagccattgtccctctttggaacagatatttagctctgtggaattcagtgacaaaatgggaggaggaaagagagtttgtaaggtcatgctggtgggttagctaaaccaagaaggagaccttttcacaatggaaaacctgggggatggtcagagcccagtcgagacctcacacacggctgtccctcatggagacctcatgccatggtctttgctaggcctcttgctgaaagccaaggcagctcttctggagtttctctaaagtcactagtgaacaattcggtggtaaaagtaccacacaaactatgggatccaaggggcagtcttgcaacagtgccatgttagggttatgtttttaggattcccctcaatgcagtcagtgtttcttttaagtatacaacaggagagagatggacatggctcattgtagcacaatcctattactcttcctctaacatttttgaggaagttttgtctaattatcaatattgaggatcagggctcctaggctcagtggtagctctggcttagacaccacctggagtgatcacctcttggggaccctgcctatcccacttcacaggtgaggcatggcaattctggaagctgattaaaacacacataaaccaaaaccaaacaacaggcccttgggtgaaaggtgctatataattgtgaagtattaagcctaccgtatttcagccatgataagaacagagtgcctgcattcccaggaaaatacgaaaatcccatgagataaataaaaatataggtgatgggcagatcttttctttaaaataaaaaagcaaaaactcttgtggtacctagtcagatggtagacgagctgtctgctgccgcaggagcacctctatacaggacttagaagtagtatgttattcctggttaagcaggcattgctttgccctggagcagctattttaagccatctcagattctgtctaaaggggttttttgggaagacgttttctttatcgccctgagaagatctaccccagggagaatctgagacatcttgcctacttttctttattagctttctcctcattcatttcttttatacctttcctttttggggagttgttatgccatgatttttggtatttatgtaaaaggattattactaattctatttctctatgtttattctagttaaggaaatgttgagggcaagccaccaaattacctaggctgaggttagagagattggccagcaaaaactgtgggaagatgaactttgtcattatgatttcattatcacatgattatagaaggctgtcttagtgcaaaaaacatacttacatttcagacatatccaaagggaatactcacattttgttaagaagttgaactatgactggagtaaaccatgtattcccttatcttttactttttttctgtgacatttatgtctcatgtaatttgcattactctggtggattgttctagtactgtattgggcttcttcgttaatagattatttcatatactataattgtaaatattttgatacaaatgtttataactctagggatataaaaacagattctgatcccttaaaaaaaaaaccccccctcc

SEQ ID NO: 43 - DNA, 2767 bp, Homo sapiens
ctggagtgcagctcatactccatgcccagaattcctgcctcgccactgtcctgctgccctccagacatgctggggccctgcatgctgctgctgctgctgctgctgggcctgaggctacagctctccctgggcatcatcccagttgaggaggagaacccggacttctggaaccgcgaggcagccgaggccctgggtgccgccaagaagctgcagcctgcacagacagccgccaagaacctcatcatcttcctgggcgatgggatgggggtgtctacggtgacagctgccaggatcctaaaagggcagaagaaggacaaactggggcctgagatacccctggccatggaccgcttcccatatgtggctctgtccaagacatacaatgtagacaaacatgtgccagacagtggagccacagccacggcctacctgtgcggggtcaagggcaacttccagaccattggcttgagtgcagccgcccgctttaaccagtgcaacacgacacgcggcaacgaggtcatctccgtgatgaatcgggccaagaaagcagggaagtcagtgggagtggtaaccaccacacgagtgcagcacgcctcgccagccggcacctacgcccacacggtgaaccgcaactggtactcggacgccgacgtgcctgcctcggcccgccaggaggggtgccaggacatcgctacgcagctcatctccaacatggacattgacgtgatcctaggtggaggccgaaagtacatgtttcgcatgggaaccccagaccctgagtacccagatgactacagccaaggtgggaccaggctggacgggaagaatctggtgcaggaatggctggcgaagcgccagggtgcccggtacgtgtggaaccgcactgagctcatgcaggcttccctggacccgtctgtgacccatctcatgggtctctttgagcctggagacatgaaatacgagatccaccgagactccacactggacccctccctgatggagatgacagaggctgccctgcgcctgctgagcaggaacccccgcggcttcttcctcttcgtggagggtggtcgcatcgaccatggtcatcatgaaagcagggcttaccgggcactgactgagacgatcatgttcgacgacgccattgagagggcgggccagctcaccagcgaggaggacacgctgagcctcgtcactgccgaccactcccacgtcttctccttcggaggctaccccctgcgagggagctccatcttcgggctggcccctggcaaggcccgggacaggaaggcctacacggtcctcctatacggaaacggtccaggctatgtgctcaaggacggcgcccggccggatgttaccgagagcgagagcgggagccccgagtatcggcagcagtcagcagtgcccctggacgaagagacccacgcaggcgaggacgtggcggtgttcgcgcgcggcccgcaggcgcacctggttcacggcgtgcaggagcagaccttcatagcgcacgtcatggccttcgccgcctgcctggagccctacaccgcctgcgacctggcgccccccgccggcaccaccgacgccgcgcacccggggcggtccgtggtccccgcgttgcttcctctgctggccgggaccctgctgctgctggagacggccactgctccctgagtgtcccgtccctggggctcctgcttccccatcccggagttctcctgctccccacctcctgtcgtcctgcctggcctccagcccgagtcgtcatccccggagtccctatacagaggtcctgccatggaaccttcccctccccgtgcgctctggggactgagcccatgacaccaaacctgccccttggctgctctcggactccctaccccaaccccagggactgcaggttgtgccctgtggctgcctgcaccccaggaaaggagggggctcaggccatccagccaccacctacagcccagtgggtaccaggcaggctcccttcctggggaaaagaagcacccagaccccgcgccccgctgatctttgcttcagtccttgaatcacctgtgggacttgaggactcgggatcttcaggacgcctggagaagggtggtttcctgccaccctgctggccaaggaggctcctggggtggggatcaccagggggattttgacacagccttcggctgccccccactaagctaattccacacccctgtacccccccagggggccctctgcctcatggcaaaggcttgccccaaatctcaacttctcagacgttccatacccccacatgccaatttcagcacccaactgagatccgaggagctcctgggaagccctgggtgcaggacactggtcgagagccaaaggtccctccccagacatctggacactgggcatagatttctcaagaaggaagactcccctgcctccccagggcctctgctctcctgggagacaaagcaataataaaaggaagtgtttgtaatcccagcactttgggaggccgaggtgggcggatcacgaggtcaggagatggagaccatcctggctaacacggtgaaaccccttatctatgcgcctgtagtcccagctacccaggaggctgaagcaggataatcgcttgaacccgggcggcggagattgcagtgagccgaggtcatgccactgcactgcagcctgggcgacagagcgagattctgcctcaaaaataaacaaataaattttaaaaataaataaataataaaaggaagtgttaaaaaaaaaa

SEQ ID NO: 44 - DNA, 2300 bp, Homo sapiens
cacgcgtcgggtggtgagcagggacggtgcaccggacggcgggatcgagcaaatgggtctggccatggagcacggagggtcctacgctcgggcggggggcagctctcggggctgctggtattacctgcgctacttcttcctcttcgtctccctcatccaattcctcatcatcctggggctcgtgctcttcatggtctatggcaacgtgcacgtgagcacagagtccaacctgcaggccaccgagcgccgagccgagggcctatacagtcagctcctagggctcacggcctcccagtccaacttgaccaaggagctcaacttcaccacccgcgccaaggatgccatcatgcagatgtggctgaatgctcgccgcgacctggaccgcatcaatgccagcttccgccagtgccagggtgaccgggtcatctacacgaacaatcataggtacatggctgccatcatcttgagtgagaagcaatgcagagatcaattcaaggacatgaacaagagctgcgatgccttgctcttcatgctgaatcagaaggtgaagacgctggaggtggagatagccaaggagaagaccatttgcactaaggataaggaaagcgtgctgctgaacaaacgcgtggcggaggaacagctggttgaatgcgtgaaaacccgggagctgcagcaccaagagcgccagctggccaaggagcaactgcaaaaggtgcaagccctctgcctgcccctggacaaggacaagtttgagatggaccttcgtaacctgtggagggactccattatcccacgcagcctggacaacctgggttacaacctctaccatcccctgggctcggaattggcctccatccgcagagcctgcgaccacatgcccagcctcatgagctccaaggtggaggagctggcccggagcctccgggcggatatcgaacgcgtggcccgcgagaactcagacctccaacgccagaagctggaagcccagcagggcctgcgggccagtcaggaggcgaaacagaaggtggagaaggaggctcaggcccgggaggccaagctccaagctgaatgctcccggcagacccagctagcgctggaggagaaggcggtgctgcggaaggaacgagacaacctggccaaggagctggaagagaagaagagggaggcggagcagctcaggatggagctggccatcagaaactcagccctggacacctgcatcaagaccaagtcgcagccgatgatgccagtgtcaaggcccatgggccctgtccccaacccccagcccatcgacccagctagcctggaggagttcaagaggaagatcctggagtcccagaggccccctgcaggcatccctgtagccccatccagtggctgaggaggctccaggcctgaggaccaagggatggcccgactcggcggtttgcggaggatgcagggatatgctcacagcgtcccgacacaaccccctcccgccgcccccaaccacccagggccaccatcagacaactccctgcatgcaaacccctagtaccctctcacacccgcacccgcgcctcacgatccctcacccagagcacacggccgcggagatgacgtcacgcaagcaacggcgctgacgtcacatatcaccgtggtgatggcgtcacgtggccatgtagacgtcacgaagagatatagcgatggcgtcgtgcagatgcagcacgtcgcacacagacatggggaacttggcatgacgtcacaccgagatgcagcaacgacgtcacgggccatgtcgacgtcacacatattaatgtcacacagacgcggcgatggcatcacacagacggtgatgatgtcacacacagacacagtgacaacacacaccatgacaacgacacctatagatatggcaccaacatcacatgcacgcatgccctttcacacacactttctacccaattctcacctagtgtcacgttcccccgaccctggcacacgggccaaggtacccacaggatcccatcccctcccgcacagccctgggccccagcacctcccctcctccagcttcctggcctcccagccacttcctcacccccagtgcctggacccggaggtgagaacaggaagccattcacctccgctccttgagcgtgagtgtttccaggaccccctcggggccctgagccgggggtgagggtcacctgttgtcgggaggggagccactccttctcccccaactcccagccctgcctgtggcccgttgaaatgttggtggcacttaataaatattagtaaatccttcaaaaaaaaaa

SEQ ID NO: 45 - DNA, 4224 bp, Homo sapiens
cagcggcagtggagttcgctgcgcgctgttgggggccacctgtcttttcgcttgtgtccctctttctagtgtcgcgctcgagtcccgacgggccgctccaagcctcgacatgtcgtacaactacgtggtaacggcccagaagcccaccgccgtgaacggctgcgtgaccggacactttacttcggccgaagacttaaacctgttgattgccaaaaacacgagattagagatctatgtggtcaccgccgaggggcttcggcccgtcaaagaggtgggcatgtatgggaagattgcggtcatggagcttttcaggcccaagggggagagcaaggacctgctgtttatcttgacagcgaagtacaatgcctgcatcctggagtataaacagagtggcgagagcattgacatcattacgcgagcccatggcaatgtccaggaccgcattggccgcccctcagagaccggcattattggcatcattgaccctgagtgccggatgattggcctgcgtctctatgatggccttttcaaggttattccactagatcgcgataataaagaactcaaggccttcaacatccgcctggaggagctgcatgtcattgatgtcaagttcctatatggttgccaagcacctactatttgctttgtctaccaggaccctcaggggcggcacgtaaaaacctatgaggtgtctctccgagaaaaggaattcaataagggcccttggaaacaggaaaatgtcgaagctgaagcttccatggtgatcgcagtcccagagccctttgggggggccatcatcattggacaggagtcaatcacctatcacaatggtgacaaatacctggctattgcccctcctatcatcaagcaaagcacgattgtgtgccacaatcgagtggaccctaatggctcaagatacctgctgggagacatggaaggccggctcttcatgctgcttttggagaaggaggaacagatggatggcaccgtcactctcaaggatctccgtgtagaactccttggagagacctctattgctgagtgcttgacataccttgataatggtgttgtgtttgtcgggtctcgcctgggtgactcccagcttgtgaagctcaacgttgacagtaatgaacaaggctcctatgtagtggccatggaaacctttaccaacttaggacccattgtcgatatgtgcgtggtggacctggagaggcaggggcaggggcagctggtcacttgctctggggctttcaaggaaggttctttgcggatcatccggaatggaattggaatccacgagcatgccagcattgacttaccaggcatcaaaggattatggccactgcggtctgaccctaatcgtgagactgatgacactttggtgctctcttttgtgggccagacaagagttctcatgttaaatggagaggaggtagaagaaaccgaactgatgggtttcgtggatgatcagcagactttcttctgtggcaacgtggctcatcagcagcttatccagatcacttcagcatcggtgaggttggtctctcaagaacccaaagctctggtcagtgaatggaaggagcctcaggccaagaacatcagtgtggcctcctgcaatagcagccaggtggtggtggctgtaggcagggccctctactatctgcagatccatcctcaggagctccggcagatcagccacacagagatggaacatgaagtggcttgcttggacatcaccccattaggagacagcaatggactgtcccctctttgtgccattggcctctggacggacatctcggctcgtatcttgaagttgccctcttttgaactactgcacaaggagatgctgggtggagagatcattcctcgctccatcctgatgaccacctttgagagtagccattacctcctttgtgccttgggagatggagcgcttttctactttgggctcaacattgagacaggtctgttgagcgaccgtaagaaggtgactttgggcacccagcccaccgtattgaggacttttcgttctctttctaccaccaacgtctttgcttgttctgaccgccccactgtcatctatagcagcaaccacaaattggtcttctcaaatgtcaacctcaaggaagtgaactacatgtgtcccctcaattcagatggctatcctgacagcctggcgctggccaacaatagcaccctcaccattggcaccatcgatgagatccagaagctgcacattcgcacagttcccctctatgagtctccaaggaagatctgctaccaggaagtgtcccagtgtttcggggtcctctccagccgcattgaagtccaagacacgagtgggggcacgacagccttgaggcccagcgctagcacccaggctctgtccagcagtgtaagctccagcaagctgttctccagcagcactgctcctcatgagacctcctttggagaagaggtggaggtgcacaacctacttatcattgaccaacacacctttgaagtgcttcatgcccaccagtttctgcagaatgaatatgccctcagtctggtttcctgcaagctgggcaaagaccccaacacttacttcattgtgggcacagcaatggtgtatcctgaagaggcagagcccaagcagggtcgcattgtggtctttcagtattcggatggaaaactacagactgtggctgaaaaggaagtgaaaggggccgtgtactctatggtggaatttaacgggaagctgttagccagcatcaatagcacggtgcggctctatgagtggacaacagagaaggagctgcgcactgagtgcaaccactacaacaacatcatggccctctacctgaagaccaagggcgacttcatcctggtgggcgaccttatgcgctcagtgctgctgcttgcctacaagcccatggaaggaaactttgaagagattgctcgagactttaatcccaactggatgagtgctgtggaaatcttggatgatgacaattttctgggggctgaaaatgcctttaacttgtttgtgtgtcaaaaggatagcgctgccaccactgacgaggagcggcagcacctccaggaggttggtcttttccacctgggcgagtttgtcaatgtcttttgccacggctctctggtaatgcagaatctgggtgagacttccacccccacacaaggctcggtgctcttcggcacggtcaacggcatgatagggctggtgacctcactgtcagagagctggtacaacctcctgctggacatgcagaatcgactcaataaagtcatcaaaagtgtggggaagatcgagcactccttctggagatcctttcacaccgagcggaagacagaaccagccacaggtttcatcgacggtgacttgattgagagtttcctggatattagccgccccaagatgcaggaggtggtggcaaacctacagtatgacgatggcagcggtatgaagcgagaggccactgcagacgacctcatcaaggttgtggaggagctaactcggatccattagccaagggcagggggcccctttgctgaccctccccaaaggctttgccctgctgccctccccctcctctccaccatcgtcttcttggccatgggaggcctttccctaagccagctgcccccagagccacagttcccctatgtggaagtggggcgggcttcatagagacttgggaatgagctgaaggtgaaacattttctccctggatttttaccagtctcacatgattccagccatcaccttagaccaccaagccttgattggtgttgccagttgtcctccttccggggaaggattttgcagttctttggctgaaaggaagctgtgcgtgtgtgtgtgtgtatgtgtgtgtgtgtatgtgtatctcacactcatgcattgtcctctttttatttagattggcagtgtagggagttgtgggtagtggggaagagggttaggagggtttcattgtctgtgaagtgagaccttccttttacttttcttctattgcctctgagagcatcaggcctagaggcctgactgccaagccatgggtagcctgggtgtaaaacctggagatggtggatgatccccacgccacagcccttttgtctctgcaaactgccttcttcggaaagaagaaggtgggaggatgtgaattgttagtttctgagttttaccaaataaagtagaatataagaagaaaaaaaaaa

SEQ ID NO: 46 - DNA, 6188 bp, Homo sapiens
ttttttttttttgctttgctgatatatttatttacatatttccccatttcagatgatggtgacaaaaagtagatggagaccccaccctatccaccccccaacaaattacagacacagatttcacttagcatatagaagcattggggcatgtccaaattcattccactgggttactacagccaggagagatttgatcttgggggcagtctgagcacctcaggcccagaaattgagctaaagagaggtcgccattctgggccttgccactggtgtgccagcagaggtgacagaagagaatcatggtgaactgagctgtctagccctatcatgtggtctagaaggtgacagtgggctcttggatagcttccagtgagatccacagtcccacagaaatctgtgactcagggttttcatctgcaaaatggggataagaatcctgccctaaagatgtcacaaggctatcatgaagctccaatcagacacaacttgtcaaaagtgctttgccaaagttccagtgccatacaaatttaagggaatttgattgattgattgtgatggttagagtgccccgggtataacagtggactggtttatgggtccaggggtcaagcaagtgatagaactccgacagtgtgccctgggtgggcaccaatcaatggcgagtaatgcctgttgcaaagccgagtttccttagtttcttggccccaggaagtcaccaaggcctagtgcctgggtcagggctaggggaagtcactgggaaagttacagaaagagtcacaggggtcaaagagaaggaagagggtggcatataaagcagggagtagttactataatcacacacaaaaatagatacccattggatgaagggcattgaattggtagtgcagacgaaagatggagccagcaaggagagggagatgtcacagcagcagagagagaggaatgctgtcccaaataggctctcttgctgcccccccctcttcctaaagggataatgccagtgtctatctatctgcagagaaaggggtagcagggagagagaactgagaacataataatctgaccaaaggagagggatctcttcctcctgttatactgctgcccagcatcttaatgaggtgccaggtataggcaagcaactagtcggtgcactttgaggctgaggccagaactgggccgaaagcactgcaaaggcaatagtgggcttctggaaaaatgcagtaattgtctggtggtcagcattgttggaagatagctaatccgcctgtacttaggcatggttttagggagctgatcactaagtggctgtggttttgaacactgagcatcacggatgctccttgaagaagagggaggtggcccatttattaataatttgaaatggtctgctgagaaaactcagtgaatgggccaggtaggggagaggggcagcaaagacaaaccctctgcaagcttctgtttggggaatggggcaggaaaaactctagtcgctcctgctgctgctgctgctttcccccaactcccttggcaaggggcttggacctcctggggaactggagaggttgccccacagggtaccagctggtacctacaagttaaggcaaacaagccagtagagcacattgaagaagaagaaagtcactgggaaaacaactctcgagtagttatccaggcggtagacatggatgcagaggcggccctgctgccaggtactgccctcacaatcggggaccatgcagaagtacttcttaaaacgcttgcaccactcacagcaggccagcttggagcagaggctgcggggaccctcagggctacctgggctagggggctgctgggctgagcaagacgggcgctcctctccatcacttccctcagtggtgacaatctggcacacaaaagcttcctgatgttggcgggcacaggctcgggaacgtgcacgggtacgggcatgggcacggctattgatacgaggatggcggagtttaggagaagcatgggcttttgtctggttgtagatcaggaagttgagcacagcaaactccaacagagcgcagaagcagaagacgaagcagatggcgatatagaaatccaaggctgtgatataggagacacgcgggaaattcttacgagaaaaggtgcccaacgtggtcatggtcagaacagaggtgatccctagagaggtccgggctggagcagactctgtcttgatccaaaaggaaacccaggagagcatcgtggtcacggaagaagggacatagttttgaaaggcaacatagccaaaccgcctgctcacattgaagaaaatcgtcatgaccatgaagtcacctgaaagacacaaaaaacatcactgcattacagtgctgacacgacggtcccccttagcaggacgtgaacagtaagggtctcatttttcagctcacagtattccctaggatagaggcatgatgtgacaatgcaatacatacaaataggaccagaagaagcccagaaaaaagacttactgcaagaccaatggccagttgagagctaagccaaggccagaatcttaatagcttccttctcagttcactgtcctacacccaatgtctgtctctgcaggttggcaagagagtcaggtgaaagtgaaaaaatcaattagccttctagatatcatgcccacgcagctgatatccagatggctgactaagggcttcataccctctgaggcacatcacacctgcactgctggccctcagaatgtctactctcagcaaatgagactagggaagtctgtgctgtggtggagaagcacagaatgcttttggcctcctttctgcacattcatgtgatggcaaaatgccttcgtgagtgagcactgctccacaggtggtcaaaaccggcactagcctgctccccaaagttttggtggctccctgtttcacatgagctatacagactatctgcactctggaatctgatgctaaaggcccaccatgacccggctcccactgacattttccacacgcaccttacccaaagccaatcccatctgctcacagatttcctgagatggcctgcaattttacaccaagattctaaccctggactctttggtcttagtctatgacccctaacccaaactgagtgtttcagggaaagagaagaaaaagcttaaaatgaacatttcagtcagccctccagaagtcaggtctgtggcatacacatccacagggcagactgaggtcctcacagtcacttggacattgtgtccttggtcatggctctcagctagacggtcatggctcctccgggacctgatgacaacctatatctctagttggcatcttcttttgtagcattcatgctgctttatgctctgacacaccctccccaagcactctgctgctatcatgactcccaggctggtgtgggcttttctctgagcccaggacatcattttccactttcagcatcacattgcagttgcaatactgtaaaattcctaggcctataattaggtcgtcttttaagtcccttcaaggcagggctcatgcaggccctgtggcttagcccctgcccatccaagctcagaacagcctggaacccagcagacactcagcaactcttgctcctgtcaggcaacagctttgtaaagcagaccagaacactaacctgtccgtgtgtcctcctattttggaaagtggatcaactgcccagcaggtctgggtgggctggagctgaatgagaagagcagcctttcgtactcaccttggcagcactgaaactcaaggagcaaagcttctcagattcttctggaagaaggcaagggagcgacctgttgtcagtgggaaacctgtgtgttgagtatagctttgggatagaactcctccagagctgctgcacggaccaccctcgcacttgcctactggccagaatgtatttatcaaaagtcctcttgccgtgggatcttgactgcaatttaagacacttctaattagttatacccaggccctgcaaaattgctgggtttatataatatattcttgttgcacgaagatttattattctgttggatgattctattttaattttatttattctggccaaaaaagaaccttctccgctcgtcaagagatgccaatttgtcttgaaggacaagagaaagatgctaacacacactttcttcttcttgaggagtgagagaagcacgggtaaggaaaacaatatatctggggctgatgaaccaaagcaaaaaaatatatgctaaagatggttttctgctcaaactcttatcctctttgaccagatcatggttggtcactgcagtgtcagagggacacaattaaatagaccatgtccagaggactgggactagaagaatgaatggacccaaagctttgaagaataagggaagaaaaataaactagggctatgtagactacaacagactatgatccatgccgggaatgatgatgttgatcgtttaatctcggtcctgtgaaacagtggctggactaatgtaacctggacagttccaaggaaaaagaactaagcttaatgtgtggaacttccagagactccaatttcagaagaacagggagagttttttgatgaacagaactgtctagagaagaaggaaacctccttgtaagacagtgaattcctgaccagcaataatattccatcagaggctccacagccatcagtgaagggcaagcctctctctggaggcagggctggactctcttagaagctcctgaagcagagattctctggatcaaggtccaagatggccagagtagcaggctaccactgcattctgaacccttaatcgccgagcacgtaagtatgctccagatggagagacctgccccagggcccaactggaagagtttgagaccagtcccaaagataactctgacattgaaggaaccacgtctccagatcaactagtctccagcagaggagaaagaagacctcttttctcctcaagaatcctcctcactcccaaggaggtctggtgcttacctactgtcattgctttgatgatgatgctggctctggggctttgtagtcactagggcaccattttgaaacaatgcacaatcatctactaaacggaaccactagtgacttgaaagcccctgggccttatcttctctgtcacttttgatgatgggtccccacctatccgggaaaagctgaggtgcagaaaaccaagaggcaggcccatggttagctggcagaagagcaaggctcccaagtcaaaggtagtaaaaccgcttccccagagtccccaagaaaaagggcaagtatttttaaggtagcccagccctctgcccctgcctaatactgtgcaagcaaagctctagccacatgagcatgagctttccctcatccagagactgactcaataaatgaaacaaaagcagattttctgcctagtcacatggtagcagaacaagatgcctctcacgacaaatggctggttgggtgactggctccatccacattctggaaacgatgagggcagtgccttcactgccctgaacttggtcaggatgtgtgaagagtgtttccagggttgctctgggagctaccctggggaggtcccttggctcctcattcaggtcacctaggaacataagtgaaggtgctcacatctaattgggagctgaagtgtaagatacccaggaccttcccctttagtctttgtcagagaaaaggtcagaaaaccagtggccactatgtctatgtggaatccaccatgaagcctttgataagaatctgtgcttttcagacttgttcctttaagataaatgtcaatgcagcagccagtgtagctgctgtaacttcctccagactttcccagccttaaactagctgacattagaactctagcctccacctcccactacaatggactttgcttcccattcaaccagactggattggttctgggtatggagaactcacacgagctccattccccaaagtcatccaaagaggtcagagttgtaacctcgaaactgaagggtctgcatgaaaaagccagctgcacattccgacagcagcagaactttatctacttacctaacctctcaaggagcttggcaaagcacttacttctttgcagatgagactgagacatagttacaaagtctcagtttcctctgcaaacagttgtaagtgcttagcaattataagac

SEQ ID NO: 47 - DNA, 8424 bp, Homo sapiens
ggagcctggaggactagcgaggaggagttgagagaacggagcggacgccatggcgaccaacatcgagcagatttttaggtctttcgtggtcagtaaattccgggaaattcaacaggagctttccagtggaaggaatgaaggccagctgaatggtgaaacaaatacacccattgaaggaaaccaggcgggtgatgcagctgcctctgccaggagtctaccaaatgaagaaatagtgcagaagatagaggaagtactttctggggtcttagatacagaactacgatataagccagacttgaaagagggctccagaaaaagtagatgcgtatctgtacaaacagatcctactgatgaaattcccactaaaaagtcaaagaagcataaaaagcacaaaaacaaaaagaagaaaaagaagaaagaaaaggaaaaaaaatataaaagacagccagaagaatctgagtcaaagacgaaatctcatgatgatgggaacatagatttagaatctgattcctttttaaagtttgattctgaaccttcagctgtggcgctggagcttcctacaagagcatttggcccatctgagaccaatgaatcccctgcagttgtgctagaacctcctgtagtatcaatggaggtatcagagccacacatcttagaaactctgaagccagctacaaaaactgcagaactgtcagttgtatctacatcagtaatctcagagcagtcagagcagtctgtggcagtaatgccagaaccatccatgacaaagattctggattcctttgcagcagcaccagtgcctactacaacactggtgttgaagtcatctgagccagttgtaacaatgtcagtggagtatcagatgaagtctgtgctgaaatctgtggagagcacatctccagagccatcaaagatcatgttggtagagcccccagtagcaaaagtgttagagccttcagaaacccttgtggtatcatcagagacacctactgaggtgtaccctgagccaagcacatcaacaacaatggattttccagagtcatctgcaattgaagcgctaagattgccagagcagcctgtagacgtaccatcggagattgcagattcatccatgacaagaccgcaggagttgccggagctgcctaagaccacagcgttggagctgcaggagtcgtcggtggcctcagcgatggagttgccggggccacctgcgacctccatgccggagttgcaggggccccctgtgactccagtgctggagttacctgggccctctgctaccccggtgccagagttgccagggcccctttctaccccagtgcctgagttgccagggccccctgcgacagcagtgcctgagttgccagggccctctgtgacaccagtgccacagttgtcgcaggaattgccagggcttccagcaccatccatggggttggagccaccacaggaggtaccagagccacctgtgatggcacaggagttgccagggctgcctttggtgacagcagcagtagagttgccagagcagcctgcggtaacagtagcaatggagttgaccgaacaacctgtgacgacgacagagttggagcagcctgtggggatgacaacggtggaacatcctgggcatcctgaggtgacaacggcaacagggttgctggggcagcctgaggcaacgatggtgctggagttgccaggacagccagtggcaacgacagcgctggagttgccggggcagccttcggtgactggggtgccagagttgccagggctgccttcggcaactagggcactggagttgtcggggcagcctgtggcaactggggcactagagttgcctgggccgctcatggcagctggggcactggagttctcggggcagtctggggcagctggagcactggagcttttggggcagcctctggcaacaggggtgctggagttgccagggcagcctggggcgccagagttgcctgggcagcctgtggcaactgtggcgctggagatctctgttcagtctgtggtgacaacatcggagctgtcaacgatgaccgtgtcgcagtccctggaggtgccctcgacgacagcgctggaatcctataatacggtagcacaggagctgcctactacattagtgggggagacttctgtaacagtaggagtggatcccttgatggccccagaatcccatatattagcttctaacaccatggagacccatatattagcatccaacaccatggactcccaaatgctagcgtccaacaccatggactcccagatgctagcatccaacaccatggactcccagatgttagcgtctagcaccatggactcccagatgttagcaactagctccatggactcccagatgttagcaactagctccatggactcccagatgttagcaactagcactatggactcccagatgttagcaaccagttccatggactcccagatgttagcaaccagctccatggactcccagatgttagcaaccagctccatggactcccagatgttagcaaccagctccatggactcccagatgttagcaaccagcaccatggattctcagatgttagcaaccagcaccatggactcccagatgttagcaactagctcaatggattcccagatgttagcatctggcactatggactctcaaatgttagcttctggcaccatggatgctcagatgttagcgtctggtaccatggatgcccagatgttagcgtctagtacccaagattctgctatgttgggttcaaaatctcctgatccctataggttagctcaggatccttacaggttagctcaggatccctataggttgggccatgacccctatagattaggtcatgatgcttacaggttaggacaagacccttatagattaggccatgatccctacagactaactcctgatccctataggatgtcacctagaccctacaggatagcacccaggtcctatagaatagcacccaggccatataggttagcacctagacccctgatgttagcatctagacgttctatgatgatgtcctatgctgcagaacgttccatgatgtcatcttacgaacgctctatgatgtcttatgagcggtctatgatgtcccctatggctgaacgctctatgatgtcagcctacgagcgctctatgatgtcagcctacgagcgctctatgatgtcccctatggctgagcgctctatgatgtcagcttatgaacgctccatgatgtcagcttatgaacgctccatgatgtccccaatggctgatcgatctatgatgtccatgggtgctgaccggtctatgatgtcgtcatactctgctgctgaccggtctatgatgtcatcgtactctgcagctgaccgatctatgatgtcatcttatactgctgatcgttcaatgatgtctatggctgctgattcttacaccgattcttacactgacacatatacagaggcatatatggtgccacctttgcctcctgaagagcccccaacaatgccaccgttgccacctgaggagccaccaatgacaccaccattgcctcctgaggaaccaccagagggtccagcattgcccactgagcagtcagcattaacagctgaaaatacttggcctacagaggtgccatcattaccatctgaagagtctgtatcgcagcctgagcctcctgtgagtcaaagtgagatttcggagccttcagcagtgcctactgattattcagtgtcagcatcagatccctcagttttagtatcagaggctgctgtgactgttccagaaccaccaccagagccagaatcttcaattacgttaacacctgtagagtctgcagtagtagcagaagaacatgaagttgttccagagagaccagtgacttgtatggtatctgaaactcccgccatgtcagctgaaccaactgtgttagcatcagagcctcctgttatgtcagagacagcagaaacatttgattccatgagagcctcaggacatgttgcctcagaagtatctacatccttgttggttccagcagtaactactccagtgctggcagagagcattctggagccgccagccatggctgccccagagtcttcagctatggctgtcctggagtcttcggctgtgaccgtcctggagtcttcgactgtgactgtcctggagtcttcgactgtaactgtcctggagccttcggttgtgactgtcccggagcctcctgttgtggctgagccagactatgttaccattcctgtgccagttgtttctgcgctggagccttctgtgcctgttctggaaccagcggtgtcagtccttcaaccttctatgattgtttcagaaccatctgtttctgtccaggaatcgactgtgacagtttcagagcctgctgtcacagtctcagagcagactcaagtaataccaactgaggtggctatagagtccacaccaatgatactggaatctagtatcatgtcatcacatgttatgaaaggaattaatctatcctctggtgatcaaaatcttgctccagagattggcatgcaggagattgcattgcattcaggtgaagaaccacatgctgaggaacacctgaaaggtgacttttacgaaagtgaacatggtataaatatagaccttaatataaataatcatttaattgctaaagagatggaacataatacagtgtgtgctgctggtactagtcctgttggggaaattggtgaagagaaaattttgcccaccagtgagactaaacagcgcacagtattggatacctaccctggtgttagtgaagctgatgcaggagaaactctatcttctactggtccttttgctctggaacctgatgcaacaggaactagtaagggtattgaatttaccacagcatctactctcagtttagttaataaatatgatgttgatttatctttaactactcaagatactgaacatgacatggtaatttccaccagtcctagtggtggtagtgaagctgacattgaagggcctttgcctgctaaagatattcatcttgatttaccatctaataataaccttgttagtaaggatacagaagaaccattacctgtaaaagagagtgaccagacattagcagctctgctcagccctaaagaaagtagtggaggagaaaaagaagtacctccccctcctaaagagacactgcctgattcaggattttctgccaatattgaggatattaatgaagcagatttagtgagaccgttacttcctaaggacatggaacgtcttacaagccttagagctggcattgaaggacctttacttgcaagtgatgttggacgtgacagatctgctgccagcccggttgtaagtagtatgccagaaagagcttcagagtcttcttcagaggaaaaagatgattatgaaatttttgtaaaagttaaggacactcacgaaaaaagcaagaaaaataagaaccgtgataagggggagaaagagaagaaaagagactcttcattaagatctcgaagtaagcgttccaaatcttctgaacacaaatcacgcaagcgtaccagtgaatctcgttctagggcaagaaagagatcatctaagtccaagtctcatcgctctcagacacgttcacggtcacgttcaagacgcaggaggagaagcagcagatcaagatcaaagtctagaggaagaagatctgtatcaaaagagaagcgcaaaagatctccaaagcacagatccaagtctagggaaagaaaaagaaaaagatcaagctccagggataaccgaaagacagttagagctcgaagtcgaaccccaagtcgtcggagtcggagtcatactccaagtcgtcgacgaaggtctagatctgtgggtagaagaaggagctttagcatttccccaagccgccgcagccgcacccccagccgccgcagccgcacccccagccgccgcagccgcacccccagccgccgcagccgcacccccagccgccggagccgcacccctagccgtcggagccgcaccccaagccgccggagaagatcaaggtctgtggtaagaagacgaagcttcagtatctcaccagtcagattaaggcgatcaagaacacccttaagaagaaggtttagcagatctcccatccgtcgtaaaagatccaggtcttctgaacgaggcagatcacccaaacgtctgacagatttggataaggctcaattacttgaaatagccaaagctaatgcagctgccatgtgtgctaaggctggtgtccctttaccaccaaacctaaagcctgcacctccacctactatagaagagaaagttgctaaaaagtcaggaggagctactatagaagaactaactgagaaatgtaaacagatcgcacagagtaaagaagatgatgatgtaatagtgaataaacctcatgtttcggatgaagaggaagaagaacctcctttttatcatcatccctttaaactcagtgaacccaaacctatttttttcaatctgaatattgctgcagcaaaaccaactccaccaaaaagccaggtaacattaacaaaagaattccctgtatcatctggatctcaacatcggaaaaaagaagcggatagtgtttatggagaatgggttcctgtggagaaaaatggtgaagaaaacaaagatgatgataatgttttcagcagcaatttgccctcagagcctgtggacatctctacagcaatgagtgaacgggcacttgctcagaaaagactcagtgagaatgcatttgatcttgaagccatgagcatgttaaatagagctcaggaaaggattgatgcctgggctcagctgaactctattcctggccagttcacaggaagtacaggagtacaggttttgacacaagaacagttggccaatactggtgcccaagcctggattaaaaaggatcagttcttaagagcagccccggtaactggaggaatgggagccgttttgatgagaaaaatgggctggagagaaggagaaggattaggaaaaaacaaagaaggcaataaggaacccatcctagttgattttaagacagaccgaaaaggtcttgttgcagtaggagaaagagcacaaaagaggtctgggaacttctctgctgcaatgaaagatctgtcaggcaaacatcctgtgtctgctttgatggagatctgtaataaaagaaggtggcaaccacctgaatttctattggtccatgatagtggccctgatcatcgcaaacattttctctttagggtattgagaaatggaagcccttaccagacccaattgtatgtttttcttgaataggtattgataaatggaagcgcttaccagcccagctttgccagccctaataagaagcatgctaaagccacagcagctactgtggttcttcaagcaatgggccttgtaccaaaggacctcatggctaatgccacttgcttcaggagtgcctcacgtagatagattgaggttttataataatcatttcagaattttactctgcatcacaatgtatttcctctttaatgttgtaaatatttggcaatttaagacattgtgtaaaaagcaatctgtaaaaacatctccaggctttgatttttgtaccatggaaattgtatttaaccatacagggttttggtatgtttatattgtttaccttagtgatgtatttgtttaagtggctaacatccaaacgactgtttgaaggcatcagagtaatcttcagtgtggaatgttaaataacgcttttatactgtattttgtactatgatgtaactccccttccttatggctaggctactgtaacacttgcctgtaatcagtgaagggctgtgcaccttgtactatttcacaatgggttctgctggacagataatgggccagtgttattgaggtgatcaagatctgttccacagggctaatgccaccatctcccctcaaaattttgtagaggttctaaaaagaaagtggtatgttgtgtgatgatcagcactaagtcctgcattcctgttaaagccacttgggtcataagaagggagtaaaaaatgaagtctgactagaattctattgcagaggccaagtacatttagtatggcattgagttgtgatatagttttactttgatgtgcattttgaatttcagctacacctagatagacgtaaaatgataattaaaatgctgtaaccaacttatctaataaaattggcaaccagccactattttgttgactatgagaaagttaaaagtttatgttaatttttagggtctgatagaatatttcatgtgtattacagtggtattcatatgctatgtctctaaactttattttcaaaagcttaaggcccaaatacaaacttctctggaataaacgtggtgttttattttctgggttataaaaaaaaaa

SEQ ID NO: 48 - DNA, 1918 bp, Homo sapiens
gggggtaacaactctcagaggagcattgcccgtcagacagcaactcagagaataaccagagaacaaccagattgaaacaatggaggatctttgtgtggcaaacacactctttgccctcaatttattcaagcatctggcaaaagcaagccccacccagaacctcttcctctccccatggagcatctcgtccaccatggccatggtctacatgggctccaggggcagcaccgaagaccagatggccaaggtgcttcagtttaatgaagtgggagccaatgcagttacccccatgactccagagaactttaccagctgtgggttcatgcagcagatccagaagggtagttatcctgatgcgattttgcaggcacaagctgcagataaaatccattcatccttccgctctctcagctctgcaatcaatgcatccacagggaattatttactggaaagtgtcaataagctgtttggtgagaagtctgcgagcttccgggaagaatatattcgactctgtcagaaatattactcctcagaaccccaggcagtagacttcctagaatgtgcagaagaagctagaaaaaagatttattcctgggtcaagactcaaaccaaaggcaaaatcccaaacttgttacctgaaggttctgtagatggggataccaggatggtcctggtgaatgctgtctacttcaaaggaaagtggaaaactccatttgagaagaaactaaatgggctttatcctttccgtgtaaactcggctcagcgcacacctgtacagatgatgtacttgcgtgaaaagctaaacattggatacatagaagacctaaaggctcagattctagaactcccatatgctggagatgttagcatgttcttgttgcttccagatgaaattgccgatgtgtccactggcttggagctgctggaaagtgaaataacctatgacaaactcaacaagtggaccagcaaagacaaaatggctgaagatgaagttgaggtatacataccccagttcaaattagaagagcattatgaactcagatccattctgagaagcatgggcatggaggacgccttcaacaagggacgggccaatttctcagggatgtcggagaggaatgacctgtttctttctgaagtgttccaccaagccatggtggatgtgaatgaggagggcactgaagcagccgctggcacaggaggtgttatgacagggagaactggacatggaggcccacagtttgtggcagatcatccttttctttttcttattatgcataagataaccaactgcattttatttttcggcagattttcctcaccctaaaactaagcgtgctgcttctgcaaaagatttttgtagatgagctgtgtgcctcagaattgctatttcaaattgccaaaaatttagagatgttttctacatatttctgctcttctgaacaacttctgctacccactaaataaaaacacagaaataattagacaattgtctattataacatgacaaccctattaatcatttggtcttctaaaatgggatcatgcccatttagattttccttactatcagtttatttttataacattaacttttactttgttatttattattttatataatggtgagtttttaaattattgctcactgcctatttaatgtagctaataaagttatagaagcagatgatctgttaatttcctatctaataaatgcctttaattgttctcataatgaagaataagtaggtatccctccatgcccttctataataaatatctggaaaaaacattaaacaataggcaaatatatgttatgtgcatttctagaaatacataacacatatatatgtctgtatcttatattcaattgcaagtatataataaataaacctgcttccaaacaataaaaaaaaaa

SEQ ID NO: 49 - DNA, 5468 bp, Homo sapiens
ggtatcgataagcttgatggagcggacggcagacggggcgggcggcgtcagggtcgcagcgtctacagctgctcgggggcggtttcttggcggaggcttggccggctcctctctcccggctccgcggcggctgcgaaggcggcggctcctgccctctcgctttccctctcgcgtctctggctgcagaaagaagcttccggttctgaggtcctggaggtgccatttccctctctgttgaagcaaaggccggggcagacctcctagtgaaaggaaagcaagccaggatggatatttacgacactcaaaccttgggggttgtggtctttggaggattcatggttgtttctgccattggcatcttcctggtgtcgactttctccatgaaggaaacgtcatatgaagaagccctagccaaccagcgcaaggagatggcgaaaactcaccaccagaaagtcgagaagaaaaagaaggagaaaacagtggagaagaaaggaaagaccaagaaaaaggaagagaaacctaatgggaagatacctgatcatgatccagcccccaatgtgactgtcctccttcgagaaccagtgcgggctcctgctgtggctgtggctccaaccccagtgcagccccccattatcgttgctcctgtcgccacagttccagccatgccccaggagaagctggcctcctcccccaaggacaaaaagaagaaggagaaaaaagtggcaaaagtggaaccagctgtcagctctgtagtgaattccatccaggttctcacttcgaaggctgccatcttggaaactgctcccaaggaggtgccgatggtggtggtgcccccagtgggtgccaagggcaacacaccagccactggcactactcagggcaaaaaggcggaggggactcagaatcaaagcaaaaaggctgaaggagccccaaaccagggcagaaaggcagagggaaccccaaaccagggcaaaaagacagagggaaccccaaaccaagggaaaaaggcagagggaaccccaaaccaaggcaaaaaggcagaaggaaccccaaaccaaggcaaaaaggcggagggggcccagaaccagggtaaaaaggtagatacaaccccaaaccaggggaaaaaggtggagggggccccaacccagggcagaaaggccgagggggctcagaaccaggccaaaaaggtagaaggggcccagaaccagggcaaaaaggcagagggggcccagaatcagggcaaaaagggagagggggcccagaaccagggcaagaaggccgagggggcccagaatcagggcaagaaggccgagggggcccagaatcagggcaagaaggccgagggggcccagaatcagggcaagaaggccgagggggcccagaatcagggcaagaaggctgagggggctcagaaccagggcaaaaaggccgagggggctcagaaccagggcaaaaaagtagaaggggcccagaaccagggcaagaaggctgagggtgcccagaaccagggcaaaaaggccgagggggcccagaatcagggcaaaaaggccgagggggcccagaaccagggcaagaaggcagagggggcccagaaccagggcaagaaggccgagggggcccagaaccaggacaagaaggccgagggggcccagaaccagggcaggaaggccgagggggcccagaaccagggcaggaaggccgagggggcccagaaccagggcaagaaggccgagggggccccgaaccagggcaagaaggccgagggggccccgaaccagggcaagaaggccgaggggaccccgaaccagggcaagaaggccgaggggaccccgaaccagggcaagaaggccgaggggaccccgaaccagggcaagaaggccgagggggcccagaaccagggcaagaaggccgagggggcccagaaccagggcaagaaggccgaggggaccccgaaccagggcaagaaggccgagggggcccagaaccagggcaagaaggccgagggggcccagaaccagggcaagaaggccgagggggcccagaaccagggcaagaaggccgagggggcccagaaccagggcaagaaggccgagggggcccagaaccagggcaagaaggccgagggtgctcagaaccagggcaaaaaagtagaaggggcccagaaccagggcaagaaggctgagggggcccagaaccagggcaagaaggccgagggggctcagaaccagggcaaaaaggccgagggagcccagaaccagggccaaaaaggagagggagcccagaatcagggtaaaaagacagaaggggctcagggcaaaaaggcagaaaggagtcccaaccaaggcaaaaaaggagagggagctcccatccagggcaaaaaggcagattcggttgctaatcagggcacaaaggtagagggtattacaaaccaggggaaaaaagcagaagggtcccccagtgaaggcaaaaaggcagaagggtcccccaaccaaggcaaaaaggcagacgcagctgccaatcagggtaaaaagacagagtcagcttctgtccagggcagaaatacagatgtggcccagagcccagaggcaccaaagcaagaggctcctgccaagaagaagtctggttcaaagaaaaaaggtgagcctgggcccccagatgccgacggccctctctacctcccctacaagacgctggtctccacggttgggagcatggtgttcaacgagggcgaggcccagcggctcatcgagatcctgtctgagaaggctggcatcattcaggacacctggcacaaggccactcagaagggtgaccctgtggcgattctgaaacgccagctggaagagaaggaaaaactgctggccacagaacaggaagatgcggctgtcgccaagagcaaactgagggagctcaacaaggagatggcagcagaaaaggccaaagcagcagccggggaggccaaagtgaaaaagcagctggtggcccgggagcaggagatcacggctgtgcaggcacgcatgcaggccagctaccgggagcacgtgaaggaggtgcagcagctgcagggcaagatccggactcttcaggagcagctggagaatggccccaacacgcagctggcccgcctgcagcaggagaactccatcctgcgggatgccttgaaccaggccacgagccaggtggagagcaagcagaacgcagagctggccaagcttcggcaggagctcagcaaggtcagcaaagagctggtggagaagtcagaggctgtgcggcaagatgagcagcagcggaaagctctggaagccaaggcagctgccttcgagaagcaggtcctgcagctgcaggcgtcccacagggagagtgaggaggccctgcagaagcgcctggacgaggtcagccgggagctgtgccacacgcagagcagccacgccagcctccgggcggatgccgagaaggcccaggagcaacagcagcagatggccgagctgcacagcaagttacagtcctccgaggcggaggtgcgcagcaaatgcgaggagctgagtggcctccacgggcagctccaggaggccagggcggagaactcccagctcacagagagaatccgttccattgaggccctgctggaggcgggccaggcgcgggatgcccaggacgtccaggccagccaggcggaggctgaccagcagcagactcgcctcaaggagctggagtcccaggtgtcgggtctggagaaggaggccatcgagctcagggaggccgtcgagcagcagaaagtgaagaacaatgacctccgggagaagaactggaaggccatggaggcactggccacggccgagcaggcctgcaaggagaagctgcactccctgacccaggccaaggaggaatcggagaagcagctctgtctgattgaggcgcagaccatggaggccctgctggctctgctcccagaactctctgtcttggcacaacagaattacaccgagtggctgcaggatctcaaagagaaaggccccacgctgctgaagcacccgccagctcccgcggagccctcctcggacctggcctccaagttgagggaggccgaggagacgcagagcacactgcaggccgagtgtgaccagtaccgcagcatcctggcggagacggagggcatgctcagagacctgcagaagagcgtggaggaggaggagcaggtgtggagggccaaggtgggcgccgcagaggaggagctccagaagtcccgggtcacagtgaagcatctcgaagagattgtagagaagctaaaaggagaacttgaaagttcggaccaggtgagggagcacacgttgcatttggaggcagagctggaaaagcacatggcggccgccagcgccgagtgccagaactacgccaaggaggtggcagggctgaggcaacttctcctagaatctcaatctcagctcgatgccgccaagagcgaagcccagaaacagagcgatgagcttgccctggtcaggcagcagttgagtgaaatgaagagccacgtagaggatggtgacatagctggggccccagcttcctccccagaggcgcccccagccgagcaggaccccgttcagctgaagacgcagctggagtggacagaagccatcctggaggatgagcagacacagcggcagaagctcacggccgagtttgaggaggctcagacctcggcatgtcggttacaagaagaattggagaagctccgcacagccggccccctagagtcttcagaaacagaggaggcctcacagctgaaggagagactagaaaaagagaagaagttaacaagtgacctggggcgcgccgccacgagactgcaggagcttctgaagacgacccaggagcagctggcaagggagaaggacacggtgaagaagctgcaggaacagctggaaaaggcagaggacggcagcagctcaaaggagggcacctctgtctgagtttcctctttggaaaaagaagttactgttcaacttaccaaaatgccttacacattccttacaaataaaccaaccaacctacacagcgttatccaggcccaacttccggtactccgagagaagccatgagagacaagtctcttagagccacagaagtagaccttccagagccccagtttgtaaatgaacctgtgtcacatttgataaacactatcctgggcgcagccccgggccaccgccgagtgacgccaaagccctggttgactctgacagccccgtgggtgtgtgggaggccgggcgctctggggtctgtctgtcagtgcaatcgtttagtgttttttcagtggggcggggcgggaagcgggtgggaccgggcagccagttctcaaaggctgtggggccgactggaggccacagcccctcacccctagacgttgccaaccagaactgacgtgtgacctcctgggtgttgatgccattaaaaccaacgttggtgcccgg

SEQ ID NO: 50 - DNA, 1929 bp, Homo sapiens
gcagtgcggcggtcacaggctgagtgctgcggcgcgatccttgcttccctgagcgttggcccgggaggaaagaagatggtgctggatctggatttgtttcgggtggataaaggaggggacccagccctcatccgagagacgcaggagaagcgcttcaaggacccgggactagtggaccagctggtgaaggcagacagcgagtggcgacgatgtagatttcgggcagacaacttgagcaagctgaagaacctatgcagcaagacaatcggagagaaaatgaagaaaaaagagccagtgggagatgatgagtctgtcccagagaatgtgctgagtttcgatgaccttactgcagacgctttagctggcctggcctgttcatctgcagaacctgaaagtctcacaaatcaaaaaagtccgactcctcattgatgaagccatcctgaagtgtgacgcggagcggataaagttggaaggcagagcggtttgagaacctccgagagattgggaaccttctgcacccttctgtacccatcagtaacgatgaggatgtggacaacaaagtagagaggatttggggtgattgtacagtcaggaagaagtactctcatgtggacctggtggtgatggtagatggctttgaaggcgaaaagggggccgtggtggctgggagtcgagggtacttcttgaagggggtcctggtgttcctggaacaggctctcatccagtatgcccttcgcaccttgggaagtcggggctacattcccatttataccccctttttcatgaggaaggaggtcatgcaggaggtggcacagctcagccagtttgatgaagaactttataaggtgattggcaaaggcagtgaaaagtctgatgacaactcctatgatgagaagtacctgattgccacctcagagcagcccattgctgccctgcaccgggatgagtggctccggccggaggacctgcccatcaagtatgctggcctgtctacctgcttccgtcaggaggtgggctcccatggccgtgacacccgtggcatcttccgagtccatcagtttgagaagattgaacagtttgtgtactcatcaccccatgacaacaagtcatgggagatgtttgaagagatgattaccaccgcagaggagttctaccagtccctggggattccttaccacattgtgaatattgtctcaggttctttgaatcatgctgccagtaagaagcttgacctggaggcctggtttccgggctcaggagccttccgtgagttggtctcctgttctaattgcacggattaccaggctcgccggcttcgaatccgatatgggcaaaccaagaagatgatggacaaggtggagtttgtccatatgctcaatgctaccatgtgcgccactacccgtaccatctgcgccatcctggagaactaccagacagagcaagggcatcactgtgcctgagaaattgaaggagttcatgccgccaggactgcaagaactgatcccctttgtgaagcctgcgcccattgagcaggagccatcaaagaagcagaagaagcaacatgagggcagcaaaaagaaagcagcagcaagagacgtcaccctagaaaacaggctgcagaacatggaggtcaccgatgcttgaacattcctgcctccctatttgccaggctttcatttctgtctgctgagatctcagagcctgcccaacagcagggaagccaagcacccattcatccccctgcccccatctgactgcgtagctgagaggggaacagtgccatgtaccacacagatgttcctgtctcctcgcatgggcatagggacccatcattgatgactgatgaaaccatgtaataaagcatctctggggagggcttaggactcttcctcagtcttcttccccgggcttgaaccccgaaaaaaaaaa

SEQ ID NO: 51 - DNA, 5777 bp, Homo sapiens
gagggaggagagttcacttttacttcagtgtcagcgcgcggcggccgtggctggctctggcgagagagcaccgagggagtgggtcgcagatcttcgggcggctaggggaaatcggcgagaggcgggatccgagcgcgccggcggggcgcagagcccgcgagcctggccagcgagggtagccgcggggggcgcgccccgggcgggcccccggagacgcgcaggatgccacacgaagagctgccgtcgctgcagagaccccgctatggctctattgtggacgatgaaaggctctctgcagaggagatggatgagaggaggcggcagaacattgcttatgaatatctgtgccacttagaggaagccaaaaggtggatggaagtttgcttagttgaagaattgccaccaaccactgaattggaagaagggctccggaatggagtttaccttgcaaagttagccaagttctttgccccgaaaatggtatcagagaaaaagatctatgatgtggaacaaacacgttataagaagtctggccttcattttcgacacacagataataccgtccagtggttaagagcgatggagtctattggtctacccaagatattttatccagaaacaacagatgtctatgatcggaaaaacataccaagaatgatatattgcattcacgcactgagtttgtatctgttcaaactaggaatagcaccccagatccaggatttgttgggcaaagtagacttcacagaggaggaaatcagtaatatgagaaaagaacttgagaaatatggaatacagatgccatctttcagcaaaataggtggtattctggccaatgaactgtccgtggatgaagctgcattacatgctgcagttatagccattaatgaagcagttgaaaaaggaatagcagagcaaaccgttgtaacactaagaaacccaaatgcggttttaactttagtggatgacaaccttgcaccagaatatcagaaagaactctgggatgccaaaaagaaaaaagaggaaaatgcaagactgaagaatagctgtatttcagaagaagaaagagatgcttatgaagaactgctgacacaagcagaaatccaaggcaatattaataaagtcaacaggcaggctgcagtggaccatatcaatgctgtcattccggaaggtgaccccgagaatacgctgcttgcactgaagaaaccagaggcccagctgcctgctgtttatccctttgctgctgccatgtatcagaacgaacttttcaacctccagaaacagaacaccatgaactacttggcccacgaggagcttttgattgctgtggaaatgttgtctgctgttgctttactaaaccaggccttggaaagcaacgatcttgtgtctgtgcagaatcaactcagaagccccgcaataggcttaaacaatctggacaaggcatatgtggaacgttatgcaaacacactactctctgttaaactagaagttttatcccaagggcaagataacttaagctggaatgaaattcagaattgtattgatatggttaatgctcaaattcaagaagaaaatgaccgagttgtagctgtagggtacatcaatgaagctattgatgaagggaatcctttgaggactttagaaactttgctcctacctactgcgaatattagtgatgtggacccagcccatgcccagcactaccaggatgttttataccatgctaaatcacagaaactcggagactctgagagtgtttccaaagtgctttggctggatgagatacagcaagccgtcgatgaggccaacgtggacgaggacagagcaaaacaatgggttactctggtggttgatgttaatcagtgtttggaaggaaaaaaatcaagtgatattttgtctgtattgaagtcttccacttctaatgcaaatgacataatcccggagtgtgctgacaaatactatgatgcccttgtgaaggcaaaagagctcaaatctgaaagagtgtctagtgacggttcatggctcaaactcaacctgcacaaaaaatatgactactattacaacactgattcaaaagagagttcctgggtcacacctgaatcatgcttctataaagaatcatggctcacaggaaaagaaatcgaggacattattgaggaagtcacagtaggttacattcgtgagaatatatggtctgcttcagaagagttgcttcttcgctttcaagccacaagctcaggacccatccttagggaagagtttgaagctagaaaatcatttttgcatgaacaagaagagaatgtggtcaaaatacaggctttttggaaaggatataaacaacggaaggagtatatgcacaggcggcaaacgttcattgataatactgattctgttgtgaagattcagtcctggttccgaatggcaactgcaagaaagagctatctttcaagactacagtatttcagagatcataataatgaaattgtgaaaatacagtcactgttgagagcgaacaaagctagagatgactacaaaacattggttggctctgaaaacccaccattaacagtaattcgcaaatttgtatacctgctggaccaaagtgatttggatttccaggaggaactagaggttgcacgattaagggaagaagtagtgaccaagatcagggccaatcaacagctggaaaaagacctgaacctgatggacatcaagattggactgctggtgaagaacaggatcacactagaggatgtaatttcacacagtaaaaagctgaacaagaaaaaaggaggagaaatggaaatactgaataacaccgacaaccaaggaataaaaagtttgagtaaggagaggagaaaaacactagaaacatatcagcagctgttttaccttttacagaccaaccctttatacttggctaagctgattttccagatgccacagaacaagtccactaaatttatggatactgttattttcacactatataattatgcctctaatcagcgagaagaatatctacttctcaagctttttaaaactgctctggaggaagaaataaaatcaaaagtggaccaggtacaggacatagttactggtaaccctacagtcatcaagatggtcgtcagcttcaatagaggtgcccggggacagaacaccctgcgccaactcctggctccagtggtaaaagagatcatcgacgacaagtcgctgattatcaacacaaaccctgtagaggtgtacaaggcttgggtgaaccaactagaaacacagactggagaggccagcaagttgccttatgatgtgaccacagaacaagctctaacatacccagaagtgaaaaataaactggaggcttccattgagaacctgagaagggtcaccgacaaagtcctgaattctatcatttcttcccttgatctactgccttatggattgaggtatatagccaaagtactgaagaattcgatccatgagaaattccccgatgcaacagaagatgagctattaaagattgttggaaacctcctgtactatcggtacatgaatccagccattgtagctccagatggctttgatatcatcgacatgacagctggaggtcagataaattctgaccaaaggagaaacttaggatcagtggccaaggttcttcagcacgcagcctccaacaagctgtttgaaggagaaaatgagcatctctcatctatgaacaattatttatcagagacgtatcaggaattcaggaaatatttcaaagaagcatgtaatgtccctgagccagaagagaagtttaatatggacaaatacacagacctggtgacagtcagcaaaccagtcatttatatttcaattgaagaaatcatcagcacacactcactcctgttggaacaccaggatgcaattgcccctgagaaaaatgacttactgagtgaattgctggggtcgctgggagaggtgccaaccgtggaatcttttcttggggaaggagcagttgaccccaatgaccctaacaaggcaaatacactaagtcagctttcaaagaccgagatttctcttgtcttgacaagcaaatatgacatagaggacggtgaagctatagatagccgaagcctcatgataaagaccaagaagctgataattgatgtgatccggaaccagccagggaacacattgacagaaatcttagagacaccagcaactgcgcaacaggaggtagaccatgccacggacatggtgagccgtgcaatgatagattccaggactccagaagaaatgaagcatagccaatctatgattgaagatgcacagctgcctcttgagcagaagaagaggaaaatccagaggaatcttcggacgttggaacagactggacacgtgtcatccgaaaataaataccaagacattctcaatgagattgccaaggatattcgaaatcaaagaatctatcgtaagcttcgaaaagctgaattggcaaaacttcagcagaccctgaatgcacttaacaagaaggcagcattttatgaagagcaaatcaattattatgacacctacataaagacttgtttagacaacttaaaaagaaaaaatactcggagatcaattaaactagatggaaaaggagaacccaaaggggcgaagagagcgaagccagtgaagtacactgcagcaaagctgcatgagaaaggtgtcctgctagatatagatgatcttcaaacaaaccagtttaagaatgttacatttgatatcatagctactgaagatgtaggcattttcgatgtaagatcaaaattccttggtgttgagatggaaaaggtgcaactcaatattcaggatttacttcagatgcaatatgaaggagtagctgtaatgaaaatgtttgataaggttaaagtgaatgtaaaccttctcatatacctgctgaacaagaagttctatggaaagtgaagtgcctacagaaatttcttggattctgtatcatctggattaggaaatgaatttgtttaatatttttgtttttaaacatgattgaaatcactgcttataaatgtgtgattttttttaaacgaccaaaactgttctgaagaatgtacccaggtgcctttttgctaatttgatactataatagaatgagacataaaatgaattaatggaaacatatccacactgtactgtgatataggtactctgatttaaaactttggacatcctgtgatctgttttaaagttggggggtgggaaatttagctgactagggacaaacatgtaaacctattttcctatgaaaaaaattttaaatgtcccacttgaataacgtaattcttcatagtttttttaatctatggataaatggaaacctaattatttgtaatgaattatttagacagttctaagccctgtcttctgggagttatcaattttaaagagaacttttgtgcaattcaaatgaagtttttataagtaattgaaaatgacaacacaataacactttctgtataaaagtatatattttatgtgatttattcctactaaatgaaagtgcactactgcctcatgtaaagactcttgcacgcagagcctttaagtgactaaggaacaacatagatagtgagcatagtccccacctccacccctcacaatttatttgaatacttcaattgtgcctctcaattttttgtaatgctaaaaaatcagtatctagatggtttttaaatgtattctctggaaattgttttatgtaaaataaatgttacttaattccattaaaaaaaaaa

SEQ ID NO: 52 - DNA, 2047 bp, Homo sapiens
ttttttttttttggtagaaatgattgtgatgtacaaattttttatttgatcatacttaaaaagacagagcagaatcacattcattttcttaatagtatcactgtaaacatagcgaattttggcgcttttagattgctctgaaaatttctgaagagttgaccatagcagcctggtaagccttttcctttcccccaaagctctcctgccctttgcagaaagactgttggtgacaactgatgctaactaaatagcatgtggttgagcttgccaaatccttccacctcctcccataggcaacagggtgacttggcttaaaggcattgagtaagcaagtaggttatcagagaacagagggaagattccattgtagataatttccaaatattacaattgatgaactcagagttcaactgctcagttccttcttctgctgacctgatacagatataatcacaatggatctcagatctttggtccatttagacatcagggtaatgtactcagttcctttaattaaaatgtgttggaaaagccatctctgggtggagaagagaagttcgttgattatagtgatggtactataagagaaaaactgaagcaggaaaacagtgagcagcgcctctttcttcttgcactcaaatgattacttcactcctgtcagctttatagtccaagcaaactctgcggggacagcagagggtggcaactggggtagagagatgaagagacctttatctggatctgtggaccacttcagatctccttgaattcccagcattgttatctttgtagttgaggtagttatgggggattcaaggtttaagactccattttctggccagtgcagaaaaatggcataaacagccgatccctttgaggtataccatacagatgttgtgttcttttcccattgcacccgccatggtttggaggcatagatagcctccccattgatgctcagccatttcccaacagcaagaagcctttcttggaagatgggaacaatcagtccatctttagttggtccaatgttcagaagatagttgcctcccaaacttactgtctgaaccagttccgaaatgatttcagattcttctgtaacatcagacaatgccatgtcacgacgatagccccaggaaaacttgtcaatgctggtgcacatctcccacttgtgatctggcaagctctgtggcttgaatttatcttcacagttatagtatcctccatggtgacaggaagagttctgaccccatcggtcatttactaccacctcatccttgacagggctgtcattgtagagccatgaaagaaaatttgtggagttccagtaagtatcaggacattcccactccccatcagaccagatcagatcaggtttatagctgttaacaaggtcgtacagctctggcattgtttttgcactgacaaaatgctgtgttttgaagccatttttcttatcaagtagatagagtggatggaaccactctaagagtgagtggtatagtccatagcggatgttcctcttccggagagctgttcccaattcaccaaccaaatcccgatgaggccccacgtctttggagttccagttccaagacacaggactcggccagtttgtgaagccttcgtgatgctttgtcgtcaaaactacatacttggcgcccgcggcctggaagaggtcggcccactcctccgggtggaagaagcgcgcagtgaactgcggtccgaagtcggcgtagctgaagccgggcgggtagttgtcgcgcatgaagcgctggtactgcggccgcccctcgccctgccagtgccaccagaaccactcgctgccccaggcgggcaccgagaacacgccccagtggatgaacaccccgaacttggcttcgtcgaaccaggccggcagcggccgagaatccaggctcggccagtctggggtgtagcggcgcggaggctgggcccgacgcaccgactcggccgctccgaggaagagcagcagcagcaacagcgcgggacccgccggccgcgacctcatccccggagcccggaattc

SEQ ID NO: 53 - DNA, 2350 bp, Homo sapiens
ggcacgaggcccagttgttgatcttatgcaagacgctgcacgaccccgcgcccgcttgtcgccacggcacttgaggcagccggagatactctgagttactcggagcccgacgcctgagggtgagatgaacgcgctggcctccctaaccgtccggacctgtgatcgcttctggcagaccgaaccggcgctcctgcccccggggtgacgcgcagctcccagccgcccagacacatggccccaggccaagcaccccatcaggctaccccgtggagggatgcccaccctttcttcctcctgtccccagtgatgggcctcctcagccgcgcctggagccgcctgaggggcctgggacctctagagccctggctggtggaagcagtaaaaggagcagctctggtagaagctggcctggagggagaagctaggactcctctggcaatcccccataccccttggggcagacgccctgaagaggaggctgaagacagtggaggccctggagaggacagagaaacactggggctgaaaaccagcagttcccttcctgaagcctggggacttttggatgatgatgatggcatgtatggtgagcgagaggcaaccagtgtccctagagggcagggaagtcaatttgcagatggccagcgtgctcccctgtctcccagccttctgataaggacactgcaaggttctgataagaacccaggggaggagaaagccgaggaagagggagttgctgaagaggagggagttaacaagttctcttatccaccatcacaccgggagtgttgtccagccgtggaggaggaggacgatgaagaagctgtaaagaaagaagctcacagaacctctacttctgccttgtctccaggatccaagcccagcacttgggtgtcttgcccaggggaggaagagaatcaagccacggaggataaaagaacagaaagaagtaaaggagccaggaagacctccgtgtccccccgatcttcaggctccgaccccaggtcctgggagtatcgttcaggagaggcgtccgaggagaaggaggaaaaggcacacaaagaaactgggaaaggagaagctgccccagggccgcaatcctcagccccagcccagaggccccagctcaagtcctggtggtgccaacccagtgatgaagaggagggtgaggtcaaggctttgggggcagctgagaaggatggagaagctgagtgtcctccctgcatccccccaccaagtgccttcctgaaggcctgggtgtattggccaggagaggacacagaggaagaggaagatgaggaagaagatgaggacagtgactctggatcagatgaggaagagggagaagctgaggcttcctcttccactcctgctacaggtgtcttcttgaagtcctgggtctatcagccaggagaggacacagaggaggaggaagatgaggacagtgatacaggatcagccgaggatgaaagagaagctgagacttctgcttccacaccccctgcaagtgctttcttgaaggcctgggtgtatcggccaggagaggacacggaggaggaggaagatgaggatgtggatagtgaggataaggaagatgattcagaagcagccttgggagaagctgagtcagacccacatccctcccacccggaccagagggcccacttcaggggctggggatatcgacctggaaaagagacagaggaagaggaagctgctgaggactggggagaagctgagccctgccccttccgagtggccatctatgtacctggagagaagccaccgcctccctgggctcctcctaggctgcccctccgactgcaaaggcggctcaagcgcccagaaacccctactcatgatccggaccctgagactcccctaaaggccagaaaggtgcgcttctccgagaaggtcactgtccatttcctggctgtctgggcagggccggcccaggccgcccgccagggcccctgggagcagcttgctcgggatcgcagccgcttcgcacgccgcatcacccaggcccaggaggagctgagcccctgcctcacccctgctgcccgggccagagcctgggcacgcctcaggaacccacctttagcccccatccctgccctcacccagaccttgccttcctcctctgtcccttcgtccccagtccagaccacgcccttgagccaagctgtggccacaccttcccgctcgtctgctgctgcagcggctgccctggacctcagtgggaggcgtggctgagaccaactggtttgcctataatttattaactatttattttttctaagtgtgggtttatataaggaataaagccttttgatttgtaaaaaaaaaa

SEQ ID NO: 54 - DNA, 370 bp, Homo sapiens
accgtaccggaattcccgggtcgacgatttcgtaccacacagcgtcctgtagcaggctcacctagtccgaaagcttccagcgtcccggatgtccctgtaccgcgacgtattactgctctgcctgccctggcttctagaggctggtgccgtccaacccgctccgctatccagggtttttgaccacgctatgctccaagcccatcgcgcgcaccagctggccattgtgacctacccggagtttgcagatacctatatcccaaagcaccagaaggattcattcctgcatgactcccagacgtccttctgcttctcagactctattccgacactctccaagatgcaggagacgctacagacatccaatctagag

SEQ ID NO: 55 - DNA, 2736 bp, Homo sapiens
gcgagacgaaggtgcgcaggccgatgcccgagagcgggatgatgaccgtgaagacgagccagccggcgatgagggtgaaggccacccagcgccacttgcccagcggcaccgcttctggcgcgcgcccttgcccttgatggcgacgaacttgttggccgagcgcacgagccagcgctgcagcatcaccagcggcatggtcaccgccaccaggcacacggccaccgccgccatcaggtgatacgaaggcgtacccagcttgttggtgagcttgtagagataggtcggcagcaccaggtggccttccggatcacccagcaccagcaccaggccgaacacttcaaagccgaggaagaacaccagcacgccggagtaggccagcgccggggtgatcatcggcagcgacacgttcaacgccacctgcagcggcgaacgaccggccacgcgggccgcttcttccacatccgaacccaggctgcgcagggccgccgaggcatacaggtagacgtgcggcacgtgggtcaggccggcgatgatgacgatgctggtgaaggaatagatgttccacgggtcgccctcgaaaccgacgaccgacagcaggttcttgacccacaccgtgtagaagccgaccggccccatcgagaccacgtagccgaagccgatcaccagtgggcgagacgaagatgggcaccatcagtggcgggggcggatcgaacgctgcgacccggcaggtcggctgcgcaccatcaggaaggccaagcactcggccgagcggcacggcgatcagggccaggccggtcgccagcgtcaagccgattgacgaaggcctggcggaagtccgggtcatcgaagatgaagcgataggaatcgaaggtgagcgtcttgaccggcgcaaagaacggcgccgacaggaagctttgatagaagatcagcagcagcggcagcgaagatggccagggctgccagcagcacgaccaggccgcgcggccagttcagccggaatcggcgggcggcagggcttgctcgcgcgcggcacgttgtggtggctgagcagcggcttggtgcgctcgtctagcgggcgacggaatcagacggacgtggacgcccccggagtggaagccgaagcaggagttgttgttgctgaggggctgccgcagccgccgcgagcctccggacagacgccagagcgaggagggcgctacgcgacttggcaagatgacccagttcctgccgcccaaccttctggccctctttgccccccgtgaccctattccatacctgccacccctggagaaactgccacatgaaaaacaccacaatcaaccttattgtggcattgcgccgtacattcgagagtttgaggaccctcgagatgcccctcctccaactcgtgctgaaacccgagaggagcgcatggagaggaaaagacgggaaaagattgagcggcgacagcaagaagtggagacagagcttaaaatgtgggaccctcacaatgatcccaatgctcagggggatgccttcaagactctcttcgtggcgagagtgaattatgacacaacagaatccaagctccggagagagtttgaggtgtacggacctatcaaaagaatacacatggtctacagtaagcggtcaggaaagccccgtggctatgccttcatcgagtacgaacacgagcgagacatgcactccgcttacaaacacgcagatggcaagaagattgatggcaggagggtccttgtggacgtggagaggggccgaaccgtgaagggctggaggccccggcggctaggaggaggcctcggtggtaccagaagaggaggggctgatgtgaacatccggcattcaggccgcgatgacacctcccgctacgatgagaggcccggcccctccccgcttccgcacagggaccgggaccgggaccgtgagcgggagcgcagagagcggagccgggagcgagacaaggagcgagaacggcgacgctcccgctcccgggaccggcggaggcgctcacggagtcgcgacaaggaggagcggaggcgctccagggagcggagcaaggacaaggaccgggaccggaagcggcgaagcagccggagtcgggagcgggcccggcgggagcgggagcgcaaggaggagctgcgtggcggcggtggcgacatggcggagccctccgaggcgggtgacgcgccccctgatgatgggcctccaggggagctcgggcctgacggccctgacggtccagaggaaaagggccgggatcgtgaccgggagcgacggcggagccaccggagcgagcgcgagcggcgccgggaccgggatcgtgaccgtgaccgtgaccgcgagcacaaacggggggagcggggcagtgagcggggcagggatgaggcccgaggtgggggcggtggccaggacaacgggctggagggtctgggcaacgacagccgagacatgtacatggagtctgagggcggcgacggctacctggctccggagaatgggtatttgatggaggctgcgccggagtgaagaggtcgtcctctccatctgctgtgtttggacgcgttcctgcccagccccttgctgtcatcccctcccccaaccttggccacttgagtttgtcctccaagggtaggtgtctcatttgttctggccccttgggatttaaaaataaaattaatttcctgttaaaaacaaaaacaaaaacaaaaaaaaaaggggggggggtcaagagtttca

SEQ ID NO: 56 - DNA, 4299 bp, Homo sapiens
atttatgctctcagccttgtgttgtcaatttggaagcagttgtttcatctgagttcagaagtagcattcccgtgtacaaaaaaaggtggaagaatgagaaacatcttcacaccagcaggacacaaatagtacatgtgaaatttccaagcattatggtttacagagatgattatttcatcagacattccatctctgtatctgcagtgatagtacgcgcctggattactcacaaatacagtggcagagactggaatgttaaatgggaggaaaacttgctccatgctgtagcaaagaattataccctcctgcagaccatcccgccttttgaacgccctttcaaagatcatcaagtgtgccttgagtggaacatgggttatatttggaaccttcgggcaaacaggattccacagtgtcctctggaaaatgatgtggttgccctgcttggctttccttatgcctccagtggagaaaacacaggcattgtcaagaagttcccgaggtttcggaaccgagagctggaggccactcgacgccagaggatggattacccagtgtttactgtttcattgtggctttatttactccattattgcaaggccaacctctgtgggattctgtactttgttgactctaatgagatgtacggcacaccttctgtatttcttacggaagagggctatttgcatattcagatgcatcttgtcaaaggggaagaccttgctgtaaaaactaaattcatcatacctttgaaggagtggtttcgactggatatctcttttaacggaggccagatagtagtaaccactagcattggacaggatttgaaaagctaccacaatcagaccattagcttccgggaggatttccattataatgacacagctgggtacttcattattggagggagcaggtatgtggctggcattgaagggttttttggacccctgaagtactatcgccttcgcagtctgcaccccgcccagatttttaatcccctccttgagaagcaacttgctgaacaaatcaagttatattatgaaaggtgtgctgaggttcaagaaatagtatctgtgtatgcatctgcagcaaagcacgggggcgagagacaagaagcatgccacctccacaactcctacctggacctccagcgcaggtatgggagaccctcgatgtgcagagccttcccctgggagaaggagctgaaagacaaacaccccagcttgttccaggcattgctggagatggatctgctgaccgtgccaaggaaccaaaatgaatctgtatcagaaatcggtgggaagatatttgagaaggctgtaaagagactctctagcattgatggtcttcaccaaattagctctatcgtcccctttctgacggattccagctgctgtggataccataaagcatcctactaccttgcagtcttttatgagactggattaaatgttcctcgggatcagctgcagggcatgttgtatagtttggttggaggccaggggagtgagaggctgtcttcaatgaatcttgggtataaacactaccagggtattgacaactaccccctggactgggaactgtcgtatgcctactacagcaacattgccaccaagacaccccttgaccagcacacactgcaaggagatcaggcatatgttgaaacaattagactaaaagatgatgaaatactcaaggtacaaaccaaagaagatggagatgtctttatgtggttgaagcatgaagctacccgaggcaatgcagcagctcagcaacgattggcccagatgctgttctgggggcagcaaggtgtggccaagaatcccgaagcagcaattgagtggtacgccaagggcgccctggagacggaggatcctgcgttaatctatgactatgccattgtgctattcaagggtcaaggagtaaaaaagaacagacggcttgccttagagctgatgaagaaagcagcttccaagggattgcatcaggcagtcaatggcctgggatggtattaccacaaattcaagaaaaattacgccaaagcagcaaagtactggttaaaagcagaagaaatggggaacccagatgcgtcatacaatcttggagtcctgcatttggatggcatcttccctggagttcctggaaggaatcaaactttagctggtgaatatttccataaggctgcgcaaggtggacacatggaagggaccttgtggtgttctctctactatatcacaggcaacctggagacattccctagagatcctgagaaagctgttgtatgggcaaaacatgtagctgagaaaaatggctacttgggccatgtcatccgcaaaggcctcaatgcctacctggaaggttcatggcatgaagctttgctgtattatgttttagcagcagaaactggaattgaagtgtcacagacaaatttagcacacatctgtgaggagaggccagacctggccaggagatacttgggtgttaactgtgtttggagatactataatttctctgtttttcaaatcgatgctccttcctttgcatatttgaagatgggagacctttactactatggccaccaaaaccagtcacaagacctggagttgtctgtgcagatgtacgcccaagccgccctggatggagactcccagggattttttaacctggccctgctaatcgaggaaggtacgataatcccacaccatatcttggatttcttggaaattgactcaactctccattctaataacatctccattctccaggaactgtacgaaaggtgctggagccacagtaacgaggagtccttcagcccctgctccttggcctggctttacctgcacttgcggcttctctggggtgctatcctgcactcagccctgatctactttctgggaacctttctgctatccatattgatcgcctggactgtgcagtatttccagtctgtctcagcaagcgatccccctccaagaccatcccaggcctccccagacactgccacgtccactgcaagtccagctgtgactccagctgcagatgcctctgaccaagaccagcccacagtaactaataacccggagccacgtgggtgaactgtgcactccagttctctccagatgagagagaatcttttcaacagctggtattgggaagctggggccagggcatgatcctgataaacaccttaaatgtcttgtcaactggatgcaaattttgcaattggtgtcattttttttaaagtcaaattacaaggaagtacccagatcaggcagtggtaataccaaaggtcatcaaacacatacaaggaacatcttgatcatagggcatgtggggaagtttactgggccatcacagacttttgttctagtgattgtatgtattaggagtcatagcatgccctacggcagatctggattcttatacactaagatgtgtcttaagaatcacagtgcgtgcttcatccctttattgaagaacagaaaattatgactactctacaaggtggataatattttggtacctgtgcttgccacagccctgttcctcaaagctgaattgatagatttctctttgacttccaagacctagcagttataaggcaccttgaaataaattgtttgtgcctggaaatgcagggagggcaatagctttgtaaattggtttacatttttctccttgaatttttctagggtcctagtgcttccgaatcatttaatggcattgtcggatatcttttacatttcaattgcaatccatgaaattacatttagaagattcttagtacttaactgtagtcttctccatgaattacacgttagaatagactggcagcaacggaatatgcagcaagtaagcctctagcttatagtttcatccctacccctcatgcctgcgtgagtctgtacagggatatgtgtgtgtgtgtgtgtgtgtgtgtgttagagaggaagaggaagagcagaatgtctgtatactacatgctgctaaggtagtgaataaatcagtaatgcaatattgtgggtccaaactactctttgcactactttatttacagtagtaatacattcttttatacaaaaaaaaaaaggggggggttaaataccctgagggccaagtttagcgtaccgtttttgtcaagggcccaagggggaataaagaaggcatggcggttaaagtggagggaaaggcatggattgggaggagccttcgggggattggacacaccgagtaggcgggtaattagttaggacacgcttgggaatgttgttaactaataagcgggggatgtaattaataaag

SEQ ID NO: 57 - DNA, 1398 bp, Homo sapiens
cacagttacctctcccctttcacgtagttttcatttgtggtgagattctctcccaggccacaagacatttcctgctcggaaccttgtttactaatttccactgcttttaaggccctgcactgaaaatgcaagctcaggcgccggtggtcgttgtgacccaacctggagtcggtcccggtccggccccccagaactccaactggcagacaggcatgtgtgactgtttcagcgactgcggagtctgtctctgtggcacattttgtttcccgtgccttgggtgtcaagttgcagctgatatgaatgaatgctgtctgtgtggaacaagcgtcgcaatgaggactctctacaggacccgatatggcatccctggatctatttgtgatgactatatggcaactctttgctgtcctcattgtactctttgccaaatcaagagagatatcaacagaaggagagccatgcgtactttctaaaaactgatggtgaaaagctcttaccgaagcaacaaaattcagcagacacctcttcagcttgagttcttcaccatcttttgcaactgaaatatgatggatatgcttaagtacaactgatggcatgaaaaaaatcaaatttttgatttattataaatgaatgttgtccctgaacttagctaaatggtgcaacttagtttctccttgctttcatattatcgaatttcctggcttataaactttttaaattacatttgaaatataaaccaaatgaaatattttactgataagattcttcatgcttctttgctctccttaaaatgtctttttcactagttagttccaagggtcagtctcataattttgttcttatactttgatttcctttttcttttttttttttttaatagagttgggggatctttctttcttttttttttttttttttttgagatagagtctcgctctgttgcccaggctggagtgcagtggcgtgatctcagctcactgcaacctccacctcctggatacaagcgattctgctgcctcagtctcccgagtagctgggattacaggttcccgccaccatgcccagctaatttttgtatttttagtagagacggggtttcaccatcttggtcaggctggtctcgaactcctgacctcgtgatccacctgcctcggcatcacaaaatgctgggattacaggcatgagccaccgcgtccagcctagagttgggggtctttctatgttgcccaggctggtcttgaactccgggcctctagcaagcctctcatctcagcctcccaaggtgctggaattacaggtgtgagccactgcaccatactttggtttcttagcaggagattttggttcacagtaacccagctctctttcatctaagaactttagatgagaaaaaaaaaa

SEQ ID NO: 58 - DNA, 765 bp, Homo sapiens
ttttttttttttaacttgtattaaacacatgtttatttacaacgtggagagagaataaggggcagttaaggccactttctcctgtgaaacactgcaaaatatgtacataagtacaacctaatataggcaaaggttctaaaaatcatctttcttggcttcacgtaattgagtatcagtcggggagtggagagcggctgccgatagcaccaggccatgccaggccacgccaacaagggcgtgtgcattcactttttcattgagctgccctcagagctgctgccgagctgagccctgcacgggcccaggtgtgcgccgcaccccagaccggtctgaagcacgtgtcaccggtccctcagttccatttccaaatccaccaaggtccagtcgacagacatttccaaaaagaatcctgttctaggaccacttgcgctgagagcacacccgggggtcaaagggcagccaccgggggtcaaagggcagccatcaggtactccccagggaagggcttgcggccaccagtcactgcaaccccgcctcacctccgatgcctgctgtgcccagggtggtcccgctcatagcgacggccctgtgcgttcatacgacctcgagcgctctcggtcgctgatctctgtagtaatgacttttcttcttgtattttcccggatatcccgccgctcccgtgacctgcttcgagaaccggaagaactccgcttccgagaactgcgtggctttctggggtacttgagttcttggcttccgggagcc

SEQ ID NO: 59 - DNA, 4243 bp, Homo sapiens
ttttttttttttgggggttttaccagttttattttctagactttcatgtttgtctttttgtcttctgctggaaacatgccggttacatgttggtgctgggaagcgccgcggtgcaaccagaaatgcacagacccagccgcccgccgcccagaccctcagacttgcgcgtcacaggacagactccgctgtgccccgtgcacttgccaccagcctttggcctctcgatacacacaacatccaggacttgtgcccttgccccatcacgacagacaaagcgtccctcaaggcccccgcgtggttcagacagacgccgcagccaggatggttgaggtaagcgtgagccgtgttctggaggggtggggcggggtgggcctgtgcccgagatggcctccgagcacaggatgaccctgccagggcagggccccaaccacgtgggcccgcagcggggtgcaaattcttttggttcggcagcttgctaggtgaccggggcacacagcactgtgagctggcttcattgagatttggagtctctttaaattagcattatggtgtaattaacaaaacaataacaaacagaacactagtacataacagattaaacatacccaaaacttgaacaaattccagaagctattccaatcatcccgaatgagagtcctacaggtacaacgccgtggtggcacgtaagacacacttgttataataataataataataattatgcaacttccatagctacacgcaaagaataacacagctgtaaaaactactatgatgctacgcccccgatcagatgaagtgcccagcatcacaggcgcagggaagagaagagggacacagcctggtctctggggacaccggcgcggttctcacgcacgcggcctcggggccggcccccgccagcctgtgtgggatcgcgcccgcgtgtctgcccgccaaagcaggcagaacctgcccgctgggtccacccatggctaagtgaagcatgaggtattgtgaaacagcaacctttttggaatagagcagtaatcacattaagtcaaaattgatcacataaaaaaaaaaaaaactacaaaaaaggcatctgtaatacaatgttctaagagaaaactaaaactagtacatggcagtatatgacattgtaaaacaaaaaactgatcctccaatagcagcaaacaatgtgaaagagatacacagaagcgatgtgaatatttccaaaccgtgcctggaagtcaacggtagcagcgcaataagaaaatggagctgcggcctgtccccggtgtgggcaccgccccttcccctcgggagcctcctcctcacacctcctcccgcctgtcctccctcacacgtcagcctccacactcttgccacctcccttcaacacttcctaaataaaaattacaagaattacatagccaagatgtgcaaattgtctattttgtcactaagttttttaaaggaaggggcaggggataagaattcatcggaaccgaacttaggttgagtaccctaattttccttgcacccatgcctgtccaatcagatgactctgggaaacgccaaacaggctgaatcaatgtctttgtgtggtttttttcttccagattgtttttttctcacctataaaaggatctatctttaaaaataaactgtattaaatctgtaacatcaaaggcagaaggtttgtgtgtgtgtgtgtgtgtgtgtgtgtatctgtgtgtttaaatcaaggggagattgcatttataaatcatactggccttatgaacatcctctgcaataaatatactttttagccttaactataaattatatattttagtgtttaaaaaccttccggtgtgaaacatctaagataacccttaaaaaccacctgttctctaggtaaacctctgaggtccctactttcaaacaccagttggcaccaaaggattcctaaacttcaacttctttaaagaaaaggaaaggaacttatcatcctggcaatgtgagaatgcaaacctttttcttcttgactggcacgcagcctcccaaacaccccacctccactgccaccacagtggcccacacttgcctcaaagtcctgcttgcaaacaagtacatggatattcccaaaccattccattagaaaactgccctccctgcacacacaacaaaaacagcgctatttcctacacctattggactgaaagtgcttggaaatggaatggttttagaatatgaagaagaacacaaaccaagtagctgtgggttgaacctggacgtgagctggctgcagggccgttgggtagaaaaccagcatctcataaacaggtcactacaaaaataggaagagtataaaaatagaatatattatgtcactatttcgtcttctctttatagtagcgtatcgtaggagtgggacaggtggcctttcccgaccctgctacgctggctggtgcccgacaaacctccactggatggtttgtcactggatggtttgttggggtggtggtcacaggcgcaaaggacatgcacacggccacgctacgctactgtaaccaagaggtgacttcagccatgaataaggtgaagaggttacacatctacctacggaatataataacatacaatgacttataaagtgactacatgcatatgagcaagcaaagtacagagatgcctagaaccccactacagctgtgctttatcaggaaaagcacaagaatatgtttttctacctaaaaccctcttctactttaaaaatggtttgctgaatttttctatgtttttaaaatgtttttatgcttttttttaaacacgtaaaggatggaacctaatcctctcccgagacgcctcctttgtgttaatgcctattcttacaacagagaaacaagtacattaatataaaaacgagttgattattggggtataaaatcctctatcatctgtagcacaaccctcctcccccaccgctcagggttatgcaaatactattttttttttctctctctctcttttaaagacagtttttgggtaatctttttcttttgcttaagtcagagatggaagggggaaagagcaaaggaaaaaacaaccaacaacaaggagaatgaagctttcccttctggtatcaaaatgctccggagaggagggactgtcagtggagcacctggggccggctccgccctcgctgcgggtggcggtggcgcccgcctgcctggcgccctcagatgtccacgtcccgcacgtcggtgggtgtgcaagccaggtccacctcctcctcctcctcttcctcctcctcggcggccttggggtccatgttctgctgggcctggcgcaggcttgactccagcagggcttcgatctgctcctggcaggcccggaggcagtctgggtcacacttgatcactctggagaggaagcgtgtgaggcggtagtaggacaggaagttgttggggctcctcaggttcaggccttgcactgcggccaccacgctccccgctgccaccatggagggcggattggaaatgaacttcacatctgtggcacagagggcaacgaaggtctgcgcgtgtttgcggatgatctgtttgttctcctccgcctctggcattttggagaggaagtgttcaatgaaatcgtgcggggtcattgcggccaggttccacttgagcttgttcaccaggagcagctccatttgcagcagctcctcgggccggatggagttgtcggtgtagatgcacagcttctcggccgtcagggggatggtctccttcatcttagaggccacgaacatgcaagtggcccccagcagctgcaggcggctctttttcacgggctccagcgacaggaagcggtccaggtagttcatggccagcgggaagacctcctcctcgcacttctgttcctcgcagacctccagcatccaggtggcgacgatcttccgcatggacggcaggacctccttctgcacacatttgaagtaggacaccgagggcgcgcaggtctcctccgccttcagcatggcccgcagcacccggtcgttgaggaggttggcatcggggtacgcgcggcggatggtttccacttcgcagcacaggagctggtgttccatggctggggctcttcctgggcagctggggagggctgtgggtcctggctgggtccgcgctcggctctcgcttctgctgccccgcgctccctcgcgctcttctgcccctcgccggagcgtgcggactctgctgctcgctgctactgcgcc

SEQ ID NO: 60 - DNA, 4216 bp, Homo sapiens
gctgggagcaaagcgctgagggagctcggtacgccgccgcctcgcacccgcagcctcgcgcccgccgccgcccgtccccagagaaccatggagtctggcagtaccgccgccagtgaggaggcacgcagccttcgagaatgtgagctctacgtccagaagcataacattcaagcgctgctcaaagattctattgtgcagttgtgcactgctcgacctgagagacccatggcattcctcagggaatactttgagaggttggagaaggaggaggcaaaacagattcagaatctgcagaaagcaggcactcgtacagactcaagggaggatgagatttctcctcctccacccaacccagtggttaaaggtaggaggcgacgaggtgctatcagcgctgaggtctacacggaggaagatgcggcatcctatgttagaaaggttataccaaaagattacaagacaatggccgctttagccaaagccattgaaaagaatgtgctgttttcacatcttgatgataatgagagaagtgatatttttgatgccatgttttcggtctcctttatcgcaggagagactgtgattcagcaaggtgatgaaggggataacttctatgtgattgatcaaggagagacggatgtctatgttaacaatgaatgggcaaccagtgttggggaaggagggagctttggagaacttgctttgatttatggaacaccgagagcagccactgtcaaagcaaagacaaatgtgaaattgtggggcatcgaccgagacagctatagaagaatcctcatgggaagcacactgagaaagcggaagatgtatgaggaattccttagtaaagtctctattttagagtctctggacaagtgggaacgtcttacggtagctgatgcattggaaccagtgcagtttgaagatgggcagaagattgtggtgcagggagaaccaggggatgagttcttcattattttagaggggtcagctgctgtgctacaacgtcggtcagaaaatgaagagtttgttgaagtgggaagattggggccttctgattattttggtgaaattgcactactgatgaatcgtcctcgtgctgccacagttgttgctcgtggccccttgaagtgcgttaagctggaccgacctagatttgaacgtgttcttggcccatgctcagacatcctcaaacgaaacatccagcagtacaacagttttgtgtcactgtctgtctgaaatctgcctcctgtgcctcccttttctcctctccccaatccatgcttcactcatgcaaactgctttattttccctacttgcagcgccaagtggccactggcatcgcagcttcctgtctgtttatatattgaaagttgcttttattgcaccattttcaatttggagcattaactaaatgctcatacacagttaaataaatagaaagagttctatggagactttgctgttactgcttctctttgtgcagtgttagtattcaccctgggcagtgagtgccatgctttttggtgagggcagatccagcacctattgaattaccatagagtaatgatgtaacagtgcaagatttttttttttaagtgacataattgtccagttataagcgtatttagactgtggccatatatgctgtatttctttgtagaataaatggtttctcattaaactctaaagattagggaaatggatatagaaaatcttagtatagtagaaagacatctgcctgtaattaaactagtttaagggtggaaaaatgaaaatttttgctaattatcaatgggatatgattggttcagttttttttttccagagttgttgtttgccaagctaatctgcctggtttatttatatcttgttattaatgtttcttctccaattctgaaatacttttgagtatggctatctatacctgccttttaagtttgaaactaactcatagatgcaaatattggttagtatttaactacatctgcctcggctcacaaattccgattagacctttatccagctagtgccaaataattgatcagatgctgaattgagaataagaatttgaggtctacattcttggttgttaatttagagcgtttggttaaagtatgtccttcagctgactccagtataatctcctctgctcattaaactgattccaggagattggatttgctgtgactagatacagatggagcaaatgtcctaacagagaaatagaggtgatgctgctaaagggagaaatgccaggcggacaaagttcagtgtcgggaattttccccgtgacattcactggggcatgagattttggaagaagttttttactttggtttagtctttttttcctcctttttattcagctagaatttctggtgggttgatggtagggtataatgtgtctgtgttgcttcaaattggtctgaawaggctatcctgctgaaagtcctgctttcctatctagcatttatttctctggcaaacttttctttcttttcttttttaaagtaaacttgtgtattgagtcttaactgtatttcagtattttccagccttatgtgttacattattccaatgatacccaacagtttatttttattatttttttaaacaaaatttcacagttctgtaatgtaggcacttttattttcattgtgatttatatataaggtaatgtagggttatatttgggagtgactgcaagcatttttccatctgtgtgcaactaactgactctgttattgatcccttctcctgccctttcccaggtaatttaaattggtcatggtagatttttttcatagatttgaaaaacttttaggttgttaccaagtatgaagtataaatctggggaagaggttttatttacattttagggtgggtaagaaagccaccttgttacaaattttttaatttccaaaataatctatattaaatgagggtttctgatctgtactttgtgtttagctacctttttatatttaaaaaattaaaaatgaaaattacgttcttacaagcttaaagcttgatttgatctttgtttaaatgccaaaatgtacttaaatgagttacttagaatgccataaaattgcagtttcatgtatgtatataatcatgctcatgtatatttagttacgtataatgctttctgagtgagttttactcttaaatcatttggttaaatcatttggcttgctgtttactcccttctgtagtttttaattaaaaactttaaagataagtctacattaaacaatgatcacatctaaagctttatctttgtgtaatctaagtatatgtgagaaatcagaattggcataatttgtcttagttgatattcaaggctttaaaagtcattattcctgggcttggtaagtgaatttatgagatttactgctctagaaagtatagatggccaaaggaccgtttgtattgcttcctgattaccagtctgattataccatgtgtgctaatatactttttttgttatagattgtcttaatggtaggtcaagtaataaaaagagatgaaataatttaaattcttaaatgaatcagtttttcttccctttctcctttccgtctttcctctctctgtccttccccgaaagtctactcgggtgggcaaaaatgaaaagggggaaagtgaattatgggatcggtgttttgaaagagcaatgtttattttcagtgcttttcagtttgtcaaagagtggatctcaaaatcttgcttaaagggtaattgagatgtagcagatttatttacttagtcatggaaagaaaaaaattcagtcaaaagctaaagatttccttttgattgaagacagattggttctgtggccttggaactttcccagacttaatggggaaacatcatttctagattagcatactctttggtttaaatttaatatatacatttaatgttacttagggatacttttatattttgcatatataaagcctcatatataaagccttatttctgatgctcttagatttctgaggagtgagatgattaagttgtattcattagtgtattggtatttcttcacatccagtgaaattggagatatgttgtatgttagaagagcattctttaaattgtgttgctttgaacatgtgtaccttttctagattcagtaatcccttccccccgtcctctggagtatgaaacctttagagtcacaataaaatgtaactaaagaaaaaaaaaa

SEQ ID NO: 61 - DNA, 900 bp, Homo sapiens
gagaggcctcttattagggctctggtggcggcggcggcggacccttggggtctggacgcgacggcggcgggagcatgaacgcccctccagccttcgagtcgttcttgctcttcgagggcgagaagaagatcaccattaacaaggacaccaaggtacccaatgcctgtttattcaccatcaacaaagaagaccacacactgggaaacatcattaaatcacaactcctaaaagacccgcaagtgctatttgctggctacaaagtcccccaccccttggagcacaagatcatcatccgagtgcagaccacgccggactacagcccccaggaagcctttaccaacgccatcaccgacctcatcagtgagctgtccctgctggaggagcgctttcgggtggccataaaagacaagcaggaaggaattgagtaggggccagagggggctctgctcggcctgtgagccccgttcctacctgtgcctgaccctccgctccaggtaccacaccgaggagagcggccggtcccagccatggcccgccttgtggccacccctcaccctgacaccgacgtgtcctgtacatagattaggttttatattcctaataaagtatagcggaagagaaaaaaaaacaacacatcagaaagacaacaatagtataaacgaatagactacaagaatcacacaatgcacgaactacaataaacaaaaaagaacagggggggggggcgtgaaagaataattctcctcgagagaggggacaaaattatgttgcgacccccaaccgtttttgtgacaagggggccccaattgaggggccatttaataaaagagagcagcgcgagagttaataaaaagtatagtggaggaacaagagtaagggattcttggaaaagaccctttg

SEQ ID NO: 62 - DNA, 5796 bp, Homo sapiens
aacatttttgaaagatcactcagctttaacacaccttggctgggtctggataaaaaaaaagtgagcactgcaaatttctagaagaaaacatcaggagaagaaagagagagggggatttattcaaagttgtttccaattccttcaaaacctcaaaccaggtggctatggtatggatgtaaccaagaaaaacaaacgagatggaactgaagtcactgagagaattgtcactgaaacagtaaccacaagacttacatccttaccaccaaaaggcgggaccagcaatggctatgctaaaacagcctctcttggtggagggagccggctggagaaacaaagcctgactcatggcagcagcggctacataaactcaactggaagcacacgaggccatgcctccacctctagttacaggagggctcactcacctgcctccactctgcccaactccccaggctcaacctttgaaaggaaaactcacgttacccgccatgcgtatgaagggagctccagtggcaactcttctccggagtaccctcggaaggaatttgcatcttcttcaaccagaggacggagtcaaacacgagagagtgaaattcgagttcgactgcagagtgcgtccccatccacccgatggacagaattggatgatgttaagcgtttgctcaaggggagtcgatcggcaagtgtgagccccacccggaattcctccaacacactccccatccccaagaaaggcactgtggagaccaaaattgtgacagcgagctcccagtcggtgtcaggcacctacgatgcaacgatcctggatgccaaccttccctcccatgtgtggtcctccaccctgcccgcggggtcctccatggggacctatcacaacaacatgacaacccagagctcatccctcctcaacaccaatgcctactctgcgggatcagtcttcggagttccaaacaacatggcgtcctgctcacccactttgcaccctggactcagcacatcctcctcagtgtttggcatgcagaacaatctggcccccagcttgaccaccctgtcccatggcaccaccaccacttccacagcatatggggtgaagaaaaacatgccccagagtcctgcggctgtgaacactggcgtttccacctccgccgcctgcaccacaagtgtgcagagcgatgaccttttgcacaaggactgcaagttcctgatcctagagaaagacaacacacctgctaagaaggagatggagctgctcatcatgaccaaggacagcgggaaggtctttacagcctcccctgccagcatcgctgcaacttctttttcagaagacaccctaaaaaaagaaaagcaagctgcctacaatgctgactcaggcctaaaagccgaagctaatggagacctgaagactgtgtccacaaagggcaagaccaccactgcagatatccacagctacagcagcagtggtggtggtggcagtggaggaggtggcggtgttggtggcgctggcggcggcccttggggaccagcgccagcctggtgcccctgcggctcctgctgcagctggtggaagtggctgctgggcctgctgctcacctggctgctactcctggggctgctcttcggcctcattgctctggcggaggaggtgaggaagctgaaggcgcgtgtggatgagctggagaggatcaggaggagcatactgccctatggggacagcatggatagaatagaaaaggaccgcctccagggcatggcacccgcggcgggagcagacctggacaaaattgggctgcacagtgacagccaggaggagctctggatgttcgtgaggaagaagctaatgatggaacaggaaaatggaaatctccgaggaagccctggccctaaaggtgacatgggaagtccaggccctaaaggagatcgagggttccctgggactccaggtatccctgggcccttgggccacccaggtccacaaggaccaaagggtcaaaaaggcagcgtgggagatcctggcatggaaggccccatgggccagagagggcgagaaggccccatgggacctcgtggtgaggcagggcctcctggatctggagagaaaggggaaagaggggctgctggtgaaccaggtcctcatggcccacctggtgtcccaggttctgtgggtcccaaaggttccagcggctctcctggcccacagggccctccaggtcctgtaggtctccaagggctccgaggtgaagtaggacttcctggtgtcaaaggtgacaaaggaccaatgggaccaccaggacccaaaggtgaccagggtgagaaaggacctcgaggcctcacaggcgagcctggcatgagaggtttgcctggtgctgttggtgagcccggggctaaaggagcaatgggtcctgctggcccagacggacaccaaggcccaagaggtgaacaaggtcttactgggatgcctggaatccgtggcccaccaggaccttctggagacccaggaaagccaggtctcacaggaccccagggacctcagggacttcccggtacccctggccgaccaggaataaaaggtgaaccaggagctccaggcaagatcgtgacttcggaggggtcatcgatgctcactgtcccaggccccccaggacctcctggagccatgggacccccaggacctccaggtgccccaggccctgccggcccagctggtctcccaggacatcaagaagttcttaatttacaaggtcccccaggcccacccggcccacgtgggccaccagggccttccattccaggcccaccaggaccccgaggcccaccaggggagggtttgccaggcccaccaggcccaccaggatcgttcctgtccaactcagaaaccttcctcttcggccccccaggcccacctggccccccaggtcccaagggagaccaaggtcccccaggccccagaggacaccaaggcgagcaaggcctcccaggtttctcaacctcagggtccagttctttcggactcaaccttcagggaccaccaggcccacctggcccccagggaccaaaaggtgacaaaggtgatccgggtgttccaggggctcttggcattcctagtggtccttctgaagggggatcatcaagtaccatgtacgtgtcaggcccgccagggccccctgggccccctgggcctccgggctctatcagcagctctggccaggagattcagcagtacatctctgagtacatgcagagtgacagtattagatcttacctatccggagttcagggtcccccaggcccacctggtcccccaggacctgtcaccaccatcacaggcgagactttcgactactcagagctggcaagccacgttgtgagctacttacggacttcggggtacggtgtcagcttgttctcgtcctccatctcttctgaagacatcctggctgtgctgcagcgggatgacgtgcgtcagtacctacgtcagtacttgatgggccctcggggtccgccagggccaccaggagccagtggagatgggtccctcctgtctttggactatgcagagctgagtagtcgcattctcagctacatgtcgagttctgggatcagcattgggcttcctggtcccccggggccccctggcttgccgggaacctcctatgaggagctcctctccttgctgcgagggtctgaattcagaggcatcgttggacccccaggtcccccgggtccaccagggatcccaggcaatgtgtggtccagcatcagcgtggaggacctctcgtcttacttacatactgccggcttgtcattcatcccaggccctccaggacctcctggtcccccagggcctcgagggcccccgggtgtctcaggagccctggcaacctatgcagctgaaaacagcgacagcttccggagcgagctgatcagctacctcacaagtcctgatgtgcgcagcttcattgttggccccccaggccctcctgggccgcagggaccccctggggacagccgcctcctgtccacggatgcctcccacagtcggggtagcagctcctcctcacacagctcatctgtcaggcggggcagctcctacagctcttccatgagcacaggaggaggtggtgcaggctccctgggtgcaggcggtgcctttggtgaagctgcaggagacaggggtccctatggcactgacatcggcccaggcggaggctatggggcagcagcagaaggcggcatgtatgctggcaatggcggactattgggagctgactttgctggagatctggattacaatgagctggctgtgagggtgtcagagagcatgcagcgtcagggcctactgcaagggatggcctacactgtccagggcccaccaggccagcctgggccacaggggccacccggcatcagcaaggtcttctctgcctacagcaacgtgactgcggacctcatggacttcttccaaacttatggagccattcaaggaccccctgggcaaaaaggagagatgggcactccaggacccaaaggtgacaggggccctgctgggccaccaggtcatcctgggccacctggccctcgaggacacaagggagaaaaaggagacaaaggtgaccaagtctatgctgggcggagaaggagaagaagtattgctgtcaagccgtgagctagccatggcaggacagctcctggaccaggtctcataatgcatgtggcacttaggtccaaggtctccagagggtgaaagctggagtctgtcaatgtcctactgagacagcacagccaacctagctagcaacatttgttttagtctgaacaatatatacttatagaattcagtcaaagatacacaatctgaaacagcttcatggggtggactctaacagtagttgcaatgttttagaatgagacttacttctctgctatctagatctgaactccttggcttctttacttagttcaagccccagcctaggaaagccagttacataaaagttggctcaggagtcttagagctttacctaaatatgagcccagaaaacggaggatgggggtggggcgccttcctggaggtgacacttgatgggggtgtgttctggttactgttctaaggctgtgccatcagctccttcctcccctgttcattctgcattctctagtcagttggctaagaagtgactcttgcaactaaaaaaattaagaaattcacttcccctctaggaggtgatgatagggtttctaatggttatatgtatatcacattcccatttgcttagaaagtctgattgtagctatgattgtccgtaggcccatactagagttcatggatatgttatactgaaccaggccagagcaaacagaaaaagaaggttgagggcaatggacaaggaaggaataaagggagaagagggaaaacagaaaacctgatgctggggacacagcatcagctcaagacgtcaccctccattctgcactcagaaaatggcacttgggggactgggcgcagttggtctttaaccacttttcaatgtctaaaaacatttgtttgtggtctataagatgaaacatcatttcaatcgtaaaatttcccattaaagaagtttttttttctaaacaaaaacaacgaggcaaccacgagaaagagagaaagcgagaaacaaaaaagaagagagaaagaagacagaagaaaaaacaagggagagacagagcacaacggagagagcgagcgacgaggagagacgcaacagagagcaagcagcgagcaggcaggaggacgagaggtagacgcgggacgggagc

SEQ ID NO: 63 - DNA, 3109 bp, Homo sapiens
ttttttttttttcagacaattcagcctttattttagaaaataattctgtagcttccactttctttcatgaaactgaggtcaggcaagaaacaaaaatccaccaagtcctctccatcctgccatggcgtcctggcctgtgaggacatggggcgcctgggagcgggcggggaggctgggcagcactgggccagaggcgtcctggtcactgctccacctggtcactgctccacctcatgctgagaggagcctgtgtgtcaaaccccaggggaaaaagggacaggcagatcgaattctgtcttctaccaagccagcaggagcctcctagagcaacagggagggcactgattttcagaaaggaggggtcagggcatagtccctctctgaggtaaggcaagagagaggttgtcccagcacaaggccttcctccctgcacctctctcctgacagctgggcatgggctgaggagaggtcttgcttgcccccttcaactttccatctcagaactataaactgctaggctgcaaggagagaagggctaagtgggggtcagacaggagagaagggcaggaggcagtgagccccgatgacccaccaactccaccaggccctgacaaggaagcccctttggttagtatcattttggccacaaatatgtccccttctcccataactcagtccccactgggggaaggggagcaggtatagaaggagggctcgtgccctggctggaagagccaggtcagggagaaggggtctggtcaagagagcgaacgttgccaaactctctgcacatgctccaggagaaagctcaggacgtggacatttctggccccaacaagcccagtgccccccaccacacagtggtttcctgcttaataccccgcaacataccctagaatagttcccctgatctgactcccttgagaacgggagaataatcctcttgttatcatttgtgcacttaaatgccactcggaaaaatcaaaaagataaatgcacctaagagggaaacacaggcaggccgatgcagcctggggactgtggtcccacctcagctcatgatgtggcaaggaggggcccaggaaggacaggcaggtgctaattccagctaggatcatagccctcccacgtcggtgggggcgccaggtggacacggcggccccggaactggaaggtgacaataccccggtagccagctctcggaacccccgacttaaggtcatccatgacacccagagccttggcgaaagccttgaagctgtccctgcccgtatactgcacccgcacctcccccagctccttccggtcattggtcctcactttctccacctgcagctggggagcaccgtagacgcgggcgaggaaatctcggtcataggcctcccgctgcaggtaagacaggtccagctgggtgaagtgcacaaactgctggttcagcttgataaacttgaggtgctggtcaaagaactgcccgtggctcacacccttgcggccaaaggtcatcgttcttgagatctcagggcgtatgcaggcccgcccctgccgctgctccggccgccgcatccagtcgtcccagaaggcctttggccacttgggctccagctcagcccagagctcggccaacagcagccagcccaggccagggaaaaagtcggtgcggtagagcagctcaggcctgctggcgtccaccatctgctccttgccgttgtcattccaggccgagacgcaccacagggaggggtcggccttcagcagcggataggtggcccgaaagtactcgaagaagtccggggccacctccaggtcatcctccaccaccacggccgcggggaagcgaaactgccggaagacctggcccagcgcccagcggtagtggcgcgcgatcttgtagtagccctggaacttgcggtggtccggcggcaccgcaatgctgctcaggtcgggctgccggatgtgcgtgaccgcgctgccgtaggaggcgatggcctgggccgtctcctcgtgcccgcagtcctggctaacgatgatggggaagagctcagccgagggccgataatgcagcagcttgtccaggcagcgccgaacagtgctgcggtcacaggcgatgaccaggatgggaatcaccgccggcgcgggggtcacaggcacacgcggctgggcgggaggggccgcggtgggcaccctcccccgctggctcgacagggcatccccgatctgctgcagcagcccacgctgccgctccagctccacctcggcgtcttgggccaggcgaatcacttcccgggtgaggctggcggggtcgccatcgagagcgctgactgagggtggcctgccaggtgctgggcgcgtccagaagaagaggagcagcagggcattccaggccacaaagaggatagcgccccacagcacaagccctgcagactgcttcttcagcatcctggcccccaccggggagggcaggccaggggacggttcaaggctgccctgggcttgcccggctcccttgcccgcagtcctagggatgcctcctctggactatgggattaggaggcagccatgcacctttcttctcttgtctcagttgctctccaggagatcatcaaatccccattcagcactccattttcaaaactgagaatcccaaatcagatccaccaaagtgcagcttctctcttcttatccaggtccaaagtccatggctgagctgaccctgacggggaggagtctgggggggaaggggtgtgtccaggcccctccccccccactgcagacttcagtgcccctctcaggggtccgttacctcccttcattcagctgccttattaagctcagagtctggtgatggacagatcccagatactatcccatctcttgctcaggcaggggaagttatccactgtgagaactggcccatctgtcttgtgctggggctcatgagaagaaacaggccttagaagcggcatggcccaggaggcagatttctctgactcacgtgtccaaagtgaaatttgcagtgctcctcccagctcctctctcagcagtcccgttctcaggaaatggcaggccagaagtcttccacaacattcccacatccagtcagtcaaaagcc

SEQ ID NO: 64 - DNA, 10373 bp, Homo sapiens
  misc_feature (1)...(10373): n = a,t,c or g
agtatttctctcgcgagaaaccgctgcgcggacgatacttgaagaggtggggaaaggagggggctgcgggagccgcggcagagactgtgggtgccacaagcggacaggagccacagctgggacagctgcgagcggagccgagcagtggctgtagcggccacgactgggagcagccgccgccgcctcctcgggagtcggagccgccgcttctccactggcaggggccgcctgaagtgggagcagcgcctggagaaggcgggaggagcccggcccgggggacgggcggcgggatagcgggaccccggcggcgcggtgcgcttcagggcgcagcggcggccgcagaccgagccccgggcgcggcaagaggcggcgggagccggtggcggctcggcatcatgcgtcgagggcgtctgctggagatcgccctgggatttaccgtgcttttagcgtcctacacgagccatggggcggacgccaatttggaggctgggaacgtgaaggaaaccagagccagtcgggccaagagaagaggcggtggaggacacgacgcgcttaaaggacccaatgtctgtggatcacgttataatgcttactgttgccctggatggaaaaccttacctggcggaaatcagtgtattgtccccatttgccggcattcctgtggggatggattttgttcgaggccaaatatgtgcacttgcccatctggtcagatagctccttcctgtggctccagatccatacaacactgcaatattcgctgtatgaatggaggtagctgcagtgacgatcactgtctatgccagaaaggatacatagggactcactgtggacaacctgtttgtgaaagtggctgtctcaatggaggaaggtgtgtggccccaaatcgatgtgcatgcacttacggatttactggaccccagtgtgaaagagattacaggacaggcccatgttttactgtgatcagcaaccagatgtgccagggacaactcagcgggattgtctgcacaaaaacgctctgctgtgccacagtcggccgagcctggggccacccctgtgagatgtgtcctgcccagcctcacccctgccgccgtggcttcattccaaatatccgcacgggagcttgtcaagatgtggatgaatgccaggccatccccgggctctgtcagggaggaaattgcattaatactgttgggtcttttgagtgcaaatgccctgctggacacaaacttaatgaagtgtcacaaaaatgtgaagatattgatgaatgcagcaccattcctggaatctgtgaagggggtgaatgtacaaacacagtcagcagttacttttgcaaatgtccccctggtttttacacctctccagatggtaccagatgcatagatgttcgcccaggatactgttacacagctctgacaaacgggcgctgctctaaccagctgccacagtccataaccaaaatgcagtgctgctgtgatgccggccgatgctggtctccaggggtcactgtcgcccctgagatgtgtcccatcagagcaaccgaggatttcaacaagctgtgctctgttcctatggtaattcctgggagaccagaatatcctcccccaccccttggccccattcctccagttctccctgttcctcctggctttcctcctggacctcaaattccggtccctcgaccaccagtggaatatctgtatccatctcgggagccaccaagggtgctgccagtaaacgttactgattactgccagttggtccgctatctctgtcaaaatggacgctgcattccaactcctgggagttaccggtgtgagtgcaacaaagggttccagctggacctccgtggggagtgtattgatgttgatgaatgtgagaaaaacccctgtgctggtggtgagtgtattaacaaccagggttcgtacacctgtcagtgccgagctggatatcagagcacactcacgcggacagaatgccgagacattgatgagtgtttacagaatggccggatctgcaataatggacgctgcatcaacacagatggcagttttcattgcgtgtgtaatgcgggctttcatgttacacgagatgggaagaactgtgaagatatggatgaatgcagcataaggaacatgtgccttaatggaatgtgtatcaatgaagatggcagttttaaatgtatttgcaaacctggattccagctggcatcagatggacgttattgcaaagacattaacgagtgtgaaacccctgggatctgcatgaacgggcgttgcgtcaacactgatggctcctacagatgtgaatgcttccctggactggctgtgggtctggatggccgtgtgtgtgttgacacacacatgcggagcacatgctatggtggatacaagagaggccagtgtatcaaacctttgtttggtgctgtcactaaatctgaatgctgttgcgccagcactgagtatgcatttggggaaccttgccagccgtgtcctgcacagaattcagcggaatatcaggcactctgcagcagtgggccaggaatgacgtcagcaggcagtgatataaatgaatgtgcactagatcctgatatttgcccaaatggaatctgtgaaaaccttcgtgggacctataaatgtatatgcaattcaggatatgaagtggattcaactgggaaaaactgcgttgatattaatgaatgtgtactgaacagtctcctttgtgacaatggacaatgtagaaatactcctggaagttttgtctgtacctgccccaagggatttatctacaaacctgatctaaaaacatgtgaagacattgatgaatgcgaatcaagtccttgcattaatggagtctgcaagaacagcccaggctcttttatttgtgaatgttcttctgaaagtactttggatccaacaaaaaccatctgcatagaaaccatcaagggcacttgctggcagactgtcattgatgggcgatgtgagatcaacatcaatggagccaccttaaagtcccagtgctgctcctccctcggtgctgcgtggggaagcccgtgcaccctatgccaagttgatcccatatgtggtaaagggtactcaagaattaaaggaacacaatgtgaagatatagatgaatgtgaagtgttcccaggagtgtgtaaaaatggcctgtgtgttaacactagggggtcattcaagtgtcagtgtcccagtggaatgactttggatgccacaggaaggatctgtcttgatatccgcctggaaacctgcttcctgaggtacgaggacgaggagtgcaccctgcctattgctggccgccaccgcatggacgcctgctgctgctccgtcggggcagcctggggtactgaggaatgcgaggagtgtcccatgagaaatactcctgagtacgaggagctgtgtccgagaggacccggatttgccacaaaagaaattacaaatggaaagcctttcttcaaagatatcaatgagtgcaagatgatacccagcctctgcacccacggcaagtgcagaaacaccattggcagctttaagtgcaggtgtgacagcggctttgctcttgattctgaagaaaggaactgcacagacattgacgaatgccgcatatctcctgacctctgtggcagaggccagtgtgtgaacacccctggggactttgaatgcaagtgtgacgaaggctatgaaagtggattcatgatgatgaagaactgcatggatattgatgagtgtcagagagatcctctcctatgccgaggtggtgtttgccataacacagagggaagttaccgctgtgaatgcccgcctggccatcagctgtcccccaacatctccgcgtgtatcgacatcaatgaatgtgagctgagtgcacacctgtgccccaatggccgttgcgtgaacctcatagggaagtatcagtgtgcctgcaaccctggctaccattcaactcccgataggctattttgtgttgacattgatgaatgcagcataatgaatggtggttgtgaaaccttctgcacaaactctgaaggcagctatgaatgtagctgtcagccgggatttgcactaatgcctgaccagagatcatgcaccgacatcgatgagtgtgaagataatcccaatatctgtgatggtggtcagtgcacaaatatccctggagagtacaggtgcttgtgttatgatggattcatggcatctgaagacatgaagacttgtgtagatgtcaatgagtgtgacctgaatccaaatatctgcctaagtgggacctgtgaaaacacgaaaggctcatttatctgccactgtgatatgggctactccggcaaaaaaggaaaaactggctgtacagacatcaatgaatgtgaaattggagcacacaactgtggcaaacatgctgtatgtaccaatacagcaggaagcttcaaatgtagctgcagtcccgggtggattggagatggcattaagtgcactgatctggacgaatgttccaatggaacccatatgtgcagccagcatgcagactgcaagaataccatgggatcttaccgctgtctgtgcaaggaaggatacacaggtgatggcttcacttgtacagaccttgatgagtgctctgagaacctgaatctctgtggcaatggccagtgcctcaatgcaccaggaggataccgctgtgaatgcgacatgggcttcgtgcccagtgctgacgggaaagcctgtgaagatattgatgagtgctcccttccgaacatctgtgtctttggaacttgccacaacctccctggcctgttccgctgtgagtgtgagataggctacgaactggacagaagcggcgggaactgcacagatgtgaatgaatgcctggatccaaccacgtgcatcagtgggaactgtgtcaacactccaggcagctatatctgtgactgcccacctgattttgaactgaacccaactcgagttggctgtgttgatacccgctctggaaattgctatttggatattcgacctcgaggagacaatggagatacagcctgcagcaatgaaattggagttggtgtttccaaagcttcctgctgctgttctctgggtaaagcctggggtactccttgtgagatgtgtcctgctgtgaacacatccgagtacaaaattctttgtcctggaggggaaggtttccgaccaaatcctatcaccgttatattggaagatattgatgagtgccaggagctaccagggctgtgccaaggaggaaaatgtatcaacacctttgggagtttccagtgccgctgtccaaccggctactacctgaatgaagatacacgagtgtgtgatgatgtgaatgaatgtgagactcctggaatctgtggtccagggacatgttacaacaccgttggcaactacacctgtatctgtcctccagactacatgcaagtgaatgggggaaataattgcatggatatgagaagaagtttgtgctacagaaactactatgctgacaaccagacctgtgatggagaattgttattcaacatgaccaagaagatgtgctgctgttcctacaacattggccgggcgtggaacaagccctgtgaacagtgtcccatcccaagtacagatgagtttgctacactctgtggaagtcaaaggccaggctttgtcatcgacatttataccggtttacccgttgatattgatgagtgccgggagatcccaggggtctgtgaaaatggagtgtgtatcaacatggttggcagcttccgatgtgaatgtccagtgggattcttctataatgacaagttgttggtttgtgaagatattgacgagtgtcagaacggcccagtgtgccagcgcaacgccgaatgcatcaacactgcaggcagctaccgctgtgactgtaagcccggctaccgcttcacctccacaggacagtgcaatgatcgtaatgaatgtcaagaaatccccaatatatgcagtcatgggcagtgcattgacacagttggaagcttttattgcctttgccacactggttttaaaacaaatgatgaccaaaccatgtgcttggacataaatgaatgtgaaagagatgcctgtgggaatggaacttgccggaacacaattggttccttcaactgccgctgcaatcatggtttcatcctttctcacaacaatgactgtatagatgttgatgaatgtgcaagtggaaatgggaatctttgcagaaatggccaatgcattaatacagtggggtctttccagtgccagtgcaatgaaggctatgaggtggctccagatgggaggacctgtgtggatatcaatgaatgtcttctagaacccagaaaatgtgcaccaggtacctgtcaaaacttggatgggtcctacagatgcatttgcccacctggatacagtcttcaaaatgagaagtgtgaagatattgatgagtgtgtcgaagagccagaaatttgtgccctgggcacatgcagtaacactgaaggcagcttcaaatgtctgtgtccagaagggttttccttgtcctccagtggaagaaggtgccaagatttgcgaatgagctactgttatgcgaagtttgaaggaggaaagtgttcatcacccaaatccagaaatcactccaagcaggaatgctgctgtgccttgaagggagaaggctggggagacccctgcgagctctgccccacggaacctgatgaggccttccgccagatatgtccttatggaagtgggatcatcgtgggacctgatgattcagcagttgatatggacgaatgcaaagaacccgatgtctgtaaacatggacagtgcatcaatacagatggttcctatcgctgcgagtgtccctttggttatactctagcagggaatgaatgtgtagatactgatgaatgttctgttggcaatccttgtggaaatggaacctgcaagaatgtgattggaggttttgaatgcacctgcgaggagggatttgagcccggtccaatgatgacatgtgaagatataaatgaatgtgcccagaatcctctgctctgtgccttccgatgtgtgaacacttatgggtcatatgaatgcaaatgtcccgtgggatatgtgctcagagaagaccgtaggatgtgcaaagatgaggatgagtgtgaagagggaaaacatgactgtactgaaaaacaaatggaatgcaagaacctcattggcacatatatgtgcatctgtggacccgggtatcagcggagacctgatggagaaggctgtgtagatgagaatgaatgtcagacgaagccagggatctgtgagaatgggcgctgcctcaacacccgtgggagctacacctgtgagtgtaatgatgggtttaccgccagccccaaccaggacgagtgccttgacaatcgggaagggtactgcttcacagaggtgctacaaaacatgtgtcagatcggctccagcaacaggaaccccgtcaccaaatcggaatgctgctgtgacggagggagaggctggggtccccactgtgagatctgccctttccaggggactgtggctttcaagaaactctgtccccatggccgaggattcatgaccaatggagcagatatcgatgaatgcaaggttattcacgatgtttgccgaaatggggaatgtgtcaatgacagaggatcatatcattgcatttgtaaaactgggtacactccagatataactgggacttcctgtgtagatctgaacgagtgcaaccaggctcccaaaccctgcaattttatctgcaaaaacacagaagggagttaccagtgttcatgcccgaaaggctacattctgcaagaggatggaaggagctgcaaagatcttgatgagtgtgcaaccaagcaacacaactgccagttcctatgtgttaacaccattggcggcttcacatgcaaatgtcctcccggatttacccaacaccatacgtcctgcattgataacaatgaatgcacctctgacatcaatctgtgcgggtctaagggcatttgccagaacactcctggaagcttcacctgtgaatgccagcggggattctcacttgatcagaccggctccagctgtgaagacgtggacgagtgtgagggtaaccaccgctgccagcatggctgccagaacatcattgggggctacaggtgcagctgcccccagggctacctccagcactaccagtggaaccagtgtgttgatgaaaacgaatgcctcagcgctcacatctgcggaggagcctcctgtcacaacaccctggggagctacaagtgcatgtgtcccgccggcttccagtatgaacagttcagtggaggatgccaagacatcaatgaatgtggctctgcgcaggccccctgcagctatggctgttccaataccgagggcggttacctgtgtggctgtccacctggttacttccgcataggccaagggcactgtgtttctggaatgggcatgggccgaggaaacccagagccacctgtcagtggtgaaatggatgacaattcactctccccagaggcttgttacgagtgtaagatcaatggctaccccaaacggggcaggaaacggagaagcacaaacgaaactgatgcctccaatatcgaggatcagtctgagacagaagccaatgtgagtcttgcaagttgggatgttgagaagacagccatctttgctttcaatatttcccacgtcagtaacaaggttcgaatcctagaactccttccagctcttacaactctgacgaatcacaacagatacttgatcgaatctggaaatgaagatggcttctttaaaatcaaccaaaaggaagggatcagctacctccacttcacaaagaagaagccagtggctggaacctattcattacaaatcagtagtactccactttataaaaagaaagaacttaaccaactagaagacaaatatgacaaagactacctcagtggtgaactgggtgataatctgaagatgaaaatccaggttttgcttcattaattcaccatccagaaaccaaataattaaaagaaaaacaaatatagataggtagaactatattttcccccaatcagaatcatcatatcataggtacaatctttcaccaagtaaatttgtataaataagcactattctttgtattaccaaagcaaggtacaggtgactaccctagttcaaaacaaccactttctcaggcttctcatgtgtgtagctaagctaccttgtcatatgtgttgattcttgaaaactgggacgtgtatttccattgggggttggccatttatgctgacatgccatccttccagcaaacgtatgggaatgtgctttcaattgatggactactctattttttgcaaatttgtaaactttgcttctccaaatacaagtactaggttgtccatttatggtacctatttggtgctagtaaattttcaaactagatttataaatgcactgtaatatgtacacaacttagaaaccaaattacaagtattcagttccaatacttcattaatttcaatcaaccaaagttagttcagtagcttatctcagttatgagtataatacattacatgtaaattaagtgtgtgtatactgtaatcgtgctattttttatcattgaaacatttataaactagaataataatgcccttaatgtgagggtttgtaatggtgcttattaagaccaaagacttgttaaatgtatacaccaagtggtaatgaaatttctgtgactggcccacacgtgcatagaggtctgggaggaccaggaaacagcctcagtggccagaggatcaccagtgcatccttcatcacagcatgtgcaatatgccaagattaccctcggtcattcctgtcaacaaggggtcaatgtcataaatgtcacaataaaacaatctcttcttttttttagtttaccccttggctttgtgttcttgcatggatttggggttggaggggccattccggaggctaaataaagtctcctggatttaaattatcctgggtctcttacttatggcttatgaaagtaccaaatgtataaccactaagaagaaaatttaacatatgagtcgatcccttgctttatccattgaaagtagcagagtctggtgtcattaacctgacttgcttgtgagaaatttagattgtagagtcatttctgaaacatgacctaattcatcttgtgacttttaaatagtcctaaataccaagttcaagtcattgtcctaaagcacatgaatttcattataataggatttatcaagcccccctctcaaatatacacaggttttgggcaaagccttaaggggttctgttcaattttttttnccccaaaacnacctttcngntaagnccaaa

SEQ ID NO: 65 - DNA, 3515 bp, Homo sapiens
ggttgtctctgcgtgtcttttgtcagcttgctgattgtgttcgtcctctctggtgtgcatgctctcttgttctgctcgcgtgcgtctgagtggtagtcgcggggccggtcgtgtctgtgcgggtccgtggttgtgctttgttcttcctggttgtttctaccacctcgttttgctgtgtctgtgtgcgtgttgggtcgagttgcgcttccctctgccgggggcggctgttggtcgtcgtctgttgttgcgttgttttttctggtgtgtctcgttctcccggcttgtcgtggcgatttgttgggggcgtgtctgccgtgtctctgtgtgtgctggtgtgtgtcggcgtcatggggtgtgttgctctcgcgggcgtgtgtgttctgctgtgggggggggcgcccttgtttgttgtgtggttttggtgttgtgtgttgtttttgtgttgtccccctcagtaggggtctttattcatacttgttgacatttcccatggggaatggttgaagggaggggcagggagggctgagcgggaagccacggcttggttttcctccatccagtggagaagagactcggtagggacatgctaagtagagtgaacaggggaaccatcactatgtgggctgagatgcactgtgcagtgacttcagacaacctgagtccttctgtcaggaaatgcaatttctaagtggaaaaaaaaaacaagacccaaagaaaaaaacaaagtgcatacaaagcaaactgctaatgtaagaaaggttctaaggcagccagcagtgaaaagccaggggtctggagtggccacctggccatgccctgtcccactgccctgtgccaggctgtcgggccaccagtgccctcttgagacagtctccattggctccaagggttctgtgagccacagaaggttgtgaaaggagaagagcctgaagtgtggcagcaccagggcagcccaaagcagggctgcgttgaaaatatcaaagtatctctttaggggtggctctgagggttggtgggattggagggggaaggggcgcctgggaggagtacagtcagcatctattcttgggcaccgggaggagccactctctggaatcttaaattaccaggtaggagtgagaatgctgattagctgtagagctgaaggcacggctgccaggcccctccgggtccttctctagttctccaggcccggtgtatcgaaggcagtggagaggaagggcctgtgggagccagggccagctcagcagcctagccagtcggatttgatgcttccaaacttcacgctcttcagactttggttctccagcttcaggtaataggcacccttgaagaagtagctgtgaccgccgccctgcaggtccacgacggcatccaggttatcggggatggcattccaggcatctgcgatgagcttgggaaagccaggatccattttcttcttcacctcattgtatctccagaatttgtctccagcaaagatgtatgtcttcttgtttttgctccagttaaaggcggcatccactcgctggacatcagggggcagtcccaggctggtcagtggcttggggtaccctcgctccagggtgctggctgagtagatccagtattcattccctgcaaagaacacagccttctcctcctgtggggcctcgtataccgcatcaatcttttccgggagctcaggccagaatgtggccaccagcaggggccccatgggcttgtcacgtggcgtcacagtccgccaaatgaaccggtccttgaagaagaagatctcaccacggatctgagcgatgccatcaaatacaatgtcctgtttgcagatctcaggagtgacagggcccagtgtgggggtggggccggtgccaaggtcaatgtcaggagaggccccatagagctcctgaatgcccttgatgtcatcctgggacagacggaagttcttggtgtaggtgtaaatgggtgccatcagggccccagggtcttgggagtgctccagccccatggcgtggccaaactcgtgggctgccacgaggaacaggctgtacccttggtcagggcagaagccccacttgcggtcgtcatcgtagttggctgtggtcgcacaccacatctttccgtcactgcggccggcgctggtgcagctctcatatttgttgcccaggaaagtgaaggggaagacacagggggcaccttctgagttcccaccaacagtggacatggcggtctcagggcagaagccatacttcttgtcgcggtcgtagtcctcagtggtgccgcaccagcggtagccatccgtgcggccctcagtggtgcagctgtcataggatgtgccctggaagcggaatggaaacttgcagggctgtccttcagcgttgccgcccatggtgaacagggcttcatggggacagaagccgtacttgccatccttctcaaagttgtaggtggtggagcaccagaggaagccatcgctgcggccagtatcagtgcagctgttgtactccttgccattgaacaagaaggggaacttgcagtactccccatcggcgttgccatacttcacacggaccacttggccttctcccaaggtccatagctcatcgtcatcaaaatgggagtctcccccaacaccagtgcctggggcgaaggcatgagccaggagtccgtccttaccgtcaaaggggtatccatcgccatgctcccagcggccaaagttgatcatgatgtctgcctctccatcatggattcgagaaaaccgcagtggggtcacatcgctccagacttggaaggcacgagcaaaggcatcatccactgtctctgggtccagatcaggtgtgtagccaatgatcctgtatgtgatctggttcttgtcccacttgggcttgcgagggaagaagttgtagttggccacatctgggttgccgcagcgtggcttccgcatggtctcgatggtattctggtcaagatcacctgtctggggcagtccaaagaacttctgcatcttctttagtgtgtccttcagcacaaacaggttgcagctctccttggggcagccatagaaggtgttcaggtattgcactgccaactctttgtccgttttgggggcgacatcgccggggaacttgatgatgggcgacggcgcggcggcggcgtggctcagcaggcagcccaggagacagagcgccctcaggggacccgtgagcgcgccccgggccattagcgcctccatcgtagcgctccctggccccgcgcgtcgcccgggggtcgctggctcggtgcgtgtggccgcctcgccgcctggttggagcctggtccgcggcgcagggctgcgctccgagggtccgctggctcggtggcctggggtttgcccggctcagcggctcatggtccggcccccgcgccccagcccccgccgccgccgccgccgccgcaggtcctggcaatccctttgtatgtttaaagccccagatgcgcagcctccagccaccgcctgaggaagtctggatgcagcggaaaca

SEQ ID NO: 66 - DNA, 2569 bp, Homo sapiens
ttttttttttttcccatttttttaaacgtttattacttcaagagtgaattatttttcaaagatgataaaactcatttctattccagtagaaaagggtcacaggtttgccccagggtccaggagcgcccggaaggcagggcccccaggcctcttcacctcagcctgggcacctataatctgagggaccctgtgagggggtgggggcagctcgggggcacagcctgcggccacttcggccagagagtggccggctcagtccataggatgatgtcagtttaggctggaggaaaagggcgccagacaacccgatgcagtgcctgtgaagacttcggggggatcaaagtccggccggggtgggcggagaccctcgggcagctgcacagggcatcttgtgctcactccattgttttccgaggcctgtgtaaaggcgctttgcctggcctggcaggtagaccaaggccaaagctcgtggccagggcctgggcactgagtccccactgaatttggcacaggaaggcggcactcccagcctggcccgtcctgcatggggagccaccacaccgggactgcagtgtttcaccttggaggggaggaagcctgggcccaacggctgaacgggacaggccaggctcacccgaggaaggggacgcaggacccacagcccctgtggtcaggcctgtgggccacgtggagagaaggttccagaacagtgcttgttgacgagcctctccctacaagtcccttcagcagcagctccatccctgagtgtctgcacaagcctgcacgcatgtgtgtatgtgtgccagggcgtgtgtgcaggtgtgcaacaggcacatggcagctgggaggctcaggctgtggggctggggggctgtccgctgggagagtccgggagaagcggggtgtaggggctggggggccggtcaggcccagcggccaggcctggctggctcacggtgtcctcaggaccctacagttttgcttcctgcagcacagagcccttgggagctgatgtcatcagggattcagaataggcctgaatggcctccttatcctttgagccctttttactactactccaaaataaatagcatttctcttggctccggatttggcagatgacagggaccagcagcaggacgcagcccagcgccaggaggacgtactgggcatagtgcatcaccttgggcatcaacaccagctgagtgtagaatgtgtgaagagtctccccctccatggccccgctctctgcaaaccagagcagcggcaggaccacaggctcaatcttcccagtttgtccaatgcctgcgacagatttcatgtagaggctcagctgcagtttcacagagcagttcatggggattcccgtgaccgggtggatgtccaggaacaaggagtgtgcctcctggttagggtgcaggccagtcaccgcttctgccagaaccgggtcggcgttgaggaagtgaggatgggagagaaacaagggggcactgaacctgcaggtgctgacgttctgaattccagactccaggcacgggcagaagccttcgttgggtgggtagatggacccgttggcaaacagggttttgggagccacgaagcgataggtggggatgccttcaaacacccctgactccttgtacattagcttcatggatcggcaggcctccgggctgtagaactccagcgaggactcaggagtcatgaagggcggccacatttgcccagaagttccattgatcatgttgcactgatcggaatgccagaagtcaaccttgctcagcccgttccacttgtccacgaggtggatcctgctgatgttctggacccccgtgaacaccgtgaagagcccagagtcggagttgttgagctcagcaaataatccgaacttgtccttgaaggggaacatgcctggaaagtacttgttgatgagattcacaagggggtccttgtagccccacatgatctcacccacagtgcggttcatgaaggcacgttcgccgagggtggtgaatgccaaggtcatgatgagcttcagggtcatgggcttattctccatcatcaccgccgcacccaagaccaggatgttgggcatgacgatgtagtcgctctccgagccgtgggacttggagggctggaactggaaggtgcggtactcgaggaaggacacggtgtcgttgttgttgaaggtgatgttgcttttgtgcctggactccctgtacacgtagggcccgcgctcccgcacctgcggcttctcgcccttcaggatctcgctggggttcatgacgtcaaagaagtagacggagagatagaaggggatagggatctccttccacatgttgaaggacaggctactggggtcgatgcgcacgttcttaaggacctgctgcttgatgagcgacggcaccatcacgatcatgacagcgcccagcacagcgcacagtagccccgcgacgcccagcgccccggcagcccagcgcgctttggcggagcagcccatgtctgcgcgcctggggcccacccgcggctcgcagggctccgcgcctggcaggagacggggacggcgacg

SEQ ID NO: 67 - DNA, 1359 bp, Homo sapiens
ttttttttttttgccttaaatataagaaatttattaatattattaattgattaataattgatcactgccatatgacttggattttacatttccaccacttcttcgtgttacttctttctaccctattatatcagcgtcccatcccaagtctgacacacctggaagtattgaatgttgtattttgattgtggatgacttgtttatttggttatatcttttgaacgcctcaggtgattctgtctgtctttggaggatgggccataggcttcctgccccaactccattatctgttttccacaaagatagataaacattcacttatcagactaattcagcaaagcatacacgttcttaggttcttagcaaaccaagtactttgtccacctctcctctccatctcccctccctcaaatcttcagtgggcagatgtgggagaagaaaggagctgtcactccaaaccttctggtgtttcagttggggagtctggcttcacagtgagctgaaactttcccttgccagcctccatcaatccagccccttctgacggggctggagagtaattaacatcgccgtccacctgtgcacaggaagatgcctacagccacaccagcaatgatgaaactgcccaccaggacgcccaggaccagcgaagtgtaggagcggcttgtttggctccctttcgtgttttccgcggaaatatgtttctgcacatactgcacacaggtgtcctccaggaattcccgcagttcataccgagtgcggttgtaggcattgagctgctgcagggtgaaggtgaccactccggaggtgacctgggtgtctgcctgccacaaggctctctccggccggaaactcacaaaggagctcccattcacagccacttcgaagaagacatgggctctagagccctcgggaggcagctcacagcccaggaagcagcggatggtcagaggaaaggccaaggtccgctcctggtgcaccaggcgcacgaggccgtggaactggagcaggtaggactgcaggccactctgcgtgcgcgcccagctctcgggctcctgcaagggctgcagctgaatgatcgtggtgttggtgtctgggccttccagcacgtgcgttaggtgtccccccagcgacgcgttgccctggtaccacacgtgataggggtcgcggaagtaggagatctggagcatatgaagtctttggaggccatctgaggcgtcttggctacaaaaggcccagccagacagcagcagtatcggcagcaatgttgtcaacatcctgaagttgaggctccggacctgggttcctggctcgggccggctgcgggctccgctggctgcagtctagggaaaagagaag

SEQ ID NO: 68 - DNA, 2128 bp, Homo sapiens
agtctgggttggactggcggccgtggagtttgtgacatacgaggtgacacccctcgagtcacttcccttcaactccagctggagcgcctgcttggctttgggttcgttctgcagccttcgccccgctcctagcctcagggccggactccagcgcagagcccagcccagcgcagcctgccagcagccacccagccgcccagccgcccagccccgcacgaaacccggccagagcttcctagcagcccgagccatgaacaccgaaatgtatcagacccccatggaggtggcggtctaccagctgcacaatttctccatctccttcttctcttctctgcttggaggggatgtggtttccgttaagctggacaacagtgcctccggagccagcgtggtggccatagacaacaagatcgaacaggccatggatctggtgaagaatcatctgatgtatgctgtgagagaggaggtggagatcctgaaggagcagatccgagagctggtggagaagaactcccagctagagcgtgagaacaccctgttgaagaccctggcaagcccagagcagctggagaagttccagtcctgtctgagccctgaagagccagctcccgaatccccacaagtgcccgaggcccctggtggttctgcggtgtaagtggctctgtcctcagggtgggcagagccactaaacttgttttacctagttctttccagtttgtttttggctccccaagcatcatctcacgaggagaactttacacctagcacagctggtgccaagagatgtcctaaggacatggccacctgggtccactccagcgacagacccctgacaagagcaggtctctggaggctgagttgcatggggcctagtaacaccaagccagtgagcctctaatgctactgcgccctgggggctcccagggcctgggcaacttagctgcaactggcaaaggagaagggtagtttgaggtgtgacaccagtttgctccagaaagtttaaggggtctgtttctcatctccatggacatcttcaacagcttcacctgacaacgactgttcctatgaagaagccacttgtgttttaagcagaggcaacctctctcttctcctctgtcccctgccttcgtgaaacagaggagaagagagaggacacagatgggagagattgagccaagtcagccttctgttggttaatatggtataatgcatggctttgtgcacagcccagtgtgggattacagctttgggatgaccgcttacaaagttctgtttggttagtattggcatagtttttctatatagccataaatgcgtatatatacccatagggctagatctgtatcttagtgtagcgatgtatacatatacacatccacctacatgttgaagggcctaaccagccttgggagtattgactggtcccttacctcttatggctaagtctttgactgtgttcatttaccaagttgacccagtttgtcttttaggttaagtaagactcgagagtaaaggcaaggaggggggccagcctctgaatgcggccacggatgccttgctgctgcaaccctttccccagctgtccactgaaacgtgaagtcctgttttgaatgccaaacccaccattcactggtgctgactacatagaatggggttgagagaagatcagtttgggcttcacagtgtcatttgaaaacgttttttgttttgttttgtaattattgtggaaaactttcaagtgaacagaaggatggtgtcctactgtggatgagggatgaacaaggggatggctttgatccaatggagcctgggaggtgtgcccagaaagcttgtctgtagcgggttttgtgagagtgaacactttccactttttgacaccttatcctgatgtatggttccaggatttggattttgattttccaaatgtagctgacaagtacaagtaagcgtaggcgcggcgtgcctaaaagtagcgccggacagcaacaacacgcgagaggggacagtggacgcggagggacacacacgagacgacagggcccgcggcccaacaggcaccaggacccgagacgctgagaaagcgcaagtagcgggcccacagcagccagaaccagcgcccgtacacgat

SEQ ID NO: 69 - DNA, 3187 bp, Homo sapiens
atgcgtgcgctccgcgaccgagccgggctcctcctctgcgtgctgctgctggcggcgctgctggaggcggcgctagggctccccgtgaagaagccgcggctccgcggaccacggcctgggagcctcacgaggctcgcagaggtgagtggcggcggcaccgggctgcggagcgcgctgtcggtcccacctccccagcccgccggctccagccgtgcggggagcgggaccgggacacacacaggcagcgaccccccgatggagagaggggccggggccggccggaagctcccggacaccgggcgttgcccagtcactgaggggtctacagtccagcttattgccccctggaatgcagcggacgttcattcccatggggacaaagacagccagacttgtattagggtctcagcctccccagatcctaggcctctgaaggaagaggaggaggcaccactgctccccagaacccacctgcaggcagagccacaccaacatggatgctggactgtcactgagccagcagccatgaccccaggcaacgccacccctcccaggaccccagaggttactccgttgcggctggagctgcagaagctgccgggattggccaacacaaccttgagtacccctaaccctgatacccaggcttcagcctccccagatcctaggcctctgagggaagaggaggaggcacgactgctccccagaacccacctgcaggcagagctacaccaacatggatgttggactgtcactgagccagcagccctgaccccagggaatgccacgcctcccaggacccaggaggttactcccttgctgctggagctgcagaagctgccagaattggtccacgcaaccttgagtacccctaaccctgataaccaggtgaccatcaaggtggtggaggacccccaggccgaggtgtcgatagacctgttggctgagcccagcaatcccccgccccaggatacccttagctggctgcccgccctctggtccttcctctggggagactacaaaggagaggaaaaagacagggccccaggggagaagggggaggaaaaggaggaagacgaggactatccttcagaggatatcgagggtgaggatcaagaggacaaagaggaagatgaggaagagcaggcgctctggttcaatggaactacagacaactgggaccagggctggctggcccccggggattgggtcttcaaggattctgtcagctacgactatgagcctcagaaggagtggagtccctggtctccctgcagtgggaactgcagcactggcaagcagcagaggactcggccctgtggctatggctgcactgccaccgagacccgtacctgtgacctgccctcctgtcctggcactgaggacaaggacaccttgggcctccccagtgaggagtggaagctcctggcccgcaatgctacggacatgcatgatcaagatgtggacagctgtgagaagtggctgaactgcaagagcgacttcctaatcaagtatctgagccagatgctgcgggacctgcccagctgcccgtgtgcctacccactggaggccatggacagccctgtgagcctacaggacgagcaccagggccgcagcttccggtggagggatgccagtggccctcgcgagcgcctggacatctaccagcccacggggcgcttctgcctgcgttccatgctgtctggggagagcagcacactggccgcccagcactgctgctatgacgaggacagccggctgctgacccgtggcaagggcgccggcatgcccaacctcatcagcaccgacttctcacctaagctgcacttcaagttcgacacgacgccctggatcctgtgcaagggggactggagccgcctccacgctgtgctccctcccaacaacggccgagcctgcaccgacaaccccctggaggaggagtacctagcacagttgcaggaggccaaggagtactagtgacggggttgctgaacagacactgcagggagagggcaggcggctgctgctgttgcacgggagaactttcctggtagggccctcacccgcccctgcccagacagggtgaggaaagggctcccccagtgaggttggtccgaggctgtgtgccctctgccagcgaccccgaagcagatatctcagtggggttagtgagaaggttgaagggtatgtagggcccagggtgggtgtccctgggagccctggaaatgtgcatatgtgcatgtgtctgccggggcctccctctgctgcctgctgggaccctggccactcatttttctcctccttgggagctgggctcttctgccctggctctgcacataagtgttagccagcagctccagaaaaatcccgattcccgggatctgccacgagtcactcctactccaccctgatggccagcagaggaagggccactcttctcatggggcacagccatcctttgccgggggggcatccagcccgggtggccacccctccttatctctgggtggttgcacatgcccttctttccccactccctgccacgagccactgcacaggaggctatctgtagccccaagctgcctttctgttggacaccaactttagtcttgggctgcaagccagcccagctgaggcgaagtggactccaggcagggaatgggttgcccaattctggtccctttcctttgctcagccccctctgttctgctgattgtagggatgtgcagggctgggagttggcactccccccgagtggggaggtgacagcttgtcacagtagccaggcttgggtgggttcagcactagctcgggacggtgtgtcacacgtctatagtaaaccagttctctgggaggggaaaaaagccctgatttattgcatttgggcagcttctgtggtgtaaattctcccagcagtgtcccatgtcatgctgccagcatcactgaatgcactgaactcagagttgggaagagatgcacataatcgctctcccggcacacctcatgcctcttccctgcctccccattcccctggctgcacttccttgccttctatggggttgaaatgttgaagtctcaactgtctctgttcacaagagccaccaaaagttaggggacttcagtcctagcccccagatggccgccctgaagctctctgggctcctcagcaataaagcactttattttc

SEQ ID NO: 70 - DNA, 2030 bp, Homo sapiens
ttttttttttttggagattttaaaaacactttatttaataaaagttaaacatacaaaactgaaataatacacatcctaaaaattaccttcttccattaataggaagacccttttctatgcatgtatttggcttaaactcaactcaggataactgtgatgatgttcacttacaccaacaaatgcagacaacctgatctaattaacaaaaattacaaacagctaaatgaacataatatacagggaaattatcgtcagattaatgcacaagaaatacaagaaatttttaatgatgaaatattcagtattcttgttcattaatttagccttgtgtttttacaaaaatagtatctacactgtatacagggctatacatcagctttttgttctcccatataaacatcacacatccaaaacatggtaccactgccgtaaatggaaaaaacaaaaaacaggaaaaaagcaaacatacaaaaaacaaaaacaccttagaaaagggagctcatcctaaggtttcttacataaaactaagagtacataaaaataaaacagctagatcaattttagagatggcctaataggcctgggaaacaagttattgaggaaaaacctcaaaacaaactttgccatttacaaattaacctatctttaagcttaactgaacgacagctaagttttaaagctgaaaataagaaaaatgaaaagatctcttttagcaggttggtgtttttgccttggtgttccaatgaattgctagagtatgtgtcaagttcaaagcatctgaaaatttcaagttacaacttacaaaaagtacataccataggttaagtaggcgcctgatattaggaagatcaataattcatctaagtgctgtatgaaacagcatctacaaaagttgctttattcaacaaactttgagggaaccgtggtactgataatgagaaaagttaaatgaatagcagttatcaaatgcaatttcttcacgtttcattctactgaagccaaccaatgacgacaatggtatcttgcttactcatctaacaaataatttacctttagaaaaatataaggataaaaaggtaaatgtaaagccctgcagagatgaaatccaacagtttttctgattattgaggcatcaaatgcctgacattgtatttagaggtatcttgatattgtgtcataggtttatcagcaattccacaggttcctactccaactttaccagtcacactctcaggtgaagcaaaaatactcctctttacctggccttttttgtttttagaataggctctgttgttgaattgttgccatttcactttctggtcctctctttcctgctcaagttcttttattctctgagcttttttcaaagctttcttctttttatattcacgctgctgggcaatcatttctttttttgacatgggtttgttgccactgtcctcctttgccttccttccttcttctacaggcttgaggttcaacagtggagtcacttcagcattgccataaccagcaaaggtgattgcagcggtgccattttcttcatctatctcctcaatctccgcttcataacactgtccatcttcactccagactgccatacacttgtctcctactttccatgaatgagtaggttgagtagaagcaaaactgtctgaacttgcaagcgtctcagaaggttgagttgacagaaggtctttggttagttctataacttcttgtaaatctttcttcaattttagcaaatcttcattttctccatttccagataatgcagcttcaacttgctggagctgagctttgtagcttgccagctgctttgctaaatcctctgacatcttgtgtggggctgggggcggggcggcgggaaggggtcggggcaaatgagcccagtggtagtggcggtggcagcagcagcagtagcagtagcaggaaaatcaccgcgacgacagcaaggcgacccggtctgaaaaggaagaactcggtcggcggcgagggggaagggaggaacgccgggcactggaaggagg

SEQ ID NO: 71 - DNA, 2283 bp, Homo sapiens
gggtgcttgtgtgtcggcgcgctgttcttgtgttgctcgctctgtctatggggtcgcccggctcttctccggtgtaagaggtcgtgcttgttggggccccgtgctgtcctctcgttcgggcccgcgagtctgctgcgccgcgaagccgggtggtcccggggccgtttgtgtaggtcgttgttgctgcgcccgctgcgcgttgtgttgtggtcgcggttgttgtttgtaggggggtggctgtgtgtgtgtgtttttttttttttcaagttttgggagaaaccttttattggcacaggcattccttgttaacttgacagggtgaagctgtaatttttcaaaaacagtaaaagctggtttctcctaaactattttccttgtggtagtagagatcagtgggtcagaaacaactcctgaccacttggtttccttttgagccgcgtcattaggaggcaatctgtaaaactagcacaggtctcccgctgttccactggctcacccacatgattagcagagtgcacgaaaaaataaaacttctattaaagaatcatgctgagcacaagatcagagaggttgtgacattgcaaactcgatagatgcagggggcctgggagactggcgttctccaaagggctcccaacaccatctctcctctgatttctgtgacaaatgtggaaagctacttgcttggaggtactgggggaactgatgggggaactttcatcctgttaggaactccgctttccattcctgcgtctctgtcttgctccctggagatggatggatcacggagggggccacagtcagctggggcagcaggtactccctacggcactagtctacagggggaaggacgctctgtgctggcagcggtggctcacatggcctgtctgcactgtaaccacaggctgggatgtagccaggacttggtctccttggaagacaggtctgatgtttggccaatccagtccttcagaccctgcctgaaacttgtatcttacgtgaacttaaagaataaaatgcatttctaccccgatctcgcccccaggactggcacgacaggcccacggcagattagatcttttcccagtactgatcggtgcgtggaattccagccaccacttctgattcgattccacagtgatcctgtcctctgagtattttaaagaagccattgtcaccccagtcagtgttccaggagttggcaaccagccagtagggtgtgccattctccactccccagcccaggatgcggatggcatggccacccatcatctctccggtgacgtgttggtacactcctgacttgtagagcaggaagtccgaatacacagagaaagctccctccacggggccgtttttgtagatctcggccatgatgtccttctcgctattggagacgctgtaggaattgtatccgtagtgcttgtcctgtttgtaggtcgggctgtagccaggctcacagatcttgctacacttgggggtatctccctcccccgtgcatgggggccgggagccgttgacgtggtgctcacagggagggatggagtacggtctgcaccctacatgggattcatagaggccaccagaaaccaggccttttcttgtccagaagttccaagcttcagcaggatagccaccattacagccgtccccacacatgctgccacagcaggtgagcaggtcctccgccgacacctccacgctgacgtgcgcattggtgtggatgcagatccggtcagagatggcttccacagccccgaaggcccagcaggagccacaggagccctggtctctgatctctttgatggtgggacactgtggccattgttcccgtgcatcgaagcttgcaggcagcttcaggtcctcggtaaacataactctctggggtggcttgggcccacccaggaaggtaccacatagcctcttcaagtagcccatgtccacgttgtagaagttgtgcccggcctgccacgtggtattccgtttgttgacatagttgaccagctcatccgacacgggatggaaagagggcctgctccgggcattggccaacaccagcaggcagcagagggaggcccagagctgccacatgttggaagccggatcctagatccactactcgggaggctgaggtgggaaccagatcgcttacatctgggtggctgaggctgccgtgagccgtggtcgcaccactgcacaccagcccagcgctgcagccgagagcctgcagcccagcctgcgcgcagcggagcggttggcgttgccggagcggttgccggagcc

SEQ ID NO: 72 - DNA, 765 bp, Homo sapiens
ttttttttttttcataaactgagattttattggttgaggatcagtacagacatttcaatttgtacacaaatcttaacatacgtaacgaaattctaaaaagccatgtattgtaattcttttttaaagttattccagtgactttccagcttaaaatttggaagcaaattttccttaagaggctatcaagtaccagtatcttcacgttggtcagctgttacatacggcccaccagttcacaactcaacagcacgtacactacatgttcaaatctgtaatctttcacagcacagtaacaaagttattaggaaaacaggactaccacaaagatgttacagagtgcacacaattctggcagagagagccatgatcaaagagtggttttctttaggaaacaattctactaaaaaacaacatggtaatagaagtaatttaaaatgttcaagacattaaatgcaggactgactccatattgccatttaatatgctttgtattataggatataaaaactaaccccccatctgtggaatgttaagctgacacccgagacagtcagagcctcccataattcaatatcccacactattttctggttgtaccaaaaaataaacaaccagcaaatgatttcacctcttaaaaaaaagcatttacacttaaaaaatgggatgaggtgggattccctccttcttaaaaatgttctagagctactaaaaaacttgcatttacaaatagttgataaaaatattcctctggattgtacaagaagg

SEQ ID NO: 73 - DNA, 1419 bp, Homo sapiens
ttttttttttttcaaacaatggtttgaaacaactactggaatattgtccacaataagctggaagtttgttgtagtatgcctcaaatataactgactgtatactatagtggtaacttttcaaacagcccttagcacttttatactaattaacccatttgtgcattgagttttcttttaaaaatgcttgttgtgaaagacacagatacccagtatgcttaacgtgaaaagaaaatgtgttctgttttgtaaaggaactttcaagtattgttgtaaatacttggacagaggttgctgaactttaaaaaaaattaatttattattataatgacctaatttattaatctgaagattaaccatttttttgtcttagaatatcaaaaagaaaaagaaaaaggtgttctagctgtttgcatcaaaggaaaaaaagatttattatcaaggggcaatatttttatcttttccaaaataaatttgttaatgatacattacaaaaatagattgacatcagcctgattagtataaattttgttggtaattaatccattcctggcataaaaagtctttatcaaaaaaaattgtagatgcttgctttttgttttttcaatcatggccatattatgaaaatactaacaggatataggacaaggtgtaaatttttttattattattttaaagatatgatttatcctgagtgctgtatctattactcttttactttggttcctgttgtgctcttgtaaaagaaaaatataatttcctgaagaataaaatagatatatggcacttggagtgcaacacacacacaaacaaaacgcacgagacaaaaaaacacgcagcgacacacgaacacacaggtgcggggcaacgcaccaggccagaacaacaagaaaggtgcggaccacacaccacctccaagagacgacagcaccaacgagagaacaagaaaaacacacgcaacgaggccgagcagcacaacagaacaggagaaaacaaaaccacggagagagaaccagaacgaaacagagcaaaaaatcagacagcgaggataagaaacaacaaaaaagcagtcacagaacgacgacacaacaatagcacaagccagaacaacaaagaacagcgaccacaccacaacgccaggcagacacccgaacacgcagcagcacgaccagcacgaagagagaacagacccccgacgaggcgcgggccgaccgacgacgaataagcaaaagcacacggcacaccacagagaccaaggcaacgaccacacgccgagacgccaacgagcacacaacacacacacagcgaccggcaggagagaagaacgagacacggcgacggagagagacagaaaagacagagaaacagaagaacaagcgacgacaaaggagacaaagagaggaacagacgacagacaaaaca

SEQ ID NO: 74 - DNA, 3933 bp, Homo sapiens
agcgatccgaggcccggccccggccccgccccgcgccgcgccgcgccgcttgccgccgggctagcactgacgtgtctctcggcggagctgctgtgcagtggaacgcgctgggccgcgggcagcgtcgcctcacgcggagcagagctgagctgaagcgggacccggagcccgagcagccgccgccatggcaatcaaatttctggaagtcatcaagcccttctgtgtcatcctgccggaaattcagaagccagagaggaagattcagtttaaggagaaagtgctgtggaccgctatcaccctctttatcttcttagtgtgctgccagattcccctgtttgggatcatgtcttcagattcagctgaccctttctattggatgagagtgattctagcctctaacagaggcacattgatggagctagggatctctcctattgtcacgtctggccttataatgcaactcttggctggcgccaagataattgaagttggtgacaccccaaaagaccgagctctcttcaacggagcccaaaagttatttggcatgatcattactatcggccagtctatcgtgtatgtgatgaccgggatgtatggggacccttctgaaatgggtgctggaatttgcctgctaatcaccattcagctctttgttgctggcttaattgtcctacttttggatgaactcctgcaaaaaggatatggccttggctctggtatttctctcttcattgcaactaacatctgtgaaaccatcgtatggaaggcattcagccccactactgtcaacactggccgaggaatggaatttgaaggtgctatcatcgcacttttccatctgctggccacacgcacagacaaggtccgagcccttcgggaggcgttctaccgccagaatcttcccaacctcatgaatctcatcgccaccatctttgtctttgcagtggtcatctatttccagggcttccgagtggacctgccaatcaagtcggcccgctaccgtggccagtacaacacctatcccatcaagctcttctatacgtccaacatccccatcatcctgcagtctgccctggtgtccaacctttatgtcatctcccaaatgctctcagctcgcttcagtggcaacttgctggtcagcctgctgggcacctggtcggacacgtcttctgggggcccagcacgtgcttatccagttggtggcctttgctattacctgtcccctccagaatcttttggctccgtgttagaagacccggtccatgcagttgtatacatagtgttcatgctgggctcctgtgcattcttctccaaaacgtggattgaggtctcaggttcctctgccaaagatgttgcaaagcagctgaaggagcagcagatggtgatgagaggccaccgagagacctccatggtccatgaactcaaccggtacatccccacagccgcggcctttggtgggctgtgcatcggggccctctcggtcctggctgacttcctaggcgccattgggtctggaaccgggatcctgctcgcagtcacaatcatctaccagtactttgagatcttcgttaaggagcaaagcgaggttggcagcatgggggccctgctcttctgagcccgtctcccggacaggttgaggaagctgctccagaagcgcctcggaaggggagctctcatcatggcgcgtgctgctgcggcatatggacttttaataatgtttttgaatttcgtattctttcattccactgtgtaaagtgctagacattttccaatttaaaattttgctttttatcctggcactggcaaaaagaactgtgaaagtgaaattttattcagccgactgccagagaagtgggaatggtataggattgtccccaagtgtccatgtaacttttgttttaacctttgcaccttctcagtgctgtatgcggctgcagccgtctcacctgtttccccacaaagggaatttctcactctggttggaagcacaaacactgaaatgtctacgtttcattttggcagtagggtgtgaagctgggagcagatcatgtatttcccggagacgtgggaccttgctggcatgtctccttcacaatcaggcgtgggaatatctggcttaggactgtttctctctaagacaccattgttttcccttattttaaaagtgatttttttaaggacagaacttcttccaaaagagagggatggctttcccagaagacactcctggccatctgtggatttgtctgtgcacctattggctcttctagctgactcttctggttgggcttagagtctgcctgtttctgctagctccgtgtttagtccacttgggtcatcagctctgccaagctgagcctggccaagctaggtggacagacccttgcagtgatgtccgtttgtccagattctgccagtcatcactggacacgtctcctcgcagctgccctagcaaggggagacattgtggtagctatcagacatggacagaaactgacttagtgctcacaagcccctacaccttctgggctgaagatcacccagctgtgttcagaattttcttactgtgcttaggactgcacgcaagtgagcagacaccaccgacttcctttctgcgtcaccagtgtcgtcagcagagagaggacagcacaggctcaaggttggtagtgaagtcaggttcggggtgcatgggctgtggtggtgttgatcagttgctccagtgtttgaaataagaagactcatgtttatgtctggaataagttctgtttgtgctgacaggtggcctaggtcctggagatgagcaccctctctctggcctttagggagtcccctcttaggacaggcactgcccagcagcaagggcagcagagttgggtgctaagatcctgaggagctcgaggtttcgagctggctttagacattggtgggaccaaggatgttttgcaggatgccctgatcctaagaagggggcctgggggtgcgtgcagcctgtcggggagaccccactctgacagtgggcacacggcagcctgcaaagcacagggccaccgccacagcccggcagaggggcacactctggagaccttgctggcagtgctagccaggaaacagagtgaccaagggacaagaagggacttgcctaaagccacccagcaactcagcagcagaaccaagatgggccccaggctcctccatatggcccagggcttaccaccctatcacacgtggccttgtctagacccagtcctgagcaggggagaggctcttgagacctgatgccctcctacccacatggttctcccactgccctgtctgctctgctgctacagaggggcagggcctcccccagcccacgcttaggaatgcttggcctctggcaggcaggcagctgtacccaagctggtgggcagggggctggaaggcaccaggcctcaggaggagccccatagtcccgcctgcagcctgtaaccatcggctgggccctgcaagggcccacactcacgccctgtgggtgatggtcacggtgggtgggtgggggctgaccccagcttccaggggactgtcactgtggacgccaaaatggcataactgagataaggtgaataagtgacaaataaagccagttttcaggtcaacacaaaaagggggcggcaaaaaccccaggggccaactagcgaccccctttgtgaacggggcccaaaaggcgcgctataaacagacgggcgcggttaacacgtgtgtggaaggagtgggtgattgtggagccaactggggggagtgtgggaccacacagaggcggggatgacaaagtgtgagacagacgcggagggtgaaacatcataagccatgtagaagtgatgagctagagagatcataggcgcaccgagcacacgatcgatctgagctgctgctgcagtgcatgtgtggtgtggt

SEQ ID NO: 75 - DNA, 3659 bp, Homo sapiens
ttttttttttttacagcttataacacaacttttattagaaaagttatacataacatagcatcaactattttcaagaacaatattaaacccgataagcaacaaaaaccagactaacaaaatgtgtaacaagaaactaatgacctttctaaaatcaaacattcaattatctacaatgtctttttacaaacggggaaaactccttggtttacaggcacatcatattgaatataaagctgcaatagcaattttatacaattaccactctgaagaaactgaatcattaaaacagtaattacgagttcacaaatttaaaacatttcacataattttaaattattgggtatacactgaagtctgagtttcaaaagtgatttttttttcccacaaaagtttcaacacttaagctagaactttcagtgttaactttgccctaaaaagttaagacatattctgataatcataacagtcacatgatttctgatgctatctggtctgttaataataaagtctttatttggatgtatttttcttcaattaaattacaggaaactggatataggatttcgttgcaacgctattaaagttccaaaccaggagtgtgcagcactggaaaaggagatcagtactaaaacttacaataaatatcagagaagccgttagtttttacagcatcgtctgcttaaaagctaagttgaccaggtgcataatttcccatcagtctgtccttgtagtaggcagggcaatttctgttttcatgatcggaatactcaaatatatccaaacatctttttaaaactttgatttatagctcctagaaagttatgttttttaatagtcactctactctaatcaggcctagctttgctcattttggagcctcactaaaataacagatttcagtatagccaagttcatcagaaagactcaaatggaatgatttacaaaatagaacactttaaaccaggtcagtcctatctttttgtagctgaaggctatcagtcataacacaatttcgcgtacacctctgctcattatggaattacacttaaaacgaatctcaagagggtgaccattgttgtttcagataccatccctaaggagagtggttaacaggaagattgccagtgttactgatggaaagaagtgtttgtttgtttttttttcttgtcaaagacttacaccatagttttaaattaaactgtcaggcattttctcagacaggttttccttttcaatgcagtaatgaagaactaagataaaaatcatgacttttgactgccactcaacattattacatgcaccaatattgcacacatctgttctgaactgttaaaatcatcttctgagtccttggggtgctgttttctccatcagaacacaaacacaacccatctaatcagtttccctcaaagatgaaattgacaaatttaatgtactggaaaaaaatgaagaaggaaaaaggcaaagactttgtacagacaaaaatctaagttttctcaaagggttctgtgtcccctacacatgggggcaatttgtaagcactagtgaatcaaacactagctataatgcttctagctccttatataatatggaaccttggtccaggtgttgcgatgatgtcactgtacggttcttcctgtgtcagctcaatagcttgctgctttttaagaaccaagaagctgtagaactttgcggcagcttgttttctgttcgtatttcgacataactcaagcaaactgatagattcagctccagttttagcaagagcacgctgaagaccatgaagcatctgctgagtccttttgttccatcttctttcttcctgatcttgatcgccccctgatgcatcttcatcctcttcctcttcatcatcttctttttccttctctttctccttctctttttctggcagaagttctaactctggtattagctgacagatatttggaggttcttctgggggaagctctacaggtggtatttccatctgctctacctgctgaggaggcatcacaggctctgggtcaatttgtccagcttttcgcttaactccctgaggtggtggtggaggcatagctgactcatctatgtttgttctgctggcctccatcactgactcctggaggcggcttggctcttcaataatgggctcatcgataacatcacgctgctgatgctgctgttgctggtcctctctaggaacctctggattttcaaattctttgaggaattcatccaaattatctgcctctcctcctttcctcctttttctaaggtcttctggtacaagcggtgtaagacagcgtgtaaagagcttcagtagtctgttattccacaaaggctgagcaggtaaagaaaacagtttttctactcctcctgtctctttccacatcatcaatttcttggtgggcggtgccagatccaaagtagtaacaatatctgaataatcactaagttgggctctaattgtcttgctatccaactctttgacactgtcaacaattagcttcctcttcctcttggcttttgtttctttaacagttatatcaataggctccaatgcaaatgcttcttcctcatttggaacaagtgttgtttgatcagtcatggttggcattggttcaacgggatccactgaatcaggactatcaggcccacccattgatacattatcatcctcatccatatcgtcatgtgcaggctgctctggcaacatcacccctgcctcagagagggcagggggatcatcaaagataccgccatcattattactaataagtttgtcatctaatattccaccatcatttccttctccaaaattatcatccttatattgatcttcatattctaaatggttaattttctcattcagattgctggtgctctgttcagactctaataggaggttagaagtagtagtgcttactaacatgtcgtcatcctcaaaagcactgccttctctcattatctcacgatcatccattccaaaatcaccaaaatcattttcttgtaaaatactgatgttcccaacttcttctctcatggttatctcttccactctactctgattcaagctgaactgctgggccacatcgatgtcatctaagtcaggcagtggctgatcaaagtcatgaaattcttcaggtaaagtaatggcattataagctgcttcccgattttcctcaggcaggtcaaccacacctggccgaaaagccatctttatcttaatgaatgcttcattacagtctgcaagaaggtatttggctttcctgtgatagattcgaactactcccagtaagagatgtcctgatgtccgtaatgccattttcacctttggtgagatgatactctccacgctgctctctaaattacactcgaacacatgggctttggttagcttcttatcccaatgggccgctagccaaattttggccagaggccctcttttactgagaacaaaatgtgcgtagaacattgttctggctggctatgaaaacagaagaaaaccttgctctccgctgggagttgggcgggctgggtggcccggggaggggaaaagggtcgggggagggggtggggaaaggggggagcccttgcgaggtgtagcttccgagcagctcccgccgccgccacagccggcgcctcctttccgattcact

SEQ ID NO: 76 - DNA, 1650 bp, Homo sapiens
ttttttttttttacgtattttatcattttattaggaataattccaaatgggttatgaagaaaatgtattcatcgaatttgatgagttttccaaaaactcttaatgaagatatgtctgcccaataaacaaaacatcagcagaactatcatatactgagcaaaaaatcaggctgataacaaaagcaacatgcaacataaaaaagacacaatataaaggaagacaatctgctgagtattaaaaaccatctaaatatcaattctttgcaaccagcacagaactaattggctatcaaatccaaaccccaccaaggttaagtttggctgatgtaggccaggagtcaatgtagggggaaaaatttcctcagtgcaagagagctgagtagtgttttggatctttctctggctggtacaagcagtattagaaaatctttttggcaagggagagaaataaatacaaatggaatgctacatttttaaattagcaaactgtctcaggaatgataaaggtatcagtaaagtagcaaggggataactttaaaacattatttgtctggggctcaaaaaacactcaaaacaatttatttaaaggttgcacaagagctatgtccaggcatttacgcttatgggaagtaaaattaaaagaggatacttttttcccaaggagaatttctttaaaaccaagcacattgctaaatagcaacattatactcggtaaacaataattggcaacaaaataagtttaatattctgcccaaaccagtcccagatactgtttaataaccaagatacaaactaattttgttgtaacaagcctagaccaattttatcaaacatgtccttggttagatatccaatttcatttaacgttttgaaagctcatttgacagccagtcaagtccttcatacagaccagttccttgtgttgcacaagtggcttgaacataccatgttctgttacgaagagactgaagccctagtttatctgtcatttcactgatggccatagcatttggcaaatcctgtttgtttgcaaaaagtagcagcactgcatctctcaattcatctaccagaagcattttctgcagctcatctgctacttcctgaattctttcacgatcgttgctatctaccacaaaaataagaccctgggtattctggaagtaatgcttccagagaggcctaattctatcttgaccaccaacatcccatactgtgaaacaaatgttcttatattctactgtttccacattaaaaccaatggtaggaatggtggtgactatctcccctaacttcagtttatacagaatggttgtcttgccagcagcatccaatccaaccatcaaaatgcgcatctgcttcttgccaaatagtcgggagaagagggaggagatagtgaggcccatggcggtagtggcacttgtgatgggcagaagcagaaggggtttggggcgaccccgtgctttctcctttcaagctcccaggcaaactaaacgagagggaagagaaagagcggaggaagaaagagggaggcagaaacgtctcagtggcccctgtgccgatgaagatccggcacaggaataagccggtagaggacctgctaggcgactggcgcggcagctccggctctagcctttaggctctggctgtcccc

SEQ ID NO: 77 - DNA, 2166 bp, Homo sapiens
gagatgcctgcccacagcctggtgatgagcagcccggccctcccggccttcctgctctgcagcacgctgctggtcatcaagatgtacgtggtggccatcatcacgggccaagtgaggctgcggaagaagagtctggctctgttgcccaggctggagtgcagtggcaagatcacggctcattgtagcctcgacctcccaggctcaagcaatcctcctgcctcagccctcctgccaagtagctgggaccacaggcctttgccaaccccgaggatgccctgagacacggaggcccccagtattgcaggagcgaccccgacgtggaacgctgcctcagggcccaccggaacgacatggagaccatctaccccttccttttcctgggcttcgtctactcctttctgggtcctaacccttttgtcgcctggatgcacttcctggtcttcctcgtgggccgtgtggcacacaccgtggcctacctggggaagctgcgggcacccatccgctccgtgacctacaccctggcccagctcccctgcgcctccatggctctgcagatcctctgggaagcggcccgccacctgtgaccagcagctgatgcctccttggccaccagaccatgggccaagagccgccgtggctatacctggggacttgatgttccttccagattgtggtgggccctgagtcctggtttcctggcagcctgctgcgcgtgtgggtctctgggcacagtgggcctgtgtgtgtgcccgtgtgtgtgtatgtgtatgtgtgtgtgtatgtttcttagccccttggattcctgcacgaagtggctgatgggaaccatttcaagacagattgtgaagattgatagaaaatccttcagctaaagtaacagagcatcaaaaacatcactccctctccctccctaacagtgaaaagagagaagggagactctatttaagattcccaaacctaatgatcatctgaatcccgggctaagaatgcagacttttcagactgaccccagaaattctggcccagccaatctagaggcaagcctggccatctgtatttttttttttccaagacagagtcttgctctgttgcccaagctggagtgaagtggtacaatctggctcactgcagcctccgcctcccgggttcaagcgattctcccgcctcagcctcctgagtagctgggattacaggcgcgtatcaccatacccagctaatttttgtatttttagtagagacgggttcaccatgttgcccaggagggtctcgaactcctggcctcaagtgatccaccggcctcggcctcccaaagtgctgggatgacaggcatgaatcactgtgctcagccaccatctggagttttaaaaggctcccatgtgagtccctgtgatggccaggccaggggacccctgccagttctctgtggaagcaaggctggggtcttgggttcctgtatggtggaagctgggtgagccaaggacagggctggctcctctgcccccgctgacgcttcccttgccgttggctttggatgtctttgctgcagtcttctctctggctcaggtgtgggtgggaggggcccacaggaagctcagccttctcctcccaaggtttgagtccctccaaagggcagtgggtggaggaccgggagctttgggtgaccagccactcaaaggaactttctggtcccttcagtatcttcaaggtttggaaactgcaaatgtccccttgatggggaatccgtgtgtgtgtgtgtgtgtgtgtgtgtgtgtgtgtgtgtgtgtgttttctcctagacccgtgacctgagatgtgtgattgagacgtcatttaccgatgggatggtgtgctgccacaacgaaccaaatctaaccaaaaacgcctgcgcaggcgccacaactattgcgcgggtgcggcaaccacacacggggtgatcttcgcaaatggccaccatggtacaatgtgtgatcccacagacccacactatctattgaaccggagggtgtatgctttcgcgcgcgggcccccccataaaggggcgcacccgagaattcatctgcacaacaaccggcggaaccccggttataaatgatcgtcacgcagagacagcccgactacaccagacagtccgcgcccagcaccgcaccgcccaggggcaccatcact

SEQ ID NO: 78 - DNA, 1343 bp, Homo sapiens
gaaaggtccatggacaatttgtgggccatttaattcagggcccccaattcgtacgtggagaagtgggaatgcaaaagtactttgacctttaaccttcggtccggcgcggtggagggaaacgcctccgtctctatataaggaattttccggtctcttcgggtcctttttcctctcttcagcgtggggcgcccacaatttgcgcgctctctttctgctgctccccagctctcggatacagccgacaccatgggtttcggagacctgaaaagccctgccggcctccaggtgctcaacgattacctggcggacaagagctacatcgaggggtatgtgccatcacaagcagatgtggcagtatttgaagccgtgtccagcccaccgcctgccgacttgtgtcatgccctacgttggtataatcacatcaagtcttacgaaaaggaaaaggccagcctgccaggagtgaagaaagctttgggcaaatatggtcctgccgatgtggaagacactacaggaagtggagctacagatagtaaagatgatgatgacattgacctctttggatctgatgatgaggaggaaagtgaagaagcaaagaggctaagggaagaacgtcttgcacaatatgaatcaaagaaagccaaaaaacctgcacttgttgccaagtcttccatcttactagatgtgaaaccttgggatgatgagacagatatggcgaaattagaggagtgcgtcagaagcattcaagcagacggcttagtctggggctcatctaaactagttccagtgggatacggaattaagaaacttcaaatacagtgtgtagttgaagatgataaagttggaacagatatgctggaggagcagatcactgcttttgaggactatgtgcagtccatggcatgtggctgctttcaacaagatctaaaatccatcctggatcatggcatttaaataaaagattgaaagattaaaaacatcaaaacacacaatcaaaaacaaaataaaaaaaaaaataaaaacacaaaagcacccacatcactcatacatatgcccgcctaccatactactcacacgcaactgacctctccaacccgtatcacatccccatccgcgccactcgcgaatgtcactaccatcctactacatcaccaaatattcgcacctagctaatacacacctactctactctaacactaaaagactaccctaaaaatactacatacagccacttccaactttatgctcactacaaacacaacaacaccacaacctctcactctaacacaactcttatcaaataccaacactaaacgaccacctgctctctacctctactctcacta

SEQ ID NO: 79 - DNA, 2792 bp, Homo sapiens
tataaaagctgggccggcgcgggccgggccattcgcgacccggaggtgcgcgggcgcgggcgagcagggtctccgggtgggcggcgcgacgccccgcgcaggctggaggccgccgaggctcgccatgccgggagaactctaactcccccatggagtcggccgacttctacgaggcggagccgcggcccccgatgagcagccacctgcagagccccccgcacgcgcccagcagcgccgccttcggctttccccggggcgcgggccccgcgcagcctcccgccccacctgccgccccggagccgctgggcggcatctgcgagcacgagacgtccatcgacatcagcgcctacatcgacccggccgccttcaacgacgagttcctggccgacctgttccagcacagccggcagcaggagaaggccaaggcggcgtgggcccacggcggcggcggcggcggcgactttgactacccgggcgcgcccgcgggccccggcggcgccgtcatgcccgggggagcgcacgggcccccgcccggctacggctgcgcggccgccggctacctggacggcaggctggagcccctgtacgagcgcgtcggggcgccggcgctgcggccgctggtgatcaagcaggagccccgcgaggaggatgaagccaagcagctggcgctggccggcctcttcccttaccagccgccgccgccgccgccgccctcgcacccgcacccgcacccgccgcccgcgcacctggccgccccgcacctgcagttccagatcgcgcactgcggccagaccaccatgcacctgcagcccggtcaccccacgccgccgcccactcccgtgcccagcccgcaccccgcgcccgccgtcggtgccgccggcctgccggccctggcgagcgcgctcaaggggctgggcgccgcgcaccccgacctccgcgcgagtggcggcagcggcgcgggcaaggccaagaagtcggtggacaagaacagcaacgagtaccgggtgcggcgcgagcgcaacaacatcgcggtgcgcaagagccgcgacaaggccaagcagcgcaacgtggagacgcagcagaaggtgctggagctgaccagtgacaatgaccgcctgcgcaagcgggtggaacagctgagccgcgaactggacacgctgcggggcatcttccgccagctgccagagagctccttggtcaaggccatgggcaactgcgcgtgaggcgcgcggctgtgggaccgccctgggccagcctccggcggggacccagggagtggtttggggtcgccggatctcgaggcttgcccagaccgtgcgagccaggactaggagattccggtgcctcctgaaagcctggcctgctccgcgtgtcccctcccttcctctgcgccggacttggtgcgtctaagatgagggggccaggcggtggcttctccctgcgaggaggggagaattcttggggctgagctgggagcccggcaactctagtatttaggataacttgtgccttggaaatgcaaactcaccgctccaatgcctactgagtagggggagcaaatcgtgccttgtcattttatttggaggtttcctgcctccttcccgaggctacagcagacccccatgagagaaggaggggagcaggcccgtggcaggaggagggctcagggagctgagatcccgacaagcccgccagccccagccgctcctccacgcctgtccttagaaaggggtggaaacatagggacttggggcttggaacctaaggttgttcccctagttctacatgaaggtggagggtctctagttccacgcctctcccacctccctccgcacacaccccaccccagcctgctataggctgggcttccccttggggcggaactcactgcgatgggggtcaccaggtgaccagtgggagcccccaccccgagtcacaccagaaagctaggtcgtgggtcagctctgaggatgtatacccctggtgggagagggagacctagagatctggctgtggggcgggcatggggggtgaagggccactgggaccctcagccttgtttgtactgtatgccttcagcattgcctaggaacacgaagcacgatcagtccatcccagagggaccggagttatgacaagctttccaaatattttgctttatcagccgatatcaacacttgtatctggcctctgtgccccagcagtgccttgtgcaatgtgaatgtgcgcgtctctgctaaaccaccattttatttggtttttgttttgttttggttttgctcggatacttgccaaaatgagactctccgtcggcagctgggggaagggtctgagactccctttccttttggttttgggattacttttgatcctgggggaccaatgaggtgaggggggttctcctttgccctcagctttccccagcccctccggcctgggctgcccacaaggcttgtcccccagaggccctggctcctggtcgggaagggaggtggcctcccgccaacgcatcactggggctgggagcagggaaggacggcttggttctcttcttttggggagaacgtagagtctcactctagatgttttatgtattatatctataatataaacatatcaaagtcaatgtcggtgtcttttacaaaccacgacaagaagctacttccaaggttgtctgtgggccaggtcacattagtaactaataacagcattttccctggcggaaatcctgactttcatgagctctccatcatcctgaggccctctttacctagggggtgacttacttccca

SEQ ID NO: 80 - DNA, 848 bp, Homo sapiens
caatttttttttttttttttttttttttttttatggttttcaatgttttatttcacaaattgttcagatttgttcataaaagatatgttacaggaacattttagaaatcaaaccagttctactgaaacaattgcaacaacgtggcccctgttcatgcaaagcacaaaaaacatttacaataaaactttgtacacaggaagtagcaaaatacatcatttttcatagaaaaaagcacacacataaactgcgggctgagtgagcctacagacaatatgagaaaccagcacacgctttggaatacggtagggcaaaactcctaaggaagccgaaaatgttcatcctgtgggcaggagagccaggaacgccgttggcttggtacaagatctttttaaacacagggtaagtgttggtagcacgaggggcctctattccacacacaggagaggtggtgctagggacagggcttatcatttatagtcttgtttccattttctgaagacaaatattccagtttcaaaatgtttgtggggatgataaagacagccaggtccatggccgggcgcagtggctcatgcctgtaatcccagcacttcgggaggccaaggtgggtggatcacctgaggtaaggagttcgagaccagcctggccaacataatgaaaccccatctctactaaaaatacaaaaattagccgggcatggtagctcacgcctgtagtcccaggtacttgggaggctgatgcatgagaattgcttgaacccgggaggcggcagttgcaatgagcagagatcacgccactgcactctaccttgggcaacagagtgaaacttggtctcgggaaaaaaaaaa

SEQ ID NO: 81 - DNA, 2221 bp, Homo sapiens
ttttttttttttccttttaaagtcatctctataggaaggtgctgggcagggatcccagagaaagaaagggtccaagactccattaactgccctggatgaagggcactgctacagcagctagtaccagagactctcctatctcacggttgaggcagacccaggatagaatagagaataaaaggaatgcttataggaaacaattttgtatggaatgctagatggccaagcctcagcctttggtccagtgcaacccttgcctcgcttgtcaacagtgaaaaattagtttggttagaagaaccatctggaaacacaccagcttctgctaccttcatgctcattgttaaaaaaagattaaccagtgtgaacattctgatctgttaattccagggactgttttctttccaatggactgtttgttggtagaataacccccaaaagctcaaagctaaaatgcatcatcagtcctagtcggcagttccttaagaatggactggcggcgtggttgagctgatatggaaaagctgcaccttcctgcagaagatcaactgacctgctatcccaccccaaatttcagcctgaggtatatttcagtgaaggcaggtagctgtgcttctcagagcagagaagcagttttaagagcaaaaaggtagaggaaatctagaaaagaaccgtcttgatacagatttatcccatggtgtgaagggagggcaaagaacccagtggcacttcgcttatccagcaatttctgtcactgtggtgaccaacttctgcccgttccatagggtcttgaactgctcaggaactgggaattcattaaagtcaccgccttctgtaggaatgaggacattcatctcggaagatttggcactgactatttcacaatccagggaattcttgctcaggtaagcatggcagccatctgttttgttgatggatatggttggcactttacccattacctgaactttgacatccttactgttgattatctccacaatgcccaccacgtcatcgaataccaggccaagtttcttacagttatctactgtaatggagttaattttgcccttgatttgcaatgtcgtgttgacacacttgtatatgtaagccacctgtttcagctctgtgtcctcaatcaccaggttggaaacattttcctgattttccactctccacttcttgccctccagttcaagtacagctggctccttctttgtggctcgtttgggggatgggctggtttggggtttaggtgcagagaatggtttggggccactgcgtactggaccactctgagccttcagggcagggttcttgtgagtcttcatgtcatcagatacatgtttcagggcatgtgtaatgctctccccctgattaatctgcgcgaacagtgctgagcgggaagcagactcatctgagcctgaactggtagagactgggggaggaggggggcctggtggagggggaggaggacctgatccggcagagggtccagatggcagtccgctcagttcttttgccacaggccccgttttgctccaggccagtccggtggtatggaactccttaatgtaagcctgcagctctgtccatatacttaaataagctttgacccagtctacatgcttcttatccacatctttgtactctttgaggactcggtttgtataaaacatggcggcatcattcatttctttcacataagggccaggcttgggagccatagccacccagcccagggcctggatactttcgctgacagctgacaggtgattaaacaacttgctgcctcggttcttctcccgaaaggttatcacttctttgatctgctctgagatgggtgccaacaaatcggaaagcttattttctgctggctgttgacactgagaagctgtaaccaacagagctcgctccaacttcaaacctgtgtggaccatctccgcatgtttctgcacgtctcccccaatctctttactgatcttcaagtactctgccacaggaccagcaagcagcgagtcaaatgcctgcacatatggagctgctcctgcttttgaaggactgtctgcatacccacggtgcatgtcagaggtatgagatactgcctccaggcggcccactgccctctccaatctttctaccagattttgcatgtcagccataatggaccacctgctcagagttccgcctcacctccggactgcgatcagccgctctccgcaat

SEQ ID NO: 82 - DNA, 3619 bp, Homo sapiens
ggcggggggcgcacagagccagaggggcttgcgagcggcggctgagggaccgcggggagggggcgccgagcggctccagcgcagagactctcactgcacgccggaggccccttcctcgctccgcccgcgcgaccgcgcgccccagtcccgccccgccccgctaaccgccccagacacagcgctcgccgagggtcgcttggaccctgatcttacccgtgggcaccctgcgctctgcctgccgcgaagaccggctccccgacccgcagaagtcaggagagagggtgaagcggagcagcccgaggcggggcagcctcccggagcagcgccgcgcagagcccgggacaatggggccgcggcggctgctgctggtggccgcctgcttcagtctgtgcggcccgctgttgtctgcccgcacccgggcccgcaggccagaatcaaaagcaacaaatgccaccttagatccccggtcatttcttctcaggaaccccaatgataaatatgaaccattttgggaggatgaggagaaaaatgaaagtgggttaactgaatacagattagtctccatcaataaaagcagtcctcttcaaaaacaacttcctgcattcatctcagaagatgcctccggatatttgaccagctcctggctgacactctttgtcccatctgtgtacaccggagtgtttgtagtcagcctcccactaaacatcatggccatcgttgtgttcatcctgaaaatgaaggtcaagaagccggcggtggtgtacatgctgcacctggccacggcagatgtgctgtttgtgtctgtgctcccctttaagatcagctattacttttccggcagtgattggcagtttgggtctgaattgtgtcgcttcgtcactgcagcattttactgtaacatgtacgcctctatcttgctcatgacagtcataagcattgaccggtttctggctgtggtgtatcccatgcagtccctctcctggcgtactctgggaagggcttccttcacttgtctggccatctgggctttggccatcgcaggggtagtgcctctcgtcctcaaggagcaaaccatccaggtgcccgggctcaacatcactacctgtcatgatgtgctcaatgaaaccctgctcgaaggctactatgcctactacttctcagccttctctgctgtcttcttttttgtgccgctgatcatttccacggtctgttatgtgtctatcattcgatgtcttagctcttccgcagttgccaaccgcagcaagaagtcccgggctttgttcctgtcagctgctgttttctgcatcttcatcatttgcttcggacccacaaacgtcctcctgattgcgcattactcattcctttctcacacttccaccacagaggctgcctactttgcctacctcctctgtgtctgtgtcagcagcataagctcgtgcatcgaccccctaatttactattacgcttcctctgagtgccagaggtacgtctacagtatcttatgctgcaaagaaagttccgatcccagcagttataacagcagtgggcagttgatggcaagtaaaatggatacctgctctagtaacctgaataacagcatatacaaaaagctgttaacttaggaaaagggactgctgggaggttaaaaagaaaagtttataaaagtgaataacctgaggattctattagtccccacccaaactttattgattcacctcctaaaacaacagatgtacgacttgcatacctgctttttatgggagctgtcaagcatgtatttttgtcaattaccagaaagataacaggacgagatgacggtgttattccaagggaatattgccaatgctacagtaataaatgaatgtcacttctggatatagctaggtgacatatacatacttacatgtgtgtatatgtagatgtatgcacacacatatattatttgcagtgcagtatagaataggcactttaaaacactctttccccgcaccccagcaattatgaaaataatctctgattccctgatttaatatgcaaagtctaggttggtagagtttagccctgaacatttcatggtgttcatcaacagtgagagactccatagtttgggcttgtaccacttttgcaaataagtgtattttgaaattgtttgacggcaaggtttaagttattaagaggtaagacttagtactatctgtgcgtagaagttctagtgttttcaattttaaacatatccaagtttgaattcctaaaattatggaaacagatgaaaagcctctgttttgatatgggtagtattttttacattttacacactgtacacataagccaaaactgagcataagtcctctagtgaatgtaggctggctttcagagtaggctattcctgagagctgcatgtgtccgcccccgatggaggactccaggcagcagacacatgccagggccatgtcagacacagattggccagaaaccttcctgctgagcctcacagcagtgagactggggccactacatttgctccatcctcctgggattggctgtgaactgatcatgtttatgagaaactggcaaagcagaatgtgatatcctaggaggtaatgaccatgaaagacttctctacccatcttaaaaacaacgaaagaaggcatggacttctggatgcccatccactgggtgtaaacacatctagtagttgttctgaaatgtcagttctgatatggaagcacccattatgcgctgtggccactccaataggtgctgagtgtacagagtggaataagacagagacctgccctcaagagcaaagtagatcatgcatagagtgtgatgtatgtgtaataaatatgtttcacacaaacaaggcctgtcagctaaagaagtttgaacatttgggttactatttcttgtggttataacttaatgaaaacaatgcagtacaggacatatattttttaaaataagtctgatttaattgggcactatttatttacaaatgttttgctcaatagattgctcaaatcaggttttcttttaagaatcaatcatgtcagtctgcttagaaataacagaagaaaatagaattgacattgaaatctaggaaaattattctataatttccatttacttaagacttaatgagactttaaaagcattttttaacctcctaagtatcaagtatagaaaatcttcatggaattcacaaagtaatttggaaattaggttgaaacatatctcttatcttacgaaaaaatggtagcattttaaacaaaatagaaagttgcaaggcaaatgtttatttaaaagagcaggccaggcgcggtggctcacgcctgtaatcccagcactttgggaggctgaggcgggtggatcacgaggtcaggagatcgagaccatcctggctaacacggtgaaacccgtctctactaaaaatgcaaaaaaaattagccgggcgtggtggcaggcacctgtagtcccagctactcgggaggctgaggcaggagactggcgtgaacccaggaggcggaccttgtagtgagccgagatcgcgccactgtgctccagcctgggcaacagagcaagactccatctcaaaaaataaaaataaataaaaaaaaaa

SEQ ID NO: 83 - DNA, 1189 bp, Homo sapiens
cgtacccccgtggtctttgaattagtccgagtggagagagcgagctgagtggttgtgtggtcgcgtctcggaaaccggtagcgcttgcagcatggctgaccaactgactgaagagcagattgcagaattcaaagaagctttttcactatttgacaaagatggtgatggaactataacaacaaaggaattgggaactgtaatgagatctcttgggcagaatcccacagaagcagagttacaggacatgattaatgaagtagatgctgatggtaatggcacaattgacttccctgaatttctgacaatgatggcaagaaaaatgaaagacacagacagtgaagaagaaattagagaagcattccgtgtgtttgataaggatggcaatggctatattagtgctgcagaacttcgccatgtgatgacaaaccttggagagaagttaacagatgaagaagttgatgaaatgatcagggaagcagatattgatggtgatggtcaagtaaactatgaagagtttgtacaaatgatgacagcaaagtgaagaccttgtacagaatgtgttaaatttcttgtacaaaattgtttatttgccttttctttgtttgtaacttatctgtaaaagggtttctccctactgtcaaaaaaaaatatgcatgtatagtaaattaggacttcattcctccatggtttctttccttaatcttactggtcattgttcctaaaaacctttatttttagaacaacttgatccaagtaaccatgtttgcatggtggcttaactctgggatatattcttaaggcccttctggcacatctaaaccttagatgggagttggtcaaatgaggggaacatctggggttatgccttttttaaagtagttttctttaggaactgtcagcatgttgttgttgaagtgtggagttgtaactctgcgtggactatggacagtcaacaatatgtacttaaaagttgcactattgcaaaacgggtgtattatccaggtactcgtacactatttttttgtactgctggtcctgtaccagaaacattttcttttattgttacttgctttttaaactttgtttagccacttaaaatctgcttatggcacaatttgcctcaaaatccattccaagttgtatatttgttttccaataaaaaaattacaatttacccagaaaaaaaaaa

SEQ ID NO: 84 - DNA, 2891 bp, Homo sapiens
ggtgggcggggggaggaggcggccctagcgccattttgtgggagcgaagcggtggctgggctgcgcttgggtccgtcgctgcttcggtgtccctgtcgggcttcccagcagcggcctagcgggaaaagtaaaagatgtctgaatatattcgggtaaccgaagatgagaacgatgagcccattgaaataccatcggaagacgatgggacggtgctgctctccacggttacagcccagtttccaggggcgtgtgggcttcgctacaggaatccagtgtctcagtgtatgagaggtgtccggctggtagaaggaattctgcatgccccagatgctggctggggaaatctggtgtatgttgtcaactatccaaaagataacaaaagaaaaatggatgagacagatgcttcatcagcagtgaaagtgaaaagagcagtccagaaaacatccgatttaatagtgttgggtctcccatggaaaacaaccgaacaggacctgaaagagtattttagtacctttggagaagttcttatggtgcaggtcaagaaagatcttaagactggtcattcaaaggggtttggctttgttcgttttacggaatatgaaacacaagtgaaagtaatgtcacagcgacatatgatagatggacgatggtgtgactgcaaacttcctaattctaagcaaagccaagatgagcctttgagaagcagaaaagtgtttgtggggcgctgtacagaggacatgactgaggatgagctgcgggagttcttctctcagtacggggatgtgatggatgtcttcatccccaagccattcagggcctttgcctttgttacatttgcagatgatcagattgcgcagtctctttgtggagaggacttgatcattaaaggaatcagcgttcatatatccaatgccgaacctaagcacaatagcaatagacagttagaaagaagtggaagatttggtggtaatccaggtggctttgggaatcagggtggatttggtaatagcagagggggtggagctggtttgggaaacaatcaaggtagtaatatgggtggtgggatgaactttggtgcgttcagcattaatccagccatgatggctgccgcccaggcagcactacagagcagttggggtatgatgggcatgttagccagccagcagaaccagtcaggcccatcgggtaataaccaaaaccaaggcaacatgcagagggagccaaaccaggccttcggttctggaaataactcttatagtggctctaattctggtgcagcaattggttggggatcagcatccaatgcagggtcgggcagtggttttaatggaggctttggctcaagcatggattctaagtcttctggctggggaatgtagacagtggggttgtggttggttggtatagaatggtgggaattcaaatttttctaaactcatggtaagtatattgtaaaatacatatgtactaagaattttcaaaattggtttgttcagtgtggagtatattcagcagtatttttgacatttttctttagaaaaaggaagagctaaaggaattttataagttttgttacatgaaaggttgaaatattgagtggttgaaagtgaactgctgtttgcctgattggtaaaccaacacactacaattgatatcaaaaggtttctcctgtaatattttatccctggacttgtcaagtgaattctttgcatgttcaaaacggaaaccattgattagaactacattctttaccccttgttttaatttgaaccccaccatatggatttttttccttaagaaaatctccttttaggagatcatggtgtcacagtgtttggttcttttgttttgttttttaacacttgtctcccctcatacacaaaagtacaatatgaagccttcatttaatctctgcagttcatctcatttcaaatgtttatggaagaagcacttcattgaaagtagtgctgtaaatattctgccataggaatactgtctacatgctttctcattcaagaattcgtcatcacgcatcacaggccgcgtctttgacggtgggtgtcccatttttatccgctactctttatttcatggagtcgtatcaacgctatgaacgcaaggctgtgatatggaaccagaaggctgtctgaacttttgaaaccttgtgtgggattgatggtggtgccgaggcatgaaaggctagtatgagcgagaaaaggagagagcgcgtgcagagacttggtggtgcataatggatattttttaacttggcgagatgtgtctctcaatcctgtggctttggtgagagagtgtgcagagagcaatgatagcaaataatgtacgaatgttttttgcattcaaaggacatccacatctgttggaagacttttaagtgagtttttgttcttagataacccacattagatgaatgtgttaagtgaaatgatacttgtactccccctacccctttgtcaactgctgtgaatgctgtatggtgtgtgttctcttctgttactgatatgtaagtgtggcaatgtgaactgaagctgatgggctgagaacatggactgagcttgtggtgtgctttgcaggaggacttgaagcagagttcaccagtgagctcaggtgtctcaaagaagggtggaagttctaatgtctgttagctacccataagaatgctgtttgctgcagttctgtgtcctgtgcttggatgctttttataagagtggctgctggaatcttataactggttatacttgttctcgtctgacacacaaaagggggctaaatccggggcaattcgtcccttgtaagggcagagagttaagcgcgggaacagaaacgctttacccttgttgaccccccgaatgtttgttgtgaaagctctgcca

SEQ ID NO: 85 - DNA, 1842 bp, Homo sapiens
ttttttttttttattcaaataaaattttaatgatttcagttcctgaaaatgtagtgtcattaaaggtcatttcctgctaaatttcaaattacagatttgtgggccattcctgagcagaagcatcatttctactaaatattcagcttgttaactaaggtaactgacagtatcatggcaggaggtgagaaggagcaatgatcagctcatagctaagaaaagggaaaaaaacaataaccaaagcaaaaaacaaaatagctacagatattagtaaaataataatacaatcccaaacatccacctcttaaattactacaaaaacaataccaataaagttatagcaaatacagtcttcacagatttgagtaactttatttgcattttatagtgatttcttaaggcctatatccaatgaaaccattttaaaagctctatgaggagtggaattttagatgtctattacacttgtcttttaaaagaaaaatgcttaaatttcagaatgagcaagattcacttttgtaggtagaggccctgcttcttcatgatcttcagttttagatctaacaaccacaagagaagaagctggatatctgtttagcttttgttcattcataaactccaagtcaccatagatactcagcttctcagagggaacatactgctccacagctgtagcaacagttgcacaacaaatccaaagcaataccatcaccgagaggacaagagttgtagttaaaatccacccagagttaagagagaggcatcttaaaaagccatcactttctccatcttcaagaaaattcctgtgcgcttgtgaatttctcatttgcagatctgaggacattttgcttagagatgattctctcaaatttgtaggctcctgctccaaatgtggtgcgtactggatttctggcttagactggaatataactatttttccgtcatcggcttgaagataaaaagtccatgaagaggttatgaagctctgtgcggagtccatcatgtcactccagaatgacctcaccagagttagaggaaagagtaggtgcatttttggcatcagggacataagttgttcttgtctcagttcagcgaatggcagctgattctggcaaccaagatggcaagcatattgctcatcagattgggaatatgcttctgtacatgcagattcacattccaatttagttcgatttaagtcaattccatcatccacaaactgacaaattgaaaacagcctgcaacctctctgacatgcgtacaactcctcttccttagggtaggtgtgcaaggggtaggtcaactgacaggcccggtggcaagacgccgtatcacccaagaccgagtcaaatgcttcagccgaagcggtccccgaacctccggccaaggccatggtcagcagcagcagcggcgggagccccagttgggtcctcacccagaggctccccttcggcgccgccatcttgttcccctctgtcacagcagctcaagatggttgagtacagatgggtgacgttgcaggaataccctccgaagggtttcagtgggtccagggttagggtgattgagactgagatattcaccgggcccgagtcctccagggcctggggggactgggtggaagctcgggcctgcccgctggtcattgtactttccggagttgtggtgtcgtttgtgagatgcttgagggtttcattctctgatacacacaagtccaaatcattgaaccgtagcagaaaagtattccaatcctctgccatttctggggatttaatctccttgattttgaagaagtagcccagggtcaggaaagctatggccatggcgcttacgctgcctcgtgcc

SEQ ID NO: 86 - DNA, 3441 bp, Homo sapiens
aaggagcgtccctgcttcacccccaacttggctggagaagaaaggacaagaggcagcagggtgaagaagaagccccccatcccagctggtggagatagttctggaactggaccccgcagctgcgtgggcagccgacacacccaccccagcactggcaccagaccagagccagagccaggacctgggcaaagtgcagccgtgcaccctgcctggtcactgctctcccagccctgcctgggcctacctcctgcccagctctgcttgggaccctctgggcatgcagcagcagtagcctaagggctctggtcacttccagggctctatagggcagcagagcagagcaaaagggtgcatatgctgggagctgtcacctccactcctaggcttttctgcctagagcagaattataggggcagtatacatccaggggtctgtgcggtggggctgggggattccttaagtgactttgggaaggatttgttttcccgagcatcaatttcacacctgggcattgcaccccaggctatgcagtctttcagtgtgaggaaggggcagaacaagaatgaggcggccccgtggcctcaaggaagcttgtggctttggaggatctgactccgcagagtctgtgccaatgtggggtgagcagggcccctgccatggagcagcaggaatttgagggacggagcaggttaaagaatgggaaacatcttcacttgtttttttttcttgcaaactactccctgctactcattgagactggttactggaagcaacttgttaagatttttctttctgggcgggcgcggtggctcacgcctgtaatcccagcactttgggaggccaaggcgggtggatcacctgaggtcaggagttcgagaccagcttagccaatatggtgaaaccccgtctctactaagaatacaaaaattagccgggtgtggtggcatgtgccagctactcgggaggctgaggcaagagaatcacttgaacctcggaggctgaagttgcagtgagccaagattgagccattgctctccagcctgggtgacacagcaagactctgtctcaaaaaaaaattttttatttctttcttttccatggaggcctagagtccctgtgaaggctaggaaggggctgctgatcccaggagtgcccacgaggagtggggggcactgttggcccataatcaggcaaacacccatcatttcatgggggattcatgaaatcatagtcaggcaaacacccgtcatttcatggctaagcatttgcagaaggtggaggattctcccccgagtccccaaatcagcagcctgtgctagggaccagagcaccgggggcaagaagacagaaccaatgtgggagtggggatggtcactaaatctgactgtgccacacaagcccatgatgaccttggcactggtttgggtggcaggatatgaaggaagctgtaggcattattgaaaaaatcattgttcagccaacagggtgaggctcccagcaaggccgtgccatcttcccacctccctgtgcccagagggttagactgtaagctcccggagggcgaggctggggctgagcgtgcctccacgtccccaaggcacagggtgcacagtgggtgctcactgaatatagtggactagtgagcagaggatgagaggactaccctgtaatgagccttggacagtctggcatttgccttaactcccactcccatgccctgggatcactgttggatatttactccatgaggacaaatactggggaggtgtggagaggagggagggcaggttcctcttactttcacccattgctgagaatgagcgcctgttggcactgcctttgtgagcctccgggagcaggtaacctgcggcccaagcccgcctaggactccacatcaggcaggcacaggactggccccttgtcctcataaaaactctcagtacagcttaaactctgtaagatctaaccagccaggaggaccctcgcttcctctccgccatgcttgccacctcttgcttctgagagtccatctcagttcgcagttctgtgacttgcattgacctggctccaatcaagctacaactcaagcagtcacggggagaaggattgtagatgggccagtgactcacagggtcaggcactcgggggagcctgagtcaggaggtcagtgggccctggaagggagggggcaagcctgggtgggtaaggttctgggccccaggcaagaaggcagagtttctccgcaggggtgtgtgcaagagctagctgcgcagaaggtctccgctggctctccaagccgggcttgtgaaataggaacgccaacatcctcctccacaggcagtggcaggcacctcctcctcaggtgccccccaagccctatctgatgggcaaaggtgaacgcagggcggtgggcttttcctgtgcagagggagactgattcaaagggtcatttatgacctttcacaagtcccacatcctgcccaatggccaggtcttgggatgctgttgcaagatggttctgtgactccatgtgactgtctgatgattgccccagctggggaaaaggctcccatgtctctttctcataaaaccagtgggcaaggccgggcgcagtggctcacgtctgtaatgccagcacttcgggagaccaaggtgggcggatcacctgaggtcaggagttcaagaccagcctgaccaacatggtgaaaccccgtctctacaaaaatatggaaattagctgggcatgacggcgggtgcctgtaaccccagctacttgggaggctgaggagggataatcagttgaacccaggaggtggaggttgcagtgagccgagatcgcgccactgcactccagcctgggtgacagagcaagactccatctcaaaaacaaacaaacaaaaaactagcgggtgaaatgattcagtgacctaaggacagccagagcactaagctgctgggaacccatctgtgctgaaatgtagatttcccaggaaactcaggcttgggacaggcgcctacctgctcctcgggcaccaggtgattaggagaggtcgaatctcatttccacgtgagtgaggataaagactgggctgccaaggaggactcctcataaacattgacaaattgctctgccccgcctgtgatcccagacgactcctgcagtctgggatcctgagtgtcctgtgggttcatctcggatgggcgctgcataaacagcctgcagggaacgtctgggagaaccagcttcacaacagatataataaggaagaagtttgaaatattgcaagaattgcgaaagtgtgacacacagatacaaagtgggcacatgctcgtgggaaaatgttgccaatagacttgcttgactctggagttaccccgaaccttcaatttgtttaaaaaaaaaaaggcaatatcttgacgtgcaataaagtgaactgcaat

SEQ ID NO: 87 - DNA, 2696 bp, Homo sapiens
ttttttttttttgatatttaaaatctttattgtttcatcatcaaaagttttctttccatagaagaatggtaatgttgtatcagtgcatattctatggaaaattcatatctcaagtaactagcctagaaatcagagacagcactatgtcaagctagtatacaaggtcaaagacacaatgctgccaatgcaattagtatatagaaataatacgcagctgttagaaaaagtctgtggccaagtggataaaacagtagcagtgcactgcactgacatccagaacagaaaatagggaaggaccagagaatgcacttcctgcaaaaaaaaaagtccagtagatcacaagcacaaagagttcccaactgtctcaccagctctctaactcatgtgtacctgcaccttcctcttgaaatctgaacattataataccacaagccactttcagcctccagtgggaaggctccagccacacgccgatatttcgtcctgcttcccgtcatctcatatctaaaagtcatggcttaagttaggcaataaaacctgtggctttaggcatctttagtaaaaaagctgaacaaatcccaaatttattcccattttcttgagaaataaacttcataaaacaacagacagctgtcatgattactgagttttggctgatggcgaaataatttttatgtaagtatactgaataaacatacaaacaaatatccttaacaaaatactgtcagaccaacttgaatgtttttataacccactcctgaaaaaagtcctgataattattagatgtaaacgaccactataaattgatcatgcctggttactgggaattttttggtcaggtatgtttctgaagctgctatatagctggacttggctactttgcattaactcacacaacaaatgccttttataaggaaacagcagatctatcatgatgaactcaaaatcaaaacagttcagaggtatacaggaaacttgtcttaaaaatacttttaaattacatatgatataaccttagagaataagaactactattaccatggtctaaatcttaaactgttaatgcatgaattatctgtaagactaacaagttacttgttaatcatggcaaggccttgcaggggagggggcactctgaatgtacggcatagcaattattttccaggtaagtaaacacttctaagtgttattaaactatatttgaaaagttattttatgtaatatatacaacataccaaataagtcaaaaggaggaagcagaggaaggttttctggcatatatgatgcaaacatacaactgtccctcatcagtagtggttccatgtatgtccattttaacagggtaaaacatgaaaggttgataggagatcacaaatttcacttataaatagaaacaggattcaaaaactggaatttcaatgtcatttcttcccacattgcaactcactctaacaataataaacataaataaaaaccttatctcaaaaatgtttttacacccttaccttaaagtttaacataaattcttctaacaattgagaagaaaagcactcctctgtagcaattccataaaataattttcaatccacaaaacatctgtctaccagtaaaaccaacaacccttaacggagggcatgggcattaacacttggcccctctgaggtataaatgcagctatatttgcactgagtatacagtctataacgtatgccaaccgtctgtatgtctgcataacattgggagtgatgtcatcctgactgactgaaaacttatttttataattttttgtaataatggaggctaaataattttaagagaaaagatgtacttgaccagtaatagagccggcggaattctgaattcctaaccaatgcaaatgattacattaaaaaagtgtttaacattgcatattgattccaaaaaaaatcaacctaacaggaaaaacacataaatatttaaattcagcaggacaccacaaaaagcatactatagataagtgtgaaatcagtcaagcttttccaaaagagaaaatccttttaatccttcagcaagtctctgtgaaaatagtatgcttacaataaaagtgagaagggagcacctaaaatacccccaagaggcttgctataccattcagcattaactgccccatctcctgtgtgcgtgaatggccaacaaatgacaggaagtccatttgacaatagttcagtaatttcttttcaccactgctgccagctgaagtcgtccttgcttccaaagaccaagaaaaagcctagtatagttgcaaagatgactgtgtttcctgtgagaacaagtgcacaagctccccactcaatcagatgtgctctggcaaatacaatagggagtccaaaagctgacacgacaatgcccgttgtaagaaagatggcaagttccttacaagcgttactcatagcatctgtatcatccactaatcttcttgctatgcagtatggaataggtgaaaggatgtaaaaaaatagaacaaagaggggccagtatttgttgtatattggaagggcacatccaagcatcaaaaacatcagtccgattgctcctccaaaggacaaactaatcaaagctttgatgcctgccatggcggtgacgtcgctcctggctccacgacccgaggcggcggcggcagcagcggcagccgggagacccaagacgcgctacggcgg

SEQ ID NO: 88 - DNA, 5055 bp, Homo sapiens
ttttttttttttacatgaaaggtatcattttattatagaggtaataaaataaagaggtaataaaggtataatgtcattacagaaaaatcagtggaagagaaaagaccaccaaactgttctttgctataattattatttcatgaagtcttatcagacgtgtatttctctcctctcatgtgcaggcaccttcctgggcaggaagcagacctagcagaactgcagtggtggccctcaaaccagcaccccctcttcctgacagcacaggcactccccccggggcctgcgccacagtgagaccagctctatgcagatacagctctgtcctgtgagggggtgagacacaggctctgctggggactgaggctccggctgcattttcttacctattgtagttgtccatcctccccaaatatggctgggggcagaagagagtggacacattcacagacgggtgggtcagtaccaggacatccaggattgccttggttccagcaagatgtctcaggatgggctttccacagggaagaaccagagaagccagggcagagttggggtctctggactaccagggctcagggcatagaggtggggttggctcgcccctgacaccaaccccaaggagaataaataaataaatagtgtataattgtgcagtcccctagcctggcttacccctcaacaaggggtcactagtcactgtcgatctcagttcctctgcatgtcatcctcccagaaacagaggctggctgccagtaggggtcctacccgaccctggggattgaaaaaccagggctgagagtgcccatacagttcaggtggccagggcaggcaagcgagtggaggtctgggcccagcccacaggtgagacaaggtcctgcctgtctccccatcctctgacacatggctcagtataatgaagccacatgcggcctgggggcatttacctccaagttgtgtgacacctcccctctcccatgccttgctcttgctggctcttcctgggccagctgccagaggtatgcaggcaccaggatgcctggaggagggacagtgggggcccaagtccagctggggctgatgtcccctccagggtgcgactgggtgagggtgggcagattgccccgtacagtcagagctggaaggggtactgtcggaggtagtcggccatgcgccggggcagtggcaggcagtccacgtcggccaccagacggttgatgacaaggcggcacaggtgttgcaggctgcgggcactgcttctgcgtacaaagggctgcaccagttttaggtgtacagcagtggctggtggaggagcaggcagtgctgggtcactaggcgcatcctccttaggcataggcagggccggggtgggagcaggatcggggctgtcgcttcgggtatcagcagtgcaggaggccacatagtgctgcacaaggctgaccacatccggaaaggccaggatgcgtggcctggacaagcagttggagtccagacggaagctggagtcggcatactcaatgcgtacattggtggggccacgagtggttttcactgacagcgtgaacaggtagctggggtgcgtgctgtcacgtactaagaacgtgccttctggcatcttctgcaggtgttgtcgggcctcgctggccgtaatggaaccccaataccagccagattcccgaaggtaggagaaggtcttggctatgcacagcagatcctcctctgggtccagcacctttggctcactctctgtctgggctggggtaccctctgccacctcctcgaggaaggccccagcaggcaagggctgcatgactggcttgggcagttccagggacggggcccacaggggccgctgcccagtccgctccacagccagcaaaggacgaggtctagaaggcagtggatgagcagtgagtggaggacccatgcttcccccatctccagagacccccctatgccccagactagtttcatgacctctggctggcccatctcactatgagcctcagcttcccctctacccagccatgggctcagttagtccagtatctcgttccccacttgtcatcacaaaagccaccttgattgtttccatgtggggatcctcttttgaaagattcttttccactgccctgcatttactaaacagtaattaattgctctctattttatatcaaccaaaaacacagatcattccctataggcatgtctaatgttctcaccacactgataggattcagtgcaaagtagcttcatgtttgtgccctcctggctgaagtgggctgattaaatggcccactgatgaatggtcctagttgagatagatctacgacagacaagtagatttatcctatgatagatctgtgtggggtcctccagagaagccccaggattatggtaggctgcctgaggtcacacgctacctccccatggataggagtgtctctcagagggacctaggtccacactggccaggacttagagactgaaataatcccctacccatacaagtcagcctatcctggcctctgcttctcccagtggagggtctggggtggacagtggcctctaaaggcactggcaagtctcacctcctgtcagtatgagctcccaccaagggcagggacctaatccacactccagttcccaccctggcaagccagccctaccaggctctacgatcttgtacaaagcttgctcttcactgggcttcagtttcccttttccgcaataaagggtcccaccaacccatgcactgagaggttcagtaacaccatattcttggatggctggggttgggggaactgagccgaccaaaatctgagtagcagctttctcctaggggaagcccacccagcagggtgatactagggcttcctccttgggagggcagcagggactggctctacttccccaggaagacagctgctcctccctcactccttgcaaaatacatctccaagccttagttctgggtctagtccctggctgggcctcaggacaccgccataatgaaaccatggccttgccctcaaggagaaccagactggctggggaagatgacactaagagtaattataatgcaaagtcataaaactgcaggtgtcacgggggagtcagggtctgcttgctcctgagctgtgtcttccaggccaaaggaaggagctgggggaagggaccccaggtagagaggacagcatgggcaaacagcgccagtattgcttgtgaggcaggaaggcgcaggcaggagctggtggcaggagccagacctgactcctgtgtaggttataggtgaccctctaggttctaacaaatcatggccctatgaccactcacagtgagaaagggccacacaactctggcacaccacagcctgacaaaaacttttccacacctaccctggctgtactgtgggatcttggaaatccctcttggagagctggaggccaaattttgagatgacctgcttgctggggcccagagctaccttcccaggagcatggttggtggctagccagtcaggctggaacctctgtgggtggccacgtccagatagcttagccggtcctcagatcccacatgtaggtgtgggcacctttggggctgatgtggtagctgggtgtatgaatagctgtgttgatcaccacaagctcctggtgagtgtgtacctgggcaggggtgtgtccatggctgtgtcatcatcatggtggggacagtggctggtgtgttctaggtacatgtgtgtgcccgctttggagcgcagcagtctaaaactttgttccctgacacccaacagtagccctgagcttacaagggggtgctcacctagggtaaaaagtgaaagaggctatgggaccccggaatgcagggggaggctcctggggtggaaggcagtggtggggcaggtattcaggagtcccagaatgcagacaggaggaaggaacttgctggagacagcaagggagaagtagtcttcccagcacctccatgtcctcttccttggcctcaccttccaccctccctcacttggcaccaggccagttgcgataagcacagccacccagtcctccctgagtgcagaacacccatttataccttcttcctctctccttggagcttcctgagctcctgtcacatcaccatggccagcatcagaccctttggttgaaggggttgctgaggttcaggacagagtggatggccaggaatgctcagctcaggtcaagactctgtcttatcagcatcccctctccactgtcccttacctcaagtctgggaaatttgaagatgagaggcaggagccaaggtccttctcacattgggatcccagactgggctgagacagggttgtgagacgattgtgggggtaccccaagcaggaccaggccaaacccagggcctcccgagagttgcagaccatcaggtggccagcctgaggaaaggcaaggatctgcggctggcttcccaagaagagcctacttgctagcctggggcaggagaggggacaccaggacagagggggccaggggctggtccaaggttactagcaggcagggcagcaggcaggctagcgtagagtgctctgggcccagaagaatatctgggattgttggccacatcttgggggacgccgtgccgttagcatccatctgctccaatgagaacccaggctgagcccaccctgtgagttcctcctttagccggccagcccccggtttcccaatccacagtgggaattgaggtaagtgtgtgggggcggggagtgggagtgtcacagccccacacagagccttgctcctgaggtccgtctgcgctcagtcacctctggcccgtcaagccctcccaatgcccggcagctagcacgaagcccctgttctcccgtgcgcccctcgtggtggccgggaagggggcagagagccgcgcttacccctgaacgcagaggaccatgtccccgcggcagcggcgactccggagtggggactcggctggacggcggcggctggagggaaccagtgggcgcggagcgcgtgctgggtaggctcccggggcgcgcgggcg

SEQ ID NO: 89 - DNA, 1014 bp, Homo sapiens
ttttttttttttatgcattgttctcaaccatttaatttattgaaaggagatgctgcaacagttcttgatttagcagcagttattctcttgtttacatagttatgtttttttgttgttgttttgctctgtactggaaacaaaaataaagttttctacattattttcagccttgggttatggtatagtttctttgtgtttgtcgtaatatgcacattgtccttctaggacctgtcaccccaccatggagaaaagagtcttttggttctttttaacataagtgattagtttaagagtatgctgaggagccactgggcttaaagaaggatgtaaataagacccaaatacatagggaccaggcgctgctttctcatgttcacaaaagcagtcctccaccactgaactccattctctcagggggctcaatgaaggctaaccaatccgatgcatgtgtaggtaacagtcccatggactggcacttgtaaacagccaatgccaaacccatcaggttcccaatgagatagaccaaaccctgaagaaacttctggcttgaactttctaacatcttgaaagtggctgaaatggccataagtgcctgaatgggtcgccaggccatcatacacaccatcatagtagggaagatggagatagtattgcctgccatgtacatgatgaagagattcatgggaatctgtttgaggggacccaaggcgatgtcccagcagcgcttctccaccaggatccggtctgtctcttgcacgctggtatcaggcacttgcttgtccaagtaaccgactgggtagagcgagtctccctggccactgccccggtcacttcgacccctgctgcctcctccaggcccgcttagctcaatggccccacttgaagcgccggcctcggttagccaccaggcccccctgggccgtcatggcaacagctgcgtcctatagcctcgatgcttctcagtccaaagcgtactccacaacaggcccaccagcgttctccgctttgtctcac

SEQ ID NO: 90 - DNA, 919 bp, Homo sapiens
ttttttttttttgagacagtgcctcactctgtcacccaggctggagtgtagtggcatgatctgggctcactgcaacctcctcctcctggattcaagcaattctcttgcttcagcctcccaagtagctgagactacaagcacccaccaccacacccggctaattttgtatttttcagtagagacggggtttcgccacattggccgtgttggtcttgaactcctggcctcaagcaatccgcctacctcagcctcccaaagtgctaggattacaggcataagccactgagcccagccctagttcagtatcttttatgtaaattataaacatctgcaacattatgtatcatatgcagatacttattgcatttcttttattagtggtgaaagtgttctatgcatttattggctcttgaatttcctcatctatgaattgtcattcacacacctacttttctgcttcgtttttacatatgtctttgcctattaaagatattatccctctgttttatattttctctcattcttgtattgccttttaaattttgttatgatgtttcattaataaacagtgttttgttttcctctataaaaaaaaaacagagggataatatctttaataggcaaagacatatgtaaaaacgaagcagaaaagtaggtgtgtgaatgacaattcatagatgaggaaattcaagagccaataaatgcatagaacactttcaccactaataaaagaaatgcaataagtatctgcatatgatacataatgttgcagatgtttataatttacataaaagatactgaactagggctgggctcacgtgcttatgcctgtaatcctagcactttgggaggctgaggtaggcggattgcttgaggccaggagttcaagaccaacacggccaatgtggcgaaaccccgg

SEQ ID NO: 91 - DNA, 2201 bp, Homo sapiens
gggtcctgtgccctccctcgcccgccgcctcctctcctccctccgcctcctcgccttccctccccctccctccctgtccctgctctggcgcccccgtcctttcctccttcctgcgtctctgtgtctccgtccgccggcgcgccacgcctcccctgccgtcctccttcccccccctccggcgcctcccgcccgagcctctgccgtccgcctccacgccgccgcctgctgcgccgcctcctcccgcctccggccgcgctcctgttcgcctctcccctctcgctcccgtcccgtttcttcgtgacctggtttggctggtccgccgtgttttcctctctctctcttgtctttcgccgagtgtgctgttggtttggtttcgcgaagcaattattccgtgctaacctgggggtgttcgggacgtgtgatgtcgccgttccgtattatggggtgaccgcgccagagtttgacccctttgggttccagtaatcttgggtcccggtggacccgctggtgtccacagtggcctcttgtccgtacctctgttcgccggcaccccgtgcatatgtgtgtccctcgcagttttcttgttttgtggtgcttgcttcaaaaatgacaaattctttatttaaatcaacaaactcatcttcctcaagccccagaccatggtaggcagccctccctctccatcccctcaccccaccccttagccacagtgaagggaatggaaaatgagaagccacgagggcccctgccagggaaggctgccccagatgtgtggtgagcacagtcagtgcagctgtggctggggcagcagctgccacaggctcctccctataaattaagttcctgcagccacagctgtgggagaagcatacttgtagaagcaaggccagtccagcatcagaaggcagaggcagcatcagtgactcccagccatggaatgaacggaggacacagagctcagagacagaacaggccagggggaagaaggagagacagaataggccagggcatggcggtgagggactgaggcccctaaattttggtcccaggggaaaggaagaggccagttggtccagttttgatggctatggggaagggaatgtattagtaagcatgggggagaggatgccagcaggcacctcagaggtgacaggacaggctgaaccccccaccctgacagaaaggagcttgagagctctggggctctctgggaatgtcactgctaaaatatatatctacatatatattaaccattcgtgggagggcaggggcaaggcgctggggtgggatcagaggatctggcgtggcatcccgtagccagtcatgcctgcctgagacgccccgcggttgggtgcccatctgtaacccgatcacgttcttgccctcttgcagctggttatccgagaagttccgaggattctccttggatttcttagggaaccagttggggatccccagagaagagcccatcatctcgggctactgccagcccacccagattcatcagcgtccgctgcacacaggccatgttctttccttcccagaggtccacagtttggaagatgtcagtggtgttaatgccatagcgctcagctgcttgcaggaactgagagatctgctccatctgcttgaaggccatggtggaggcctggatcttctttactggggcctgcccctcggggtacagtgcattaatgagctcacatagcaccgtgccatccttgagccagttctggaagttctcgcgtccaggctggggccggcccacatcctttcggcactgggtggtgatccactggatcaggatctgctccagatctgcatcatattgtttctcaatcttctgctgcacctcccggctcaggccatatgcaggtcccctgttggccattccaatgggtggcggtggctgcggggagctcaccaaagccaaagccaaagaaaaggcggacatgggtgggggcagggaggacttcagggttcttggctagggtgtttaattgggaagacaaagggactctccatccaccgtgcagatggaacacaggagaacttcccaactcagatttgggacagggagtgttctcaaagagcagcacagtgagggcaccagcccacagagcgaggtgccacagccagcagcaaggatggggggcggcccacaattaagggaaccaccgtagggcagcccctcaccaccg

SEQ ID NO: 92 - DNA, 413 bp, Homo sapiens
  misc_feature (1)...(413): n = a,t,c or g
atctatatccgcgccgacctgaacctggccgcggtcgagtcgatccggggcggctcgtcctcgacctttgcgtcgaattcgccggccggggtgatcaatctgatttccaagaccggggatgtgaagggcggctcggtcctgctgaccgccggcctcgactacgactccaaccgggtggacttcgaatacggcgcgccgatcagcgacacctggcgcttccacatcggcggcttctatcgggtgggcgaaggccccggaaggtcggctacgacgccttcaagggcggccagctgaagttcaatgtcaccaagcagctgcccaacggctatgtccgactgtcgggcaagtatctggatgaccggtcgccgcactacctgcccggcccggttcgcatcaccggaaccaatgacgan

SEQ ID NO: 93 - DNA, 408 bp, Homo sapiens
  misc_feature (1)...(408): n = a,t,c or g
gcgcttcctcctccccgccgccgccctcgccatggccgcgccggcccgggcctcatctcggtgttctcgagttcccaggagctgggtgcggcgctacgcagcttggtggcccagcgcgcagatgctgcctggcaggggcccgcgcccgtttcgcgctcggcttgtcgggcgggagctccgtctcgatgctagcccgcgagcttaccgccgccgtcgccccttgccgggcagctagcttagcgcgctggacgctgggcttctgcgacgagcgcctcgtgcccttcgatcacgccgagagcacgtacggcctcttacggacgcatcttctctccagactgccgatcccagaaaagcagagtgatcaccatttaccnccgagctgcctgttggaggagcggctgaggacta

SEQ ID NO: 94 - DNA, 3248 bp, Homo sapiens
ttttttttttttgataatttagaaatttattacaaaacttttaataaaaaatacaatgatattacaaatttggttttccaaagctttcaaatttttcttaacattatctttcgttttaagaacacttttgaagtcggcagttatttaaaatccttactagaaaaaaaccaaagcccaaggattttgcatttagtcatcatctaggtatacagcgtgttttccgaaagcatcctttaagagtttggagatttgatgaaattgctcatgtaataagcagttagtgaatactattgaatcctaaacccagataagtcatcttgggctggctgtgtttttcatgtgaagaaactcatttatagcacaggcaccccaggccaatagagatgattacagatctctggtttcagaagttctgaccccttattcagctaccaaatacttaattgctaaaggaattactcccagcaggcacaaaacggtttctgaatatgacagaaaaggtacacaaagaatcatttaagacatcctggttacaacatactttatctttaaaagggtgtgagagtagttggggaacttagaaattctgtgacttaggtgtgggtggatcttatttaggaagactaaagctatggacacaacacgtgaaagaaccactcagaagcagccctaggaagcccaggtgcccacatcgaaagcactcccaggtgaaagcagccaggcaggcgtgggcattgtacaaccagcctcaggcctcagttcttgattgtggttgacggggcgtcaccatgaaggagcccatttagtataaagcttccaaccttttctcttaatcgtttctttaatcttttaaaccatcttcaagtgcataggggagtttccgatgccagaggatgaaagcaagtgctttctccaccctctcctcccagagtgaaaacaaatccttttgctgatacttgtttcaaaagcatccattgtaaagcttctcagtgacacaaaatactgagaggtaactttttatcaatcaaaccacataccccaatttaacacctttcagtgctctgaattcaactgacagactaaagggtgtttcctgtaacagtctgaaatattaagtgttttttttgttttgtttttaaatcttatttcagaaaacttcctcttggggtaggaaagtacacatgaagcagcaaagtaacgaagaaaaacttaaatagggccttcagagatcccacacactacaaagattctgccaagccataagataagtgtgaagcccagtatatgtccagcttttctcctcaggacatcttcagtgtttcttctcttttaaacaccacatcaggttctagccacagacttgtgttttgggtgtgcctgctttgaggggtccatgcccagtgtgtctgctggtgacccaggactcagcagtaatgactaacggccgcccttcaggatcacagatgtgcttggtggtggtggcaaagcatggcacttgtgtgcagtgatgagaagcagcacacggcaaggctgagccctttatcagcaggcctccgtagagcgtgtctgcgttgtcagctgccaatgggctgagtggctggccgtacccactcagtccaagagaggaaggaaacagcaggagaagctgtcagcttgccattcatgagctgctgctgcccaccaaagctgcttactggcaagaagagatgtggggaagacatgagctggtgaacaccaacctggtgcacatgctgccaagtctggcccctgaagaggagagggagtgcagagtccaaaattgaccggggctcctgctctggcatggagctgggtcagaggtgagagaggacctggatcctagggctcacgcaggtgtcgggcgggtgccagggtcttttcactccaactttttggctggcacccgtgtccgagcaacaaggatgggcacaagggccaggccggcaatgaggagggcccacaggggtcggtagaagagccagccagccgccacggtcagcagggtcagcgaggtggccacacagaaggcaaaggctttcaggccaatgttgaccaggtctcggaaaacaggaaaccagtccaccaaggtgtagaggatccgtgtcataaggttgaggcccatgaacatggccatccagccagctgcccgcaggccccaggtcttcatggagttgctccttagttctctatgaaacacctcctctgctgagaagtccccgtggtgcaggagcagtaaggtatccccagacttggtggagaatgggactagctggtcaccccgctgccgggcaatcacagtgaccacgtgagctgggcccaggtcagggtcatcgccgctcagtccagcataggaaaaggagacacgcaagtctcccacctctggatacttgggattttcgctgtggtagaaaaagtctccacggcgaatgatgtccacatgagggtcctccagcttggataggctcagggacttgaagttgtcgactttgtcgatgaggcctgacgagaggaaaaacctgccaatttggacaaagggggctgttgccatgaatgactccactgccatggcactggggttattgtggccaatctctcggtcgaagtttttgctgttgatgatttctgacctccattcagtgttgtaggaatacctcgtctccttcttcacctgcccatcctcggtgtactccctggactcctcagtttctacccattggtacatctccacgtgcctccgcagtttcacagccggaagatggaccccatagtttggatcagacaaaagcttggatgtccgtaaggcgccaatgatgtgcaccagccttccttcattctccggagccacactgtggatgctgtcaggagacaccacaagcgagagcccctcagccaatgaggttgccgtcttcaatgcgcggccctcattggtgaaaattaggtagaaggagagcaggaaggccatgagccccacaaacatcccacccgaggtctcgctcagccgttccaggaagcctggctgggagctggttttaactttgacatgttctctccgggtactggtactggaataattcgcggccatggtgggacccggctcgctgccgccgcctcgcgctgttcagctaggaagtgggctgacgactggagcgtggtgtccagcggcctcttgccagccccagcttcgaaaatccgcgtggactccagggccaagcgggacttactgcagttac

SEQ ID NO: 95 - DNA, 2967 bp, Homo sapiens
atgtcggccaccagcgtggacacccagagaacaaaaggacaagataataaagtacaaaatggttcgttacatcagaaggatacagttcatgacaatgactttgagccctaccttactggacagtcaaatcagagtaacagttacccctcaatgagcgacccctacctgtccagctattacccgccgtccattggatttccttactccctcaatgaggctccgtggtctactgcaggggaccctccgattccatacctcaccacctacggacagctcagtaacggagaccatcattttatgcacgatgctgtttttgggcagcctgggggcctggggaacaacatctatcagcacaggttcaattttttccctgaaaaccctgcgttctcagcatgggggacaagtgggtctcaaggtcagcagacccagagctccgcgtatgggagcagctacacctaccccccgagctccctgggtggcacggtggttgatgggcagccaggctttcacagcgacaccctcagcaaggcccccgggatgaacagcctggagcagggcatggttggcctgaagattggggacgtcagctcctccgccgtcaagacggtgggctctgtcgtcagcagcgtggcactgactggtgtcctttctggcaacggtgggacaaatgtgaacatgccagtttcaaagccgacctcgtgggctgccattgccagcaagcctgcaaaaccacagcctaaaatgaaaacaaagagcgggcctgtcatggggggtgggctgccccctccacccataaagcataacatggacattggcacctgggataacaaggggcctgtgccgaaggccccagtcccccagcaggcaccctctccacaggctgccccacagccccagcaggtggctcagcctctcccagcacagcccccagctttggctcaaccgcagtatcagagccctcagcagccaccccagacccgctgggttgccccacgcaacagaaacgcggcgtttgggcagagcggaggggctggcagcgatagcaactctcctggaaacgtccagcctaattctgcccccagcgtcgaatcccaccccgtccttgaaaaactgaaggctgctcacagctacaacccgaaagagtttgagtggaatctgaaaagcgggcgtgtgttcatcatcaagagctactctgaggacgacatccaccgctccattaagtactccatctggtgtagcacagagcacggcaacaagcgcctggacagcgccttccgctgcatgagcagcaaggggcccgtctacctgctcttcagcgtcaatgggagtgggcatttttgtggggtggccgagatgaagtcccccgtggactacggcaccagtgccggggtctggtctcaggacaagtggaaggggaagtttgatgtccagtggatttttgttaaggatgtacccaataaccagctccggcacatcaggctggagaataacgacaacaaaccggtcacaaactcccgggacacccaggaggtgcccttagaaaaagccaagcaagtgctgaaaattatcagttcctacaagcacacaacctccatcttcgacgactttgctcactacgagaagcgccaggaggaggaggaggtggtgcgcaaggaacggcagagtcgaaacaaacaatgagggcgaaccagtttcttacatgttctaacgtttgactttgaaaacagtttaaaacacgtgtgcttggtcagctccagtgtgtcgtcccgtgcgggggttgagtgttgcatctttgcctttcttgtcgttgatttttgcccagatggatctgcatttatttgtactttttctatgtattataatcctgtagaagtcactaataaaggagtattttttttgtcagcttatcaatcagactgatctaatgtgaaatgtaagtatccttaaaaacaaagcatctattttggcagaaattgtgttcttaaattcagtcatttgatattctgtgagacttcatatttctcatccctttattgctttttagcaaacataagaaaccatgagtcattttgtcatttagagtattctgataaaatctcttgaaaatactgaaatcaaaaggttaatgattttttgttcattctgatttgtcattttattatctgttatcggtctaaagtgctaatttacccatttgatttttctgctagacagataacttttaatttttcaaatttggcagacacttttttttttttttttgaaaatctttccttccagatctgttgcccactgaacagccacccgtccctcactgtcctggtgtccgattgggctggatggtgttggggcatgatgtgtggaggaactggaaggtgctttaggtctggttcagggtcgggcattctttgttgtttgcacatctttttaaattttacaccttttcttaagaattctaatgccgtcttaagtttttataccaataatgctgagctttaagtgtaggatctggtagtacagacagtgtgatggatgatgctgctggttgtaaatttcatcgtgtgtgtctaattttttttcctgttgaatgggtaaaaacaaaacaaaactttttttagaagatgaatttgctgtcatgttttgtggaatgagggaccgttgagctcactaccacctggagtttgagttgaagcatgaaaatggtgcccatgcctgacgctccagcgcctggatctgcacgtgcccttgtagaggatccttaccgtcctagagagcagacgctttctgaaaactacttgctccaaaagaccctctgagttaacgtttcagctgtatcattagacttgtatttagagcgtgtcacttcctctgaactgttactgcctgaatggagtcctggacgacattgggtttttcctctaggagaatacaagccttaataaacaatactatttagcaaaaaaaaaa

SEQ ID NO: 96 - DNA, 634 bp, Homo sapiens
aaggatcctattaaattaatcccccccccccgaccgctttccgagcccgcttgcacctcggcgatccccgactcccttctttatggcgtcgctcctgtgctgtgggccgaagctggccgcctgcggcatcgtcctcagcgcctggggagtgatcatgttgataatgctcggaatatttttcaatgtccattccgctgtgttgattgaggacgttcccttcacggagaaagattttgagaatggcccccagaacatatacaacctttacgagcaagtcagctacaactgtttcatcgctgcaggcctttacctcctcctcggaggcttctctttctgccaagttcggctcaataagcgcaaggaatacatggtgcgctagggccccggcgcgtttccccgctccagcccctcctctatttaaagactccctgcaccgtgtcacccaggtcgcgtcccacccttgccggcgccctctgtgggactgggtttcccgggcgagagactgaatcccttctcccatctctggcatccggcccccgtggagagggctgaggctggggggctgttccgtctctccacccttcgctgtgtcccgtatctcaataaagagaatctgctctcttcaaaaaaaaaa

SEQ ID NO: 97 - DNA, 1687 bp, Homo sapiens
ttttttttttttcacataaggaagcatttatttgaggtttaacatgaaatgatacaaataaaatgtgtataaacaaatccacattgagtcataacacagatagcaaaggacaaagtaaaaacaaagaaaactaattggcagctatatacagttggacacaatggtgtcttgtacactagaaagtcttttacaaaataatcatcttagatcaacagaagaccaatcttcaatgtcgtcctgcaagatgggttactttaacatctcctcctaaaaacaaaaacaaaataccagttagatttgtgcaactctgacaagcttttaaaggtccactttcatgaattgttttaagtcctcactttattttcttcaataattaaagatcatatgcatatttattggtaaaatacagtttgggtagtcaataaactcaccctggagttcccaaatgacattaaattcaaatctattcaggaaagaatctgggaatacaaccttcccatattcagaggttcaactatgctagattaaggtctactagaagcatctctagtaacccaagtaaaatgctatcacaaacaccaatttctaataagtttattacaagaacataaattgatctgtgcatatgatctttaatttatatcccagatttaaaagttcttgttttggtttgtagatttcactattagctataaaaagaaaaagcaagcattaaatcttaaaagaatgaacacttaaaatgaggctccacaattgaaatacaacactaaacagaagaccaaaatgattaagctgtaaaaaggcatttatgtactttaactcctgtaaaaaaccatttaagttaagtttagacacttaatctccaaaaagattaaaaatgaagccaaagtctgaagttttccactttaatctttacgctggtacatgaagttggaagagaccataccacaggacagcgttttctggtgtatgccttgcgctctgcccgcaacgtgcgacccccagagatagacgtggtcagggtgacacacggcctgcaatgaagttcccgctggcgggtacaaacaaggtataatgtcagagttagaagacaacattcttgttttccttaagttgtacccatttcagtactttacctgttaatagttctaaaatgtttaattattcctctagaccacctggtacacaaaagcaaacagaaaaactcttaagtttttctgcaatactaaagaaagtgagataagactttaaagttaaagatctatagacactttaggcaaaacaggctcataaagcaattaaaaaatcaacaatttagtaaaaacaggctacatagtattttgtttttacgtttcatttgtctattgatctttaaattaaattagacatttctactgttttcctgtactcttatacacacctgttttctccaatgttctcctttagtatggctggtaattgttttggtgattgccaccccctcgagatgccttgccataagtgctctgttggccactgtagtctgcatatccctgtccatatccatagttcccatagttatacccagtataatcatatccgccatagccactatagttttgatcaccaccataggcactattgtaatttccatatccttgatcataatagttattaaatccttggttccagttttggccctgacctc

SEQ ID NO: 98 - DNA, 2015 bp, Homo sapiens
gccacagcccagctgttccctccgcggattctccggggctggttcatcacctccgaatattcctgtgacaggagacgcttgcaaaacccgcctccagcctccagcagcaaataaatagaaggcttgcagcccagaaggagccagaagaagtttctaggcgcgcgtgccctgggtttattaagctcctggctccgctctagacctcagcggttctggctgccagcctgggcagcctgggaagcctgggaggacggtggcttgccggtctgtcgtgaggcagtgcggacggggaccctctgggattctgctggatctgccccgggggttacctttgggggctgggaccccagtcgaggggacacaaccgtccctggcagtggttggttctgcttctccctgcagaaaagcagcattttcggaagctgaagaataagctagcccagccacaccaccttgttgtgtgaccttgggcaggtggttctgtctctctgagcctctgtttctctctgagctgagcagccaccatggctgacggtcagatgcccttctcctgccactacccaagccgcctgcgccgagaccccttccgggactctcccctctcctctcgcctgctggatgatggctttggcatggaccccttcccagacgacttgacagcctcttggcccgactgggctctgcctcgtctctcctccgcctggccaggcaccctaaggtcgggcatggtgccccggggccccactgccaccgccaggtttggggtgcctgccgagggcaggacccccccacccttccctggggagccctggaaagtgtgtgtgaatgtgcacagcttcaagccagaggagttgatggtgaagaccaaagatggatacgtggaggtgtctggcaaacatgaagagaaacagcaagaaggtggcattgtttctaagaacttcacaaagaaaatccagcttcctgcagaggtggatcctgtgacagtatttgcctcactttccccagagggtctgctgatcatcgaagctccccaggtccctccttactcaacatttggagagagcagtttcaacaacgagcttccccaggacagccaggaagtcacctgtacctgagatgccagtactggcccatccttgttttgtccccaaccctagggcttctctgattccaggatacattactttagctgaactcagatttagtgcaagtaaaatgttagagggtgcgggggtgaggactgaccacagattccctggatagtgtagtggtagatttctccacaggatagcgcaattggcaaatcatgcttggttgtgttaggccaaaatactagttttgctttctttaccttttctatcttgatgaaaatgttgcacattctatagttgcaaaacacataaaaggggacttaacatttcacgttgtatcttacttgcagtgaatgcaagggttacttttctctggggacctcccccatcacccaggttcctactctgggctcccgattcccatggctcccaaaccatgccgcatggtttggttaatgaaacccagtagctaaccccactgtgcttccacatgcctggcctaaaatgggtgatatacaggtcttatatccccatatggaatttatccatcaaccacataaaaacaaacagtgccttctgccctctgcccagatgtgtccagcacgttctcaaagtttccacattagcactccctaaggacgctgggagcctgtcagtttatgatctgacctaggtcccccctttcttctgtcccctgtgtttaagtcgggatttttacagagggagctgtctccagacagctccatcaggaaccaagcaaaggccagatagcctgacagataggctagtggtattgtgtatatgggcgggacgtgtgtgtcattattatttgagttatgctgttgtttaggggtaaataacagtaaataattaataataataataataataataataaaggagctgacgttcttaaaaaaaaaa

SEQ ID NO: 99 - DNA, 3832 bp, Homo sapiens
  misc_feature (1)...(3832): n = a,t,c or g
gagaggcggcggaatggtggactaccacgcggcgaaccagtcgtaccagtacggccccagcagcgcgggcaatggcgctggcggcgggggcagcatgggcgactacatggcccaggaggacgactgggaccgggacctgctgctggacccggcctgggagaagcagcagcgcaagaccttcacggcatggtgcaactcccacctgcggaaggcaggcacacagatcgagaacattgatgaggacttccgagacgggctcaagctcatgctgctcctggaggtcatatcaggggagcggttacctaagccggagcgggggaagatgagagtgcacaaaatcaacaatgtgaacaaagcgctggactttattgccagcaaaggcgtcaagctggacttccatcggggcagaagagattgtggacggcaacgcaaagatgaccctgggaatgatctggaccatcatccttaggttcgccatccaggacatctccgtggaagagacctcggccaaggaagggctccttctctggtgccagagaaagacagccccgtataagaacgtcaatgtgcagaacttccacatcagctggaaggatggtcttgccttcaatgccctgatccaccggcacagaccagagctgattgagtatgacaagctgaggaaggacgaccctgtcaccaacctgaacaatgccttcgaagtggctgagaaatacctcgacatccccaagatgctggatgcagaggacatcgtgaacacggcccggcccgacgagaaggccataatgacctatgtgtccagcttctaccatgccttttcaggagcgcagaaggctgaaactgaaactgccgccaaccggatctgtaaggtgctggctgtcaaccaagagaacgagcacctcgatggaggactacgagaagctggccagcgacctcctggagtggatccggcgcaccatcccctggctggaggaccgtgtgccccaaaagactatccaggagatgcagcagaagctggaggacttccgcgactaccggcgtgtgcacaagccgcccaaggtgcaggagaagtgccagctggagatcaacttcaacacgctgcagaccaagctgcgcctcagcaaccggcccgccttcatgccctccgagggcaagatggtctcggacatcaacaatggctggcagcacttggagcaggctgagaagggctacgaggagtggctgctgaatgagatccgcaggctggagcggctcgaccacctggcagagaagttccggcagaaggcctccatccacgaggcctggactgacgggaaggaagccatgctgaagcaccgggactacgagacggccacactatcggacatcaaagccctcattcgcaagcacgaggccttcgagagcgacctggctgcgcaccaggaccgcgtggagcagatcgccgccattgcccaggagctcaacgagctggattactacgactcccacaatgtcaacacccggtgccagaagatctgtgaccagtgggacgccctcggctctctgacacatagtcgcagggaagccctggagaaaacagagaagcagctggaggccatcatcgaccagctgcacctggaatacgccaagcgcgcggcccccttcaacaactggatggagagcgccatggaggacctccaggacatgttcatcgtccataccatcgaggagattgagggcctgatctcagcccatgaccagttcaagtccaccctgccggacgccgatagggagcgcgaggccatcctggccatccacaaggaggcccagaggatcgctgagagcaaccacatcaagctgtcgggcagcaacccctacaccaccgtcaccccgcaaatcatcaactccaagtgggagaaggtgcagcagctggtgccaaaacgggaccatgccctcctggaggagcagagcaagcagcagcagtccaacgagcacctgcgccgccagttcgccagccaggccaatgttgtggggccctggatccagaccaagatggaggagatcgggcgcatctccattgagatgaacgggaccctggaggaccagctgagccacctgaagcagtatgaacgcagcatcgtggactacaagcccaacctggacctgctggagcagcagcaccagctcatccaggaggccctcatcttcgacaacaagcacaccaactataccatggagcacatccgcgtgggctgggagcagctgctcaccaccattgcccgcaccatcaacgaggtggagaaccagatcctcacccgcgacgccaagggcatcagccaggagcagatgcaggagttccgggcgtccttcaaccacttcgacaaggatcatggcggggcgctggggcccgaggagttcaaggcctgcctcatcagcctgggctacgacgtggagaacgaccggcagggtgaggccgagttcaaccgcatcatgagcctggtcgaccccaaccatagcggccttgtgaccttccaagccttcatcgacttcatgtcgcgggagaccaccgacacggacacggctgaccaggtcatcgcttccttcaaggtcctagcaggggacaagaacttcatcacagctgaggagctgcggagagagctgccccccggaccaggccgagtactgcatcgcccgcatggcgccataccagggccctgacgccgtgcccggtgccctcgactacaagtccttctccacggccttgtatggcgagagcgacctgtgaggccccagagacctgacccaacacccccgacggcctccaggaggggcctgggcagccccacagtcccattcctccactctgtatctatgcaaagcactctctgcagtcctccggggtgggtgggtgggcagggaggggctggggcaggctctctcctctctctctttgtgggttggccaggaggttcccccgaccaggttggggagacttggggccagcgcttctggtctggtaaatatgtatgatgtgttgtgcttttttaaccaaggaggggccagtggattcccacagcacaaccggtcccttccatgccctgggatgcctcaccacacccaggtctcttcctttgctctgaggtcccttcaaggcctccccaatccaggccaaagccccatgtgccttgtccaggaactgcctgggccatgcgaggggccagcagagggcgccaccaccacctgacggctggggacccacccagcccctctcccctctctgctccagactcacttgccattgccaggagatggccccaacaagcaccccgcttttgcagcagaggagctgagttggcagaccgggcccccctgaaccgcaccccatcccaccagccccggccttgctttgtctggcctcacgtgtctcagattttctaagaaccaaaaaaaaaaaaggaaaaaaaacacaaaacaacaaaaaccaaaaaaaaaaaaaatcataaaaacaaaaaaactataaaaaagaaagaattaaaaactttcagagaattactatttactttattaacttacggatttattatataaatatatattcacctagcaacatatctctgccgtctctcctgctctcataatgaagacatagccgattctctgcccgggccccttgctgatgctcctccgggtctgcgtcgggcgtgggtctctggggaccctccagaggtggaggtgggctgatggcctggctgcctggtggttgatggttttgctccccctaccttttttttttgagtttattctgattgattttttttcttggttnctggataaaccaccctccggggccagg

SEQ ID NO: 100 - DNA, 2475 bp, Homo sapiens
ggcacgaggcagcacaccccggcacctcctctgcggcagctgcgcctcgcaagcgcagtgccgcagcgcacgccggagtggctgtagctgcccggcgcggcgccgccctgcgcgggctgtgggctgcgggctgcgcccccgctgctggccagctctgcacggctgcgggctctgcggcgcccggtgctctgcaacgctgcggcgggcggcatgggataacgcggccatggtgcgccgagatcgcctccgcaggatgagggagtggtgggtccaggtggggctgctggccgtgcccctgcttgctgcgtacctgcacatcccaccccctcagctctcccctgcccttcactcatggaagtcttcaggcaagtttttcacttacaagggactgcgtatcttctaccaagactctgtgggtgtggttggaagtccagagatagttgtgcttttacacggttttccaacatccagctacgactggtacaagatttgggaaggtctgaccttgaggtttcatcgggtgattgcccttgatttcttaggctttggcttcagtgacaaaccgagaccacatcactattccatatttgagcaggccagcatcgtggaagcgcttttgcggcatctggggctccagaaccgcaggatcaaccttctttctcatgactatggagatattgttgctcaggagcttctctacaggtacaagcagaatcgatctggtcggcttaccataaagagtctctgtctgtcaaatggaggtatctttcctgagactcaccgtccactccttctccaaaagctactcaaagatggaggtgtgctgtcacccatcctcacacgactgatgaacttctttgtattctctcgaggtctcaccccagtctttgggccgtatactcggccctctgagagtgagctgtgggacatgtgggcagggatccgcaacaatgacgggaacttagtcattgacagtctcttacagtacatcaatcagaggaagaagttcagaaggcgctgggtgggagctcttgcctctgtaactatccccattcattttatctatgggccattggatcctgtaaatccctatccagagtttttggagctgtacaggaaaacgctgccgcggtccacagtgtcgattctggatgaccacattagccactatccacagctagaggatcccatgggcttcttgaatgcatatatgggcttcatcaactccttctgagctggaaagagtagcttccctgtattacctcccctactcccttatgtgttgtgtattccacttaggaagaaatgcccaaaagaggtcctggccatcaaacataattctctcacaaagtccactttactcaaattggtgaacagtgtataggaagaagccagcaggagctctgactaaggttgacataatagtccacctcccattactttgatatctgatcaaatgtatagacttggctttgttttttgtgctattaggaaattctgatgagcattactattcactgatgcagaaagacgttcttttgcataaaagactttttttaacactttggacttctctgaaatatttagaagtgctaatttctggcccacccccaacaggaattctatagtaaggaggaggagaaggggggctccttccctctcctcgaatgacgttatgggcacatgccttttaaaagttctttaagcaacacagagctgagtcctctttgtcatacctttggatttagtgtttcatcagctgtttttagttataaacattttgttaaaatagatattggtttaaatgatacagtattttaggtatgatttaagactatgatttacctatacattatatatattttataaagatactaaaccagcatacccttactctgccagagtagtgaagctaattaaacacgtttggtttctgaataaattgaactaaatccaaactatttcctaaaatcacaggacattaaggaccaatagcatctgtgccagagatgtactgttattagctgggaagaccaattctaacagcaaataacagtctgagactcctcatacctcagtggttagaagcatgtctctcttgagctacagtagaggggaagggattgttgtgtagtcaagtcaccatgctgaatgtacactgattcctttatgatgactgcttaactccccactgcctgtcccagagaggctttccaatgtagctcagtaattcctgttactttacagacaggaaagttccagaaactttaagaacaaactctgaaagacctatgagcaaatggtgctgaatactttttttttaaagccacatttcattgtcttagtcaaagcaggattattaagtgattatttaaaattcgtttttttaaattagcaacttcaagtataacaactttgaaactggaataagtgtttattttctattaataaaaatgaattgtgacaaaaaaaaaa

SEQ ID NO: 101 - DNA, 2647 bp, Homo sapiens
cgcctagccgcgccggtcccagaagtggcgaaagccgcagccgagtccaggtcacgccgaagccgttgcccttttaagggggagccttgaaacggcgcctgggttccatgtttgcatccgcctcgcgggaaggaaactccatgttgtaacaaagtttcctccgcgccccctccctccccctcccccctagaacctggctcccctcccctccggagctcgcggggatccctccctcccacccctcccctcccccccgcgccccgattccggccccagccgggggggaggccgggcgcccgggccagagtccggccggagcggagcgcgcccggccccatggacagctcggccgtcattactcagatcagcaaggaggaggctcggggcccgctgcggggcaaaggtgaccagaagtcagcagcttcccagaagccccgaagccggggcatcctccactcactcttctgctgtgtctgccgggatgatggggaggccctgcctgctcacagcggggcgcccctgcttgtggaggagaatggagccatccctaagcagaccccagtccaatacctgctccctgaggccaaggcccaggactcagacaagatctgcgtggtcatcgacctggacgagaccctggtgcacagctccttcaagccagtgaacaacgcggacttcatcatccctgtggagattgatggggtggtccaccaggtctacgtgttgaagcgtcctcacgtggatgagttcctgcagcgaatgggcgagctctttgaatgtgtgctgttcactgctagcctcgccaagtacgcagacccagtagctgacctgctggacaaatggggggccttccgggcccggctgtttcgagagtcctgcgtcttccaccgggggaactacgtgaaggacctgagccggttgggtcgagacctgcggcgggtgctcatcctggacaattcacctgcctcctatgtcttccatccagacaatgctgtaccggtggcctcgtggtttgacaacatgagtgacacagagctccacgacctcctccccttcttcgagcaactcagccgtgtggacgacgtgtactcagtgctcaggcagccacggccagggagctagtgagggtgatggggccaggacctgcccctgaccaatgatacccacacctcctcccaggaagactgcccaggcctttgttaggaaaacccatgggccgccgccacactcagtgccatggggaagcgggcgtctcccccaccagccccaccaggcggtgtaggggcagcaggctgcactgaggaccgtgagctccaggccccgtgtcagtgccttcaaacctcctcccctattctcaggggacctggggggccctgcctgctgctccctttttctgtctctgtccatgctgccatgtttctctgctgccaaattgggccccttggccccttccggttctgcttcctgggggcagggttcctgccttggacccccagtctgggaacggtggacatcaagtgccttgcatagagccccctcttccccgcccagctttcccaggggcacagctctaggctgggaggggagaaccagcccctccccctgccccacctcctcccttgggactgagagggcccctaccaacctttgcctctgccttggagggaggggaggtctgttaccactggggaaggcagcaggagtctgtccttcaggccccacagtgcagcttctccagggccgacagctgagggctgctccctgcatcatccaagcaatgacctcagacttctgccttaaccagccccggggcttggctcccccagctctgagcgtgggggcataggcaggaccccccttgtggtgccatataaatatgtacatgtgtatatagatttttaggggaaggagagagggaagggtcagggtagagacacccctcccttgcccctttcctgggcccagaagttggggggagggagggaaaggatttttacattttttaaactgctattttctgaatggaacaagctgggccaaggggcccaggccctgtcctctgtccctcacacccctttgctccgttcattcattcaaaaaaacatttcttgagcaccttctgtgcccagcatatgctaggcccaccagctaagtgtgtgtggggggtctctacgccagctcatcagtgcctccttgcccatccttcaccggtgcctttgggggatctgtaggaggtgggaccttctgtggggtttggggatctccaggaagcccgaccaagctgtccccttcccctgtgccaacccatctcctacagccccctgcctgatcccctgctggctgggggcagctcccaggatatcctgccttccaactgtttctgaagcccctcctcctaacatggcgattccggaggtcaaggccttgggctctccccagggtctaacggttaaggggacccacataccagtgccaagggggatgtcaagtggtgatgtcgttgtgctcccctcccccagagcgggtgggcggggggtgaatatggttggcctgcatcaggtggccttcccatttaagtgccttctctgtgactgagagccctagtgtgatgagaactaaagagaaagccagacccctaaaaaaaaaa

SEQ ID NO: 102 - DNA, 445 bp, Homo sapiens
ccggtccggaattcccgggtcgacgatttcgcgagggacaagactccgactccagctctgacttttttcgcggatctcggcttccactgctgccatgtcactcctcttgctggtggtctcagcccttcagatcctcattctagatactgcttttcgtggccactttggacaagtcctggtggactctccctgggaaagagtccctgaatctctggcacgactgccacgtggaacaacgacaccaaaacatggccctgcagtaatgccagcgagaatggctgcctgaaggcgacgcagggcctcatggtgctctccctcattctctgctgtcaatccttcatcctgttcatgttccagctctacaccatgcgacgaggaggtctcttctatgccaccggcctctgccagctttgcaccagcggggcggtgtttactggcgccttga

SEQ ID NO: 103 - DNA, 4854 bp, Homo sapiens
gaattcctgaggccggcgctgcaggcagcggcggctgcgcggtgaacgaggcggcctgcgcggcggagtgctgagtcccgatccccggctctgtccggcccacggatcctcaagcccgggccccgggcccggccccagcctcagccctgagcgtctcggggcggatggcgcggggcggcgggggcgggcggtgctgagccctgcgcgggccatggcctcggcctgcggggcgccgggcccggggggcgccctgggcagccaggccccctcctggtaccaccgcgacctgagccgggcggccgcggaggagctgctggcccgggcgggccgcgatggcagcttcctggtccgagacagcgagagcgtggcgggggccttcgcgctctgcgtcctgtatcagaagcatgtgcacacgtatcgcattctgcctgatggagaagatttcttggctgtgcagacctcgcagggtgtgcctgtgcgccgcttccagaccctgggtgagctcatcggcctgtacgcccagcccaaccagggccttgtgtgcgccctgcttcttcctgtagagggtgagcgagagccggacccaccggatgaccgggatgcctcagatggggaggatgagaagcccccgctgcccccgcgctctggctccaccagcatttctgccccccactgggcccagcagtcccctgccagctcctgagactcccacagctccagctgctgagagtgctcccaatgggctgagcaccgtctcgcacgactacctgaaaggcagctatgggctggacctggaagctgtgaggggtggagccagccacctgccccacctcacccgtaccctcgctacctcatgccggaggctgcacagtgaggtggacaaggtcctgtcaggcctggagatcctgtccaaggtgtttgaccagcagagctcgcccatggtgacccgccttttgcagcagcagaacctgccacagacaggggagcaggaactagagagcctggtgctgaagctgtcagtgctaaaggacttcctgtcaggcatccagaagaaggccctgaaggccctacaggacatgagctccacagcacccccagctccgcagccatccacacgtaaggccaagaccatccccgtgcaggcctttgaggtgaagctagatgtgaccctgggtgacctgaccaagattgggaagtcacagaagttcacgctgagcgtggatgtggagggtgggcggctggtgctgctgcggagacagcgggactcccaggaggactggaccaccttcacgcacgaccgcatccgccagctcattaagtcccagcgtgtccagaacaagctgggtgttgtgtttgagaaggagaaggaccggactcagcgcaaggacttcatctttgtcagtgcccggaagcgggaggccttctgccagctgttgcagctcatgaagaacaagcactccaagcaggacgagcccgacatgatctcagtcttcataggcacctggaacatgggaagtgtaccacctccaaaaaacgtgacatcctggttcacatcgaagggtctggggaagaccctggacgaggtcacagtgaccataccccatgacatctatgtctttgggacccaggagaactcagtgggcgaccgcgagtggctggacctactgcgcgggggcctcaaggagcttacggatctggattaccgcccgattgccatgcaatcactgtggaatatcaaggtggcagtgctggtcaagccagagcacgagaaccgtatcagccatgtcagtacgtccagtgtgaagactggcatcgccaacaccctggggaacaagggggctgtgggcgtctccttcatgtttaatggcacctcatttggctttgtgaattgtcacctcacctcgggaaatgagaagacggctcggaggaaccaaaactacttggacatcctgcggctgctctcgctgggcgaccggcagctcaatgcctttgacatctctctgcgtttcacacacctcttctggtttggggacctcaactaccgcctggacatggatatccaggagatcctgaactacatcagcaggaaagagtttgagcccctcctcagggtggaccagctcaacctggagcgggagaagcacaaggtcttccttcgattcagtgaggaggagatctccttcccacccacctaccgctatgagcggggttcccgggacacatatgcctggcacaagcagaagccaactggggtccggaccaatgtgccctcatggtgtgaccggattctgtggaaatcctaccctgaaactcacatcatctgcaattcttatggttgcactgatgacatcgtcaccagcgaccattcccccgtgtttgggacatttgaggttggagttacctcccagttcatctccaagaaagggctctcaaagacttcagaccaggcctacattgagtttgagagcatcgaggccattgtgaagacagccagccgcaccaagttcttcatcgagttctactctacctgcctggaggaatacaagaagagctttgagaatgatgcccagagcagtgacaacatcaacttcctcaaagtgcagtggtcttcacgccagctgcccacgctcaaaccaattctggctgatatcgagtacctgcaggaccagcacctcctgctcacagtcaagtccatggatggctatgaatcctatggggagtgtgtggttgcactcaaatccatgatcggcagcacggcccaacagttcctgaccttcctatcccaccgtggcgaggagacaggcaatatcagaggctccatgaaggtgcgggtgcccacggagcgcctgggcacccgtgagcggctctacgagtggatcagcattgataaggatgaggcaggagcaaagagcaaagccccctctgtgtcccgagggagccaggagcccaggtcagggagccgcaagccagccttcacagaggcctcctgcccgctctccaggttatttgaagaaccagagaaaccgccaccaacggggaggcccccagccccaccccgagcagctccccgggaggagcccttgacccccaggttgaagccagagggagctcctgaaccagaaggggtggcggcccccccacccaagaacagcttcaataaccctgcctactacgtccttgaaggggtcccgcaccagctgctgcccccggagccaccctcgcctgccagggcccctgtcccatctgccaccaagaacaaagtggccattacagtgcctgctccacagcttgggcaccaccggcaccctcgtgtgggagaggggagttcttcagatgaggagtctggaggcacactgccccctccagactttccacctccaccactgccggactcagccatcttcctgccccccagcctggatcctttaccagggccagtggtccggggccgtggtggggctgaggcccgtggcccaccacctcccaaggcccatccaaggcctccactgcccccaggcccctcaccagccagcactttcctgggggaagtgggcagtggggatgaccggtcctgctcggtgctgcagatggccaagacgctgagcgaggtggactatgcccctgctgggcctgcacgctcagcgctcctcccaggccccctggagctgcagccccccccggggactgccctcggactatggccggcccctcagcttccctccaccccgcatccgggagagcatccaggaagacctggcagaggaggctccgtgcctgcagggcgggcgggccagcgggctgggcgaggcaggcatgagtgcctggctgcgggccatcggcttggagcgctatgaggagggcctggtgcataatggctgggacgacctggagtttctcagtgacatcaccgaggaggacttggaggaggctggggtgcaggacccggctcacaagcgcctccttctggacaccctgcagctcagcaagtgatagcggaggcaccacgaagctgtgaactcagagcccctccctgctaccaaggcccagctatggccccagggttgaaaagttatgagggtcagggcagtatctctctgcctatttattggggtgcctatttattggggatctgcattccccgctgcccaatcatttgcaatgccctaattagggcatcctgcccctcgccttttaggctcaggacggaaggtcagttgccatggttaccgaggaccctggttactctggtgctgtcctgttttactggaccccgcctcccagccccaggggtgcctgtgggggtccatttgggtacgtctgggcccccactttcaccagtttctgcggccttccaccgggcctgaaccacagcggaggagctccgctaagacctccccacccccgctgggggtgggggcgggtgtccgtccggaaatgaaggaatagcccgaggaccgggctggggtttatttaaactgttctgtgtgggtctggggagggagagcaccttaatattattggggttggttggggtggggcaggatctcagccataaagtgccagtttgcttagttctcactgtctcctggtctgtgctgccctgctctggggatgcacggcggcagggtgggggagggaggttcctcgcaggtctcagcccgggacagggtcttgccaagcagccctcctgggcagtcgtaagggttgcggcgtgatgtcttcaataaacttaagtctattcgcggatgtgagttcccagaaattcctctccctccacacacgaacaaatttgttgggggcgctctgggccccagagaaaagttttaaacaccatctctgtggggccggcgggcc

SEQ ID NO: 104 - DNA, 2373 bp, Homo sapiens
agcgggtagtgccgccgggactcttggcgggtgaaggtgtgtgtcagcttttgcgtcactcgagccctgggcgctgcttgctaaagagccgagcacgcgggtctgtcatcatgtcgcgttacgggcggtacggaggagaaaccaaggtgtatgttggtaacctgggaactggcgctggcaaaggagagttagaaagggctttcagttattatggtcctttaagaactgtatggatgcgagaaatcctccaggatttgcctttgtggaattcgaagatcctagagatgcagaagatgcagtacgaggactggatggaaaggtgatttgtggctcccgagtgagggttgaactatcgacaggcatgcctcggagatcacgttttgatagaccacctgcccgacgtccctttgatccaaatgatagatgctatgagtgtggcgaaaagggacattatgcttatgattgtcatcgttacagccggcgaagaagaagcaggtcacggtctagatcacattctcgatccagaggaaggcgatactctcgctcacgcagcaggagcaggggacgaaggtcaaggtcagcatctcctcgacgatcaagatctatctctcttcgtagatcaagatcagcttcactcagaagatctaggtctggttctataaaaggatcgaggtatttccaatccccgtcgaggtcaagatcaagatccaggtctatttcacgaccaagaagcagccgatcaaagtccagatctccatctccaaaaagaagtcgttccccatcaggaagtcctcgcagaagtgcaagtcctgaaagaatggactgaagctctcaagttcaccctttagggaaaagttattttgtttacattattataagggatttgtgatgtctgtaaagtgtaacctaggaaagataattcaaccatctaatcaaaatggatctggattactatgtaaattcacagcagtaagataatataaattttgttgaatgtattaacatcatatggtctgaaaatgtgggtttttatttggcacatttaaataaaatgtttctaactagatttttgatttgtgttcaatattaacacttcttaatttgatatatttgagagtcagacattataattgttaatccttattcatacatacctacattcagaattgaaaggtgttggttaagtcttgaacatcactattctatgcataaaacttggccaggatcttaagggactttgaaaattccatcttacccttgtagctctgggtaagatgacctgagtcccttatgatacagcctgaatgcatcatgacagatccttaagttagctaatccgtttgaagttggtgttagtaggtattgtatgatcagtggtgaagcaagtaggaccactgatgtgtctaaatgagcatgacaggaactaaacgaaactgattaaatgtatgagaaatagaaactgatttctggatgatctttatactaattgcagctttcaggctactaggtggcatagtgttaattaggactccccaagatatggggagttctactctcaatggtcttgtttctttgctttctacattagttaaccagttttataccaaaaaatgcatgtttgaggaattgtctgaaattgggacaaaacaccttcatgtaaaccagctttgcaaaattttccagcccagatactcttcatctattcaaatggattgtcttattctgagcaaagacctgttgttaatcttcaagctaggttttgcagttcccaaccacaacattcttctattttgccaggctggtgcaaagtaattaaagatgtcaatcagaaatgtcaatgagactaaagtggttttgtaaatctcagctatatttagcaacactccatgtagctaatattttttggtagcatctggtagaccttagaatgttacatagccagtaggttctttattcaaattttaagtatcttaagaatagtagggcagtaacagttacttttgagagttttctggtcaagcttttaccaggcattctctagccttggtacaaaaaaaaaaaaaacctgctggttgcgcagatacctaggcttgtccattttatgcatttcagcaaagtcattggatactattgcaacttgggaatactggtctgcatcaagtttaattcggtagtttgaccgctagtatgttggaagttatttggattgtttttggaattttgactggctgaattatggttggtataaagttatgtgtataactggcaggcttatttatctgttgcacttggttagctttaattgttctgtattatttaaagataagtttactcaacaataaatctgcagagattgaacaagtaaaaaaaaaa

SEQ ID NO: 105 - DNA, 2070 bp, Homo sapiens
ctccgggacggtgtgccaggccggggccaagtcggaggcccctcgctctgggtgggcgctggggcccgcgagggctactgtaaggacccctggcttctgaggatactgcgtctagaactttctccgtatggggccttgaggtgcttggtcgagacctgcctttgcgcttggtcccgaatcctgccctctaggagtcgctcttgcgggcctccagcccaccggaggcgaagcggccccgggcggaaggccgctggatcctcgagggaggtgccggtttctctccgcgggcgccgtggggacggtgggaggcgggggcgtcggcagcgcttggactaggtgcggccttgggcctgcctggtagcggggatttgggcccgcagagcgcccgcctctgcggctgagttctgcctggcggggaagggagcgcccgatgggtgccgaggcgtcctcctcttggtgccctggcactgctcttcccgaagaacgcctttcagttaaacgggcgtcggaaatctcgggcttcctggggcagggatcgtcgggagaggccgctctggacgtgttgacacacgtgctggagggggcaggaaacaagctcacatcttcctgtgggaaaccttctagcaacaggatgagtctgcagtggactgcagttgccaccttcctctatgcggaggtctttgttgtgttgcttctctgcattcccttcatttctcctaaaagatggcagaagattttcaagtcccggctggtggagttgttagtgtcctatggcaacaccttctttgtggttctcattgtcatccttgtgctgttggtcatcgatgccgtgcgcgaaattcggaagtatgatgatgtgacggaaaaggtgaacctccagaacaatcccggggccatggagcacttccacatgaagcttttccgtgcccagaggaatctctacattgctggcttttccttgctgctgtccttcctgcttagacgcctggtgactctcatttcgcagcaggccacgctgctggcctccaatgaagcctttaaaaagcaggcggagagtgctagtgaggcggccaagaagtacatggaggagaatgaccagctcaagaagggagctgctgttgacggaggcaagttggatgtcgggaatgctgaggtgaagttggaggaagagaacaggagcctgaaggctgacctgcagaagctaaaggacgagctggccagcactaagcaaaaactagagaaagctgaaaaccaggttctggccatgcggaagcagtctgagggcctcaccaaggagtacgaccgcttgctggaggagcacgcaaagctgcaggctgcagtagatggtcccatggacaagaaggaagagtaagggcctccttcctcccctgcctgcagctggcttccacctggcacgtgcctgctgcttcctgagagcccggcctctccctccagtacttctgtttgtgcccttctgcttcccccattcccttccacagctcatagctcgtcatctcggcccttgttccacactctccaagcacattacaggggacctgattgctacacgttcagaatgcgtttgctgtcatcctgcttggcctggccaggcctggcacagccttggcttccacgcctgagcgtggagagcacgagttagttgtagtccggcttgccggtgggggctgacttcctgttggtttgagcccctttttgttttgccctctggggtgttttctttggtcccgcaggaggggtgggtggagcccggtggactggagtttctcttgagggcaataaaagttgtcatggtgtgttacacaaaaaaagaaaaaaagaaaaaaaaagaaaaaaaaaaaaaacaagaaagagaacaaaaaagaaaagacgagcacacgaagaagaaaaaggggggcgccaaacaccgagagggcaacttatgaacgacattgtaaaagaagcacaaaagagggaatatataaaacacggagggatataaaaaaggcagagacaaaacacgctatttagagacacattggggggaaaacaaaaaaaaaaagaccgggatac

SEQ ID NO: 106 - DNA, 2213 bp, Homo sapiens
ttttttttttttgctaagcacggaggctgtttataggctgggccgcatattacaatgctcagggctccactgcaccctctcgggggtctgctagcgctttccgtagactgtctccacgccctccccactcccagccagtccagatcctctccggagggactgcagcaaggatcgttaagtctgtccaccgggatgggggaagaccagggccggagcagattggccatccttcagaagatcgacttccgctattggggagagtctgaggagtccgttctcccacggggcctcgtcactctttgcgaagggcgcctggcaggtcaaatgacctccatttccacctcgccttccaccttcttcttttgcttctccatcactgcctccagctctgacactttctctttgtcctccagcagcgagcgctgcacggtgacctggctgtacacacgtgccccctcctcggggctcaccgcccgcagctcctccttctgcagcgagaaaagctgcgccccggtcagcacacccagcgcgtccacggtcccggagctaaagcccttggcctgcagccaggcgcggacctcggaggcgtccgagcccgggctgagctgcggttccggggcgcggggccctgggactgcgcggctcggtcccgagcggccctgggccaggcgcgcctgcagttcctcgttgacgatgagcatctgggagaatttctccttctcgctggggtccaagccgttgaggctatcgcagctgtcccagcggggcctgtcccagcggggccgagccagagctggaggtggggccggggctggggctggtggtggaggaggagtgctgttcaggctgcgggcagggctttggctgtggtgcagccggggtccggggtagggtgtcaggatgttgtagggcacatatccctcctgccccgctgggtcccgaaccttccaccacttacgactgtcatccaggacctccagtacgtcccgctgcttgaccgacagctcactgctgttgcgggcctggaagtcataattacacaggacccattttcctgctgtctctgactccagctgaggctcagattctggctccaagtctcggtgaccattgacagcgacctggggggcgctttgctgccggcgcctccgctcgtgctgtagctgtttctcaactgggtcctcccaggcgcggctctgcgggtcagtgaccggcggctcccagccgctgaagaactcgggtctgtatgggggtccctcctccggggacagctccagcccggggcgggtccacgagtcccccagcgaggtccagagctcgttttcacgtggagtgacgttgtcccgcagcagcgccacggcatccgatgtcagatgcggccgccgcacactgctcgcgaactccggcccccccgacgtgttcacaatcatctgcagaggcccgaaaaggaagtgcaacagctccggagaggaggggtcggcgatgttgccgcgcagccgggccagcaggctgaaggcgtacttgatcttctgcagcacgtcggtgtactcggcctccgagggcggcttggcccgcagcgtcagcaagccctccccagccgcccggcgccggctcctgcggccgcgttcccggtgctccagcaccctggccgcctccgccgacttctgcagcctcgatacaaagctctctacgtcgtcgaacacgtggttcaggatgtccacttcccgctccgcctgcagaaccgccaggtcaggaccccggggacccaggtccggggaggccgagtcagcgttgctcgaggtccccaccggctcaggcctctgcgcctcctctgcctcgggaatgggcttcgcctggggtcgtccgcggcccgcgccccgctctacggtgctgatcactgcgcggactgacgggcggcgctgcaggggcggggtctcagcggcgggcgagcggtcgcgctgcaactcctcctgcgtggccctgagcgccgccgccctgcgctccccgcggcccgagcggtaattgtgcagagccccctggatgtcctctcggatcagctccgcctcgtcctggctgctcccccagatccttcttggccatgttctgttcatgtcctcatcccaccttcatgttctatcttgaccctgggtccaatctcaaaccccactgccttccagaacttccttcccaggtcccctgcccttccttgctct

SEQ ID NO: 107 - DNA, 2017 bp, Homo sapiens
tccacacacacaaaaaacctgcgcgtgaggggggaggaaaagcagggcctttaaaaaggcaatcacaacaacttttgctgccaggatgcccttgctttggctgagaggatttctgttggcaagttgctggattatagtgaggagttcccccaccccaggatccgaggggcacagcgcggcccccgactgtccgtcctgtgcgctggccgccctcccaaaggatgtacccaactctcagccagagatggtggaggccgtcaagaagcacattttaaacatgctgcacttgaagaagagacccgatgtcacccagccggtacccaaggcggcgcttctgaacgcgatcagaaagcttcatgtgggcaaagtcggggagaacgggtatgtggagatagaggatgacattggaaggagggcagaaatgaatgaacttatggagcagacctcggagatcatcacgtttgccgagtcaggaacagccaggaagacgctgcacttcgagatttccaaggaaggcagtgacctgtcagtggtggagcgtgcagaagtctggctcttcctaaaagtccccaaggccaacaggaccaggaccaaagtcaccatccgcctcttccagcagcagaagcacccgcagggcagcttggacacaggggaagaggccgaggaagtgggcttaaagggggagaggagtgaactgttgctctctgaaaaagtagtagacgctcggaagagcacctggcatgtcttccctgtctccagcagcatccagcggttgctggaccagggcaagagctccctggacgttcggattgcctgtgagcagtgccaggagagtggcgccagcttggttctcctgggcaagaagaagaagaaagaagaggagggggaagggaaaaagaagggcggaggtgaaggtggggcaggagcagatgaggaaaaggagcagtcgcacagacctttcctcatgctgcaggcccggcagtctgaagaccaccctcatcgccggcgtcggcggggcttggagtgtgatggcaaggtcaacatctgctgtaagaaacagttctttgtcagtttcaaggacatcggctggaatgactggatcattgctccctctggctatcatgccaactactgcgagggtgagtgcccgagccatatagcaggcacgtccgggtcctcactgtccttccactcaacagtcatcaaccactaccgcatgcggggccatagcccctttgccaacctcaaatcgtgctgtgtgcccaccaagctgagacccatgtccatgttgtactatgatgatggtcaaaacatcatcaaaaaggacattcagaacatgatcgtggaggagtgtgggtgctcatagagttgcccagcccagggggaaagggagcaagagttgtccagagaagacagtggcaaaatgaagaaatttttaaggtttctgagttaaccagaaaaatagaaattaaaaacaaaacaaaaaaaaaaaacaaaaaaaaacaaaagtaaattaaaaacaaaacctgatgaaacagatgaaggaagatgtggaaaaaatccttagccagggctcagagatgaagcagtgaaagagacaggaattgggagggaaagggagaatggtgtaccctttatttcttctgaaatcacactgatgacatcagttgtttaaacggggtattgtcctttccccccttgaggttcccttgtgagccttgaatcaaccaatctagtctgcagtagtgtggactagaacaacccaaatagcatctagaaagccatgagtttgaaagggcccatcacaggcactttcctacccaattacccaggtcataaggtatgtctgtgtgacacttatctctgtgtatatcagcatacacacacacacacacacacacacacacacacacaggcatttccacacattacatatatacacatactggtaaaagaacaatcgtgtgcaggtggtcacacttcctttttctgtaccacttttgcaacaaaacaaaac

SEQ ID NO: 108 - DNA, 4673 bp, Homo sapiens
caatgttcccgagcctgatggacatatcatatcaccactgttggcaggattttatatgttttggaccatgatcattttgttacaggtcttgattcctatttctctctatgtttccatcgaaattgtgaagcttggacaaatatatttcattcaaagtgatgtggatttctacaatgaaaaaatggattctattgttcagtgccgagccctgaacatcgccgaggatctgggacagattcagtacctcttttccgataagacaggaaccctcactgagaataagatggtttttcgaagatgtagtgtggcaggatttgattactgccatgaagaaaatgccaggaggttggagtcctatcaggaagctgtctctgaagatgaagattttatagacacagtcagtggttccctcagcaatatggcaaaaccgagagcccccagctgcaggacagttcataatgggcctttgggaaataagccctcaaatcatcttgctgggagctcttttactctaggaagtggagaaggagccagtgaagtgcctcattccagacaggctgctttcagtagccccattgaaacagacgtggtaccagacaccagagcaggtcatggtggactttgctgctttgggaccattaacatttcaactcctacacatactgccctttgactcagtaagaaaaagaatgtctgttgtggtccgacaccctctttccaatcaagttgtggtgtatacgaaaggcgctgattctgtgatcatggagttactgtcggtggcttccccagatggagcaagtctggagaaacaacagatgatagtaagggagaaaacccagaagcacttggatgactatgccaaacaaggccttcgtactttatgtatagcaaagaaggtcatgagtgacactgaatatgcagagtggctgaggaatcattttttagctgaaaccagcattgacaacagggaagaattactacttgaatctgccatgaggttggagaacaaacttacattacttggtgctactggcattgaagaccgtctgcaggagggagtccctgaatctatagaagctcttcacaaagcgggcatcaagatctggatgctgacaggggacaagcaggagacagctgtcaacatagcttatgcatgcaaactactggagccagatgacaagctttttatcctcaatacccaaagtaaagatgcctgtgggatgctgatgagcacaattttgaaagaacttcagaagaaaactcaagccctgccagagcaagtgtcattaagtgaagatttacttcagcctcctgtcccccgggactcagggttacgagctggactcattatcactgggaagaccctggagtttgccctgcaagaaagtctgcaaaagcagttcctggaactgacatcttggtgtcaagctgtggtctgctgccgagccacaccgctgcagaaaagtgaagtggtgaaattggtccgcagccatctccaggtgatgacccttgctattggtgatggtgccaatgatgttagcatgatacaagtggcagacattgggataggggtctcaggtcaagaaggcatgcaggctgtgatggccagtgactttgccgtttctcagttcaaacatctcagcaagctccttcttgtccatggacactggtgttatacacggctttccaacatgattctctattttttctataagaatgtggcctatgtgaacctccttttctggtaccagttcttttgtggattttcaggaacatccatgactgattactgggttttgatcttcttcaacctcctcttcacatctgcccctcctgtcatttatggtgttttggagaaagatgtgtctgcagagaccctcatgcaactgcctgaactttacagaagtggtcagaaatcagaggcatacttaccccataccttctggatcaccttattggatgctttttatcaaagcctggtctgcttctttgtgccttattttacctaccagggctcagatactgacatctttgcatttggaaaccccctgaacacagccgctctgttcatcgttctcctccatctggtcattgaaagcaagagtttgacttggattcacttgctggtcatcattggtagcatcttgtcttattttttatttgccatagtttttggagccatgtgtgtaacttgcaacccaccatccaacccttactggattatgcaggagcacatgctggatccagtattctacttagtttgtatcctcacgacgtccattgctcttctgcccaggtttgtatacagagttcttcagggatccctgtttccatctccaattctgagagctaagcactttgacagactaactccagaggagaggactaaagctctcaagaagtggagaggggctggaaagatgaatcaagtgacatcaaagtatgctaaccaatcagctggcaagtcaggaagaagacccatgcctggcccttctgctgtatttgcaatgaagtcagcaagttcctgtgctattgagcaaggaaacttatctctgtgtgaaactgctttagatcaaggctactctgaaactaaggcctttgagatggctggaccctccaaaggtaaagaaagctagataccctccttggagttgcaagtattctttcaaggttggaagagggattttgaagaggtatctctccaagcaagaatgacttgtttttccataagggacatgagcattttactaggcttggaagagctgacatgatgagcattattgtatgtttgtatatacatttgtgatagagggctagagtttgacctagagagagtttaaggaagtgaaatatttaattcagaaccaaatgcttttgtaaagctttttggattttgtaaaagcattttcattctcttagaaattcaagtattttcaaggggagtcatttgagatatatttattttactaggagatcttatattctagggaaatgctttaaatggtcaggctccagtcggaatttttttaagaaaaaagtagtttttaatacattggttaggactcagaggaaatacggaaaaaacattgtagatggttaatttacagataaaatcccaagagccttttaaacaacaaggtacctaaaatagggtataattatactgcttaaaatacagttagtgcctattaatagctttttatttcctatggggagatgcttttggtcttctggctgaagatgtaggcatacctctcactcatttcaatgttttcctgaggtggagccttcattggaaaggggaaagagggattctagggtttcatcagggaccaggaatgcattcctctgtcaggttccaatcaagagaagaccttttatgagatctgcctctgtatagatgttgtcagttaggaaactgaagccataggtcaggcagacatcagctcagcctgtggcccattgggtgatttcctgtattttaaaactgacagtagcctgatcaaagtgatacaatcaatttcaaaacaatcttccagagaccacttgaaggttcatagtttttacaataccctgagacttttcaggtgttggagcctctaaaatatgagatataaacagaaactaatacaagttgttctctggaggtttctatgaggttcttagaaaaatttggttttaaaatcatttgaggacaggaatgtctatagcaagtttactcctattgcgaatcatgtatgctggctttagttgtaacaaacgattttattctaagtaaggccaggtgctactataaaatcatatattcctgttgaagttcttttgaagtcctatctctatttattatatttgaaagttgtcagccaccagtcatccagaatttccttcctgaatctccatgctcatatgcaatgtctacatcaaggtcttcttaatgactattattctcagggtttagttttctaccttctgcctactattttggtctgacatttttgtagccttctgttattattggaaatagtctcttacataagctgatttcgagaactttcaaaatctcacatagctaatggaagttgctttctgctttcttatgactgtttttataaataaactgtttcataaataatgtatactggaaaattgtcatcactcttgtaaacatttgccaaatccaactgtaattagtaccagaacttagaaggaaagtcacaaagcatgccttttaccagaatattgctttgccttttcttatatggaaaatcactgatgtcatatcatttattatcctcacagcagctggcattcattccctgaaatcgtcgtctcctgataaacaataatttagagatatgttcacttgtaaataaaaaggttagaatctaaggacaaagaatgatccaaaaatactaaggaaaaagaacaattttcaattttcagaaatgaattatctgtacatatgaatagaggaaaatactgagtgctaatgttacagggccacaatctcatatccacaattccaaaatctccaaacctctgaaaactgaaatatttttcataaattaggcgtaaattctatgccctgaacaaatgtaaagctatttatgtactttgcttaatgtaatcattcatatactttgctacaaaaatattaatatatttcattactg

SEQ ID NO: 109 - DNA, 1924 bp, Homo sapiens
gcgagatgaaccccagtgcccccagctaccccatggcctcgctctacgtgggggacctccaccccgacgtgaccgaggcgatgctctacgagaagttcagcccggccgggcccatcctctccatccgggtctgcagggacatgatcacccgccgctccttgggctacgcgtatgtgaacttccagcagccggcggacgcggagcgtgctttggacaccatgaattttgatgttataaagggcaagccagtacgcatcatgtggtctcagcgtgatccatcacttcgcaaaagtggagtaggcaacatattcattaaaaatctggacaaatccattgataataaagcactgtatgatacattttctgcttttggtaacatcctttcatgtaaggtggtttgtgatgaaaatggttccaagggctatggatttgtacactttgagacgcaggaagcagctgaaagagctattgaaaaaatgaatggaatgctcctaaatgatcgcaaagtatttgttggacgatttaagtctcgtaaagaacgagaagctgaacttggagctagggcaaaagaattcaccaatgtttacatcaagaattttggagaagacatggatgatgagcgccttaaggatctctttggcaagtttgggcctgccttaagtgtgaaagtaatgactgatgaaagtggaaaatccaaaggatttggatttgtaagctttgaaaggcatgaagatgcacagaaagctgtggatgagatgaacggaaaggagctcaatggaaaacaaatttatgttggtcgagctcagaaaaaggtggaacggcagacggaacttaagcgcaaatttgaacagatgaaacaagataggatcaccagataccagggtgttaatctttatgtgaaaaatcttgatgatggtattgatgatgaacgtctccggaaagagttttctccatttggtacaatcactagtgcaaaggttatgatggagggtggtcgcagcaaagggtttggttttgtatgtttctcctccccagaagaagccactaaagcagttacagaaatgaacggtagaattgtggccacaaagccattgtatgtagctttagctcaggcgcaaagaagagcgccaggctcacctcactaaccagtatatgcagagaatggcaagtgtacgagctgttcccaaccctgtaatcaacccctaccagccagcacctccttcaggttacttcatggcagctatcccacagactcagaaccgtgctgcatactatcctcctaagccaaattgctcaacctaagaccaaagtcctcggctggactgctcagaggtgccagacctcatccattccaaaaatatgccccggtgctatccgcccagctgctcctagaccaccatttagtactatgagaccagcttcttcacaggttccacgagtcatgtcaacacagcgtgttgctaacacatcaacacagacaatgggtccacgtcctgcagctgcagccgctgcagctactcctgctgtccgcaccgttccacagtataaatatgctgcaggagttcgcaatcctcagcaacatcttaatgcacagccacaagttacaatgcaacagcctgctgttcatgtacaaggtcaggaacctttgactgcttccatgttggcatctgcccctcctcaagagcaaaagcaaatgttgggtgaacggctgtttcctcttattcaagccatgcaccctactcttgctggtaaaatcactggcatgttgttggagattgataattcagaacttcttcatatgctcgagtctccagagtcactccgttctaaggttgatgaagctgtagctgtactacaagcccaccaagctaaagaggctgcccagaaagcagttaacagtgccaccggtgttccaactgtttaa

SEQ ID NO: 110 - DNA, 4765 bp, Homo sapiens
ggccggcggtggcggcggcgagggctggactcgggcttagggcctgctgtggaggcagcggcggacgccgagctaagcagtttctctggaaacccccctggtaagtgtggaggaggcgggacactctgacccaagacgaaaggcctgtagctccagccaaagaaaataaaccttaggagggagaaggaaaaaaaaaaatccatcagctgttcctgagaacagcctgcattggaatctacagagaggacaactaatgtgagtgaggaagtgactgtatgtggactgtggagaaagtaagtcacgtgggcccttgaggacctggactgggttaggaacagttgtactttcagaggtgaggtgtcgagaagggaaagtgaatgtggtctggagtgtgtccttggccttggctccacagggtgtgctttcctctggggccgtcagggagctcatcccttgtgttctgccagggtggggtacggggtttgacactgaggagggtaacctgctggctggagcggcagagcagtggccttgatttgtcttttggaagattttaaaaaccaaaaagcataaacattctggtccttcagcaatgctttctctgaagaaatacttaacggaaggacttctccagttcaccattctgctgagtttgattggggtacgggtggacgtggatacttacctgacctcacagcttcccccactccgggagatcatcctggggcccagttctgcctatactcagacccagttccacaacctgaggaataccttggatggctatggtatccaccccaagagcatagacctggacaattacttcactgcccggcggctcctcagtcaggtgagggccctggacaggttccaggtgccaaccactgaggtaaatgcctggctggttcaccgagacccagaggggtctgtctctggcagtcagcccaactcaggcctcgccctcgagagttccagtggcctccaagatgtgacaggcccagacaacggggtgcgagaaagcgaaacggagcagggattcggtgaagatttggaggatttgggggctgtagcccccccagtcagtggagacttaaccaaagaggacatagatctgattgacatcctttggcgacaggatattgatctgggggctgggcgtgaggtttttgactatagtcaccgccagaaggagcaggatgtggagaaggagctgcgagatggaggcgagcaggacacctgggcaggcgagggcgcggaagctctggcacggaacctgctagtggatggagagactggggagagcttccctgcacaggtgcctagtggggaggaccagacggccctgtccctggaagagtgccttaggctgctggaagccacctgcccctttggggagaatgctgagtttccagcagacatttccagcataacagaagcagtgcctagtgagagtgagccccctgctcttcaaaacaacctcttgtctcctcttctgaccgggacagagtcaccatttgatttggaacagcagtggcaagatctcatgtccatcatggaaatgcaggccatggaagtgaacacatcagcaagtgaaatcctgtacagtgcccctcctggagacccactgagcaccaactacagccttgcccccaacactcccatcaatcagaatgtcagcctgcatcaggcgtccctggggggctgcagccaggacttcttactcttcagccccgaggtggaaagcctgcctgtggccagtagctccacgctgctcccgttggcccccagcaattctaccagcctcaactccaccttcggctccaccaacctgacagggctcttctttccaccccagctcaatggcacagccaatgacacagcaggcccagagctgcctgaccctttggggggtctgttagatgaagctatgttggatgagatcagccttatggacctggccattgaagaaggctttaaccctgtgcaggcctcccagctggaggaggaatttgactctgactcaggcctttccttagactcgagccatagcccttcttccctaagcagctctgaaggcagttcttcctcttcttcctcctcctcttcctcttcttcctctgcttcttcctctgcctcttcctccttttctgaggaaggtgcggttggctacagctctgactctgagaccctggatctggaagaggccgagggtgctgtgggctaccagcctgagtattccaagttctgccgcatgagctaccaggatccagctcagctctcatgcctgccctacctggagcacgtgggccacaaccacacatacaacatggcacccagtgccctggactcagccgacctgccaccacccagtgccctcaagaaaggcagcaaggagaagcaggctgacttcctggacaagcagatgagccgggatgagcaccgagcccgagccatgaagatccctttcaccaatgacaaaatcatcaacctgcctgtggaggagttcaatgaactgctgtccaaataccagttgagtgaagcccagctgagcctcatccgagacatccggcgccggggcaagaacaagatggcggcgcagaactgccgcaagcgcaagctggacaccatcctgaatctggagcgtgatgtggaggacctgcagcgtgacaaagcccggctgctgcgggagaaagtggagttcctgcgctccctgcgacagatgaagcagaaggtccagagcctgtaccaggaggtgtttgggcggctgcgagatgagaacggacgaccctactcgcccagtcagtatgcgctccagtacgccggggacggcagtgtcctcctcatcccccgcacgatggccgaccagcaggcccggcggcaggagaggaagccaaaggaccggagaaagtgagcctggggaagaagggggtttgaagcccaccaagaccgaaactggagaagggctggacctggacctggacctggacctacagcggggacttaaatgccttcttatccaatatatcttctcagatgggatgactgcgggtcagtgtacaggaagaggcaggcactggctggctcagctccactcgggtggagtggaagtggccagaccatttagacggacagggtcctcaccctacccctttcctgtgaggcaggggtggtggtggagttgctggaggtagaggagctatgtggagcaaaggccgacagaggggaaggaatggacctgtgagaggaagggaaggtggcagaaagtctcatttcaggaaggagggatagaaggaaggaaggaaggaacccccccccccccccgaaaaaaaaatcaaagcgggaagaaaatcagagggaaggttaaggttggctctggccaggattccaggcagcaggttggagtgactggtgggcctagatcactggtgtgataaaccccatttcaccccggggggggtggggtacacagacacagggtgggggtggggaggggcggtgttaactctttctgctccttgcattttgacatccctgaaggggagctcttggatatcattggccatgtttcaatcgaatggagccactgggccccaacactggctttgagatttagagtcaaagggtagagtgaacaggaaagggtcacgtggtcccatgttgcaacagccccaacatcacgcatgtcattcactgccttgccactccatctccctccgtgctccagccacccctgagctgaggctcccattgtctccatcagagcctgcatgtgtatgccgtcctcccctggtccggtgtttgtgttccccacccctcacagactgcctgagctcttctgtaagctggggtagggtgatggcagtgctccgggaactgggcctgcagccttcctcttctgggactgctgtgaggcagaggaatgatggagaatctagtgtagcagcctccaggcaggattcagcacaacactggggagtcacccttccctcgggcctctgcctaccaacaactgggcttatcactgggaaaacacaaaaaattacacaacccagcaacaacaaaagaactagtcctcttagaatttcttgcgctttgatttttttagggcttgtgccctgtttcacttatagggtctagaatgcttgtgttgagtaaaaaggagatgcccaatattcaaagctgctaaatgttctctttgccataaagactccgtgtaactgtgtgaacacttgggatttttctcctctgtcccgaggtcgtcgtctgctttcttttttgggtttctttctagaagattgagaagtgcatatgacaggctgagagcacctccccaaacacacaagctctcagccacaggcagcttctccacagccccagcttcgcacaggctcctggagggctgcctgggggaggcagacatgggagtgccaaggtggccagatggttccaggactacaatgtctttatttttaactgtttgccactgctgccctcacccctgcccggctctggagtaccgtctgccccagacaagtgggagtgaaatgggggtggggggaagcactgattcccagttagggggtgcctaactgagcagtagggatagaaggtgtgaacctgggagtgcttttataaattattttccttgtagattttatttttaatttatctctgtgacctgccagggagaggggagagagagagagatgctgttgagcacatgacaaaataaaataaaatggatgattcattcttaaaaaaaaaa

SEQ ID NO: 111 - DNA, 2989 bp, Homo sapiens
gtgctgtttttgttgttggtgaaaggtgaggggaacagctgatccgtctgttgggaggacagatatctcaaggccaggatggaagaatcaccactaagccgggcaccatcccgtggtggagtcaactttctcaatgtagcccggacctacatccccaacaccaaggtggaatgtcactacacccttcccccaggcaccatgcccagtgccagtgactggattggcatcttcaaggtggaggctgcctgtgttcgggattaccacacatttgtgtggtcttccgtgcctgaaagtacaactgatggttcccccattcacaccagtgtccagttccaagccagctacctgcccaaaccaggagctcagctctaccagttccgatatgtgaaccgccagggccaggtgtgtgggcagagcccccctttccagttccgagagccaaggcccatggatgaactggtgaccctggaggaggctgatgggggctctgacatcctgctggttgtccccaaggcaactgtgttacagaaccagctcgatgagagccagcaagaacggaatgacctgatgcagctgaagctacagctggagggacaggtgacagagctgaggagccgagtgcaggagctcgagagggctctggcaactgccaggcaggagcacacggagctgatggaacagtacaaggggatttcccggtcccatggggagatcacagaagagagggacatcctgagccggcaacagggagaccatgtggcacgcatcctggagctagaggatgacatccagaccatcagtgagaaagtgctgacgaaggaagtggagctggacaggcttagagacacagtgaaggccctgactcgggaacaagagaagctccttgggcaactgaaagaagtacaagcagacaaggagcaaagtgaggctgagctccaagtggcacaacaggagaaccatcacttaaatttggacctgaaggaggcgaagagctggcaagaggagcagagtgctcaggctcagcgactgaaagacaaggtggcccagatgaaggacaccctaggccaggcccagcagcgggtggccgagctggagcccttgaaggagcagcttcgaggggcccaggagcttgcagcctcaagccagcagaaagccacccttcttggggaggagttggccagcgcagcagcagccagggaccgcaccatagccgaactacaccgcagccgcctggaagtggctgaagttaacggcaggctggctgagctcggtttgcacttgaaggaagaaaaatgccaatggagcaaggagcgggcagggctgctgcagagtgtggaggcagagaaggacaagatcctgaagctgagtgcagagatacttcgattggagaaggcagttcaggaggagaggacccaaaaccaagtgttcaagactgagctggcccgggagaaggattctagcctggtacagttgtcagaaagtaagcgggagctgacagagctgcggtcagccctgcgtgtgctccagaaggaaaaggagcagttacaggaggagaaacaggaattgctagagtacatgagaaagctagaggcccgcctggagaaggtggcagatgagaagtggaatgaggatgccaccacagaggatgaggaggccgctgtggggctgagctgcccggcagctctgacagactcagaggacgagtccccagaagacatgaggctcccaccctatggcctttgtgagcgtggagacccaggctcctctcctgctgggcctcgagaggcttctccccttgttgtcatcagccagccggctcccatttctcctcacctctctgggccagctgaggacagtagctctgactcggaggctgaagatgagaagtcagtcctgatggcagctgtgcagagtgggggtgaggaggccaacttactgcttcctgaactgggcagtgccttctatgacatggccagtggctttacagtgggtaccctgtcagaaaccagcactgggggccctgccacccccacatggaaggagtgtcctatctgtaaggagcgctttcctgctgagagtgacaaggatgccctggaggaccacatggatggacacttctttttcagcacccaggaccccttcacctttgagtgatcttactccctcgtacatgcacaaatacacactcatgcacacacacactcacacacatgcatacacttaggtttcatgcccattttctatcacactgggctccatgatattctgttccctaagaactgcttctgtgtgccctgttttcatcccaagatttctcacttcatcctctcctacctggctcttttgtcccagggaggggtcctgttcggaagcagtggctgaatttatcccctgaaagtggttttggaggaaccgggatggaggaggccttcccctgtgggaatagaatcgtccactcctagccctggttgcttctgatacacagccactgcacacacacactcacactcacactcccttgtctgatgccccaaagccaattcctggggcaccctaccctctcttatttggagtttccgttggtttacctgagttttctctggggtctgcacagaggcagcagcatggacatcatggcctctcaggtcccttttggttctcagtttcattggttcctctttctgttcccccattgacttctgtgccccaccctagccttttccataaccttaggtattcagtttggaggggttttttgtatttttgaggattcctgtattctgtatcctctcctcgcatctcctcacatggaaagaaataatgtatttgtgccttctgtgaggaatggggggaacaagtggtcccaggtatccccatttccaaggcccccctccctctccaggtccccccacagcaataaaagcttccccctgatatccatccctttgtagtttgaacaaatatatttatatgatatgtaaaaaaaaaa

SEQ ID NO: 112 - DNA, 3901 bp, Homo sapiens
ttttttttttttgttatcataaagagtgttgaagtttatttattatagcaccattgagacattttgaaattggaattggtaaaaaaataaaacaaaaagcatttgaattgtatttggtggaacagcaaaaaaagagaagtatcatttttctttgtcaaattatactgtttccaaacattttggaaataaataactggaattttgtcggtcacttgcactggttgacaagattagaacaagaggaacacatatggagttaaattttttttgttgggatttcagatagagtttggtttataaaaagcaaacagggccaacgtccacaccaaattcttgatcaggaccaccaatgtcatagggtgcaatatctacaataggtagtctcacagccttgcgtgttcgatattcaaagactgttttgctccattccccagtgtgtttcgtgcaaccatcctccagaactgtgtaggtgaatttgctatttccttcagccttgaattcaccttcatttgaccccatcagcttcagggccttctttacatttccactggcctgatccatgtatgcaatgctatttttgcagtgatatgtgatgttctgggaagctcggctggagagaagtcgaaggaatgccagctgcacatcaaggacatcttcaggaagttcaggattgccgtagctaaactgaaaaccaccatccatggactctccaaaccaaacgtgtttcttctcagcactagaatctgtccaccagtgtttccgtggaacattcaaaggattggcacttatgcatgtttccccagtttccatattacagaataccttgatagcatccaatttgcatccttggttagggtcaacccagtattctccactcttgagttcaggatggcagaatttcaggtctctgcagtttctagcggggtttttacgagaaccatcaggactaatgaggctttctatttgtccattaacagacttgagtgaagtcataatctcatcggtgttgattttgaaatccattggttcatctccataatacggggcaaaaccgccagctttttcacctccaatcccagcaatggcagcggctccaacaccaccacagcaaggaccaggggcaccaggaggtccaggagggcctggttgccctgggtggcctggggagccctcagatcctctttcacctctgttacctcgaggccctggtggtccaatgggacctggatgtccactggttccatctttgccaggaggtcctgcaactccaggagggcctccttcacctttctcacccggagcccctctttctcctttaccaccaggttcaccattctgtccaggagcaccagggaaaccagcaggtcctggagggccagtttcacctctctcaccagggctaccacgaggtccagctatacctggaagtccgggggcaccaccttcacccttatctccaggctggccagctgggccaggaggaccaataggaccagtaggaccccttgggccatctttccctgggacaccatcagcacctggaccgcctggttcacccttgtcaccctttggaccaggacttccaagacctcctctttctccaggcattccttgcagaccaggagtaccagcagcaccaggtggcccaggaggaccagcagcaccctttcctccttcgggaccagggggaccagctccacctctaagtcctggggcccctgccaatccaggaggtccacgttcaccaggggcaccagcatcacccttgcctcctggagctccaggtgcaccggcatcaccctttggacctggttccccaggttttccattttctcctggaggaccacctgtaccaggcaagccttgtaatccttgtggaccagggggtcctgtgtctcctttgtcaccaccaggcccagtaggccctgggggtccctgaggtccagtttcaccattctttccaggaggaccctgagggccaggtcctccagggccacctcgttctccattcttaccaggagcaccatcatttcctttaggaccggggaagcccatgacaccaggctgacctcggggaccagatggcccaggaggacctggtcgaccactttctccttgacttccgggaggccctggtttcccatcacttcctggtcctcctggacttccgggcatgcccctcattcctggacctccagggacgccatctctgccaggttctccagcagctcctctgggccctgcagggcctggagcaccacgctctccagcaggacccttttctcctgggatgccatttggtccagcaggtcctcggaacccaggggcacccctttctcctgcagctcctggaagcccatttgcaccaggttctccaggtgatccatccttgccatcttcgcctttagctcctggaacacctggaataccagcctcaccgcgttcaccacgtggtccgggctctcctttggcaccattcttaccaggctcacctgcaccacctcgcagtccaggagcaccattagcaccggctggtcctggaggaccccgggctcccatcagtccaggagctccaggaatgccagcgggacccatttcgcctttaccaccaggactaccattaatcccaggagggccaggaggaccttgagcaccagcgtgtccctgaggtccaggttctcctctttgtccaggggcaccatttgaaccaggagaccctgcaggtccaacttcacccttagcaccaggggatccagggaatccggcagttccaggaggaccaggagggcctggttgaccatcactgcctcgagcaccgtcattaccccgagcacctgcagccccaggaagtcctggccgtcctcgctcaccaggagcccctcttggacccatgggtccaggagctccattttcgcctggaagaccattttcaccctttaatccaggagcacctgtttcacccttttctccatttcgtccatcgaagcctctgtgtcctttcataccagggaatccaggtatcccagctggacctttgatacctggaggtccaggcaatcctcgctctccaggtcgtccgggtctacctgattctccatcttttccagcaggaccagatggacctatagcaccaggaggtcctggagggcctgaaggaccagcttgcccaggttcaccagggggtccttggtatcctggagatccaggggaaccaggatgaccagatgtaccagggggaccgggagggcctggggggccagctggtccaggatagcctgcgagtcctcctactgctactccagacttgacatcatatgaatcatactggggagaatagttctgaggaccagtagggcatgattcacagattccaggggggccaggagaaccaggggaccctggttgtcctggaataccagggtcaccatttctcccaggaataccaggagggcctggatctcccttggggccttgaggtccttgaccattaggagggcgagtaggagcagttggaggctgtgggcaaactgcacaacattctccaaatggaatttctgggttggggcagtctaattcttgatcgtcacatattatgtcatcgcagagaacggatcctgagtcacagacacatatttggcatggttctggcttccagacatctctatccgcataggactgaccaagatgggaacatcctccttcaacagcttcctgttgtgccaaaataatagtgggatgaagcagagcgagaagtagccagctccccttttgcacaaagctcatcatgtctaaatatcagacatgagactctttgtgcaaaaaggagaaaagaaaagcagttcaaagtagcaccatcaagttgttccctgcccttcagcaccgggcccgtccggacgcgtgg

SEQ ID NO: 113 - DNA, 5339 bp, Homo sapiens
ctttccccttactccgctcccctcttttccctccctctcctccccttccctctgttctctcctcctcttcccctcccctcccccgtccggggcactctatattcaagccaccgtttcctgcttcacaaaatggccaccgcacgcgacacctacggtcacgtggcctgccgccctctcagtttcgggaatctgcctagctcccactaaggggaggctacccgcggaagagcgagggcagattagaccggagaaatcccaccacatctccaagcccgggaactgagagaggaagaagagtgaaggccagtgttaggaaaaaaaaaaacaaaaacaaaaaaaacgaaaaacgaaagctgagtgcatagagttggaaaggggagcgaatgcgtaaggttggaaaggggggcgaagaggcctaggttaacattttcaggcgtcttagccggtggaaagcgggagacgcaagttctcgcgagatctcgagaactccgaggctgagactagggttttagcggagagcacgggaagtgtagctcgagagaactgggacagcatttcgcaccctaagctccaaggcaggactgctaggggcgacaggactaagtaggaaatcccttgagcttagacctgagggagcgcgcagtagccgggcagaagtcgccgcgacagggaattgcggtgtgagagggagggcacacgttgtacgtgctgacgtagccggctttccagcgggtatattagatccgtggccgcgcggtgcgctccagagccgcagttctcccgtgagagggccttcgcggtggaacaaacactcgcttagcagcggaagactccgagttctcggtactcttcagggatgagtcatgtggcagtggaaaatgcgctcgggctggaccagcagtttgctggcctagacctgaactcttcagataatcagagtggaggaagtacagccagcaaagggcgctatattcctcctcatttaaggaaccgagaagctactagaggtttctacgataaagacagttcagggtggagttctagcaaagataaggatgcgtatagcagttttggatctcgtagtgattcaagagggaagtctagcttcttcagtgatcgtggaagtggatcaaggggaaggtttgatgatcgtggacggagtgattacgatggcattggcagccgtggtgacagaagtggctttggcaaatttgaacgtggtggaaacagtcgctggtgtgacaaatcagatgaagatgattggtcaaaaccactcccaccaagtgaacgcttggaacaggaactcttttctggaggcaacactgggattaattttgagaaatacgatgacattccagttgaggcaacaggcaacaactgtcctccacatattgaaagtttcagtgatgttgagatgggagaaattatcatgggaaacattgagcttactcgttatactcgcccaactccagtgcaaaagcatgctattcctattatcaaagagaaaagagacttgatggcttgtgcccaaacagggtctggaaaaactgcagcatttctgttgcccatcttgagtcagatttattcagatggtccaggcgaggctttgagggccatgaaggaaaatggaaggtatgggcgccgcaaacaatacccaatctccttggtattagcaccaacgagagagttggcagtacagatctacgaagaagccagaaaattttcataccgatctagagttcgtccttgcgtggtttatggtggtgccgatattggtcagcagattcgagacttggaacgtggatgccatttgttagtagccactccaggacgtctagtggatatgatggaaagaggaaagattggattagacttttgcaaatacttggtgttagatgaagctgatcggatgttggatatggggtttgagcctcagattcgtagaatagtcgaacaagatactatgcctccaaagggtgtccgccacactatgatgtttagtgctacttttcctaaggaaatacagatgctggctcgtgatttcttagatgaatatatcttcttggctgtaggaagagttggctctacctctgaaaacatcacacagaaagtagtttgggtggaagaatcagacaaacggtcatttctgcttgacctcctaaatgcaacaggcaaggattcactgaccttagtgtttgtggagaccaaaaagggtgcagattctctggaggatttcttataccatgaaggatacgcatgtaccagcatccatggagaccgttctcagagggatagagaagaggcccttcaccagttccgctcaggaaaaagcccaattttagtggctacagcagtagcagcaagaggactggacatttcaaatgtgaaacatgttatcaattttgacttgccaagtgatattgaagaatatgtacatcgtattggtcgtacgggacgtgtaggaaaccttggcctggcaacctcattctttaacgagaggaacataaatattactaaggatttgttggatcttcttgttgaagctaaacaagaagtgccgtcttggttagaaaacatggcttatgaacaccactacaagggtagcagtcgtggacgttctaagagtagcagatttagtggagggtttggtgccagagactaccgacaaagtagcggtgccagcagttccagcttcagcagcagccgcgcaagcagcagccgcagtggcggaggtggccacggtagcagcagaggatttggtggaggtggctatggaggcttttacaacagtgatggatatggaggaaattataactcccagggggttgactggtggggtaactgagcctgctttgcagtaggtcaccctgccaaacaagctaatatggaaaccacatgtaacttagccagactataccttgtgtagtttcaagaactcgcagtacattaccagctgtgattctccactgaaattttttttttaagggagctcaaggtcacaagaagaaatgaaaggaacaatcagcagccctgttcagaaggtggtttgaagacttcattgctgtagtttggattaactcccctcccgcctacccccatcccaaactgcatttataattttgtgactgaggatcatttgtttgttaatgtactgtgcctttaactatagacaactttttattttgatgtcctgttggctcagtaatgctcaagatatcaattgttttgacaaaataaatttactgaacttgggctaaaatcaaaccttggcacacaggtgtgatacaacttaacaggaatcatcgattcatccataaataatataaggaaaaacttatgcggtagcctgcattagggctttttgatacttgcagattgggggaaaacaacaaatgtcttgaagcatattaatggaattagtttctaatgtggcaaactgtattaagttaaagttctgatttgctcactctatcctggataggtatttagaacctgatagtctttaagccattccagtcatgatgaggtgatgtatgaatacatgcatacattcaaagcactgttttcaaagttaatgcaagtaaatacagcaattcctctttcaacgtttaggcagatcattaattatgagctagccaaatgtgggcatactattacagggaaagtttaaaggtctgataacttgaaaataggtttttaggagaattcatctacttagactttttaagtgcctgccataaatgaaattgaaatggtagaatggctgaccacagcaatgaccagccctcattagggccctggatgatttttggtctaataacgcatgctagtgttgatgttttttggtcagagggtatgaacaggaagaattaaatgcagcaggctttattttaaatgccgattcacattactctgttcaagctgcgttgagatgttaaactggcttactatagacttcgtaaaaatggctccagaaaagtaacaaactgaaatctttgagatcacacaggttggaaatatgtacataactgcacaaggtgtcaattctgctctacagtgcagttttagtcagttttagttgcataggtttccattgtatttatagtctgtttatgctaaatctggccaaagatgaacattgtccaccactaaaatgcctctgccactttgaattctgtgctaattttgtggccagaatgcggtgatcaaaacgctccatctttttacagtggcataggaagacggcaaaaatttcctaaagtgcaatagattttcaagtgtattgtgccttgttctaaaacttttattaagtaggtgcacttgacagtattgaggtcatttgttatggtgctatttcaattagtctaggtttaggcccttgtacattttgcccataactttttacaaagtacttcttttattgcacattcagagaattttatatatatgtcttgtgtgcgtgtccttaaacttccaatcttactttgtctcttggagattgttgaacgcagcttgtctaggaaggggatgggactagattctaaaatttatttgggaccatgggaatgatagttgggaagaaaactatttgcacacgacagatttctagatactttttgctgctagttttatgtaatatttattgaacattttgacaaatatttatttttgtaagcctaaaagtgattctttgaaagtttaaagaaacttgaccaaaagacagtacaaaaacactggcacttgaatgttgaatgtcaccgtatgcgtgaaattatatatttcggggtagtgtgagcttttaatgtttaagtcatattaaactcttaagtcaaattaagcagacccggcgttggcagtgtagccataactttctgatgttagtaaaaacaaaattggcgacttgaaattaaatcatgccaaggttttgatacacttgtcttaagatattaatgaaacacttcaaaacactgatgtgaagtgtccagattctcagatgtttgttgtgtggattttgtttagttgtgtgtttttttttttttttcagtgaatgtctggcacattgcaatcctcaaacatgtggttatctttgttgtattggcataatcagtgacttgtacattcagcaatagcatttgagcaagttttatcagcaagcaatattttcagttaataaggtttcaaaaatcatgtaaggatttaaacttgctgaatgtaaagattgaacctcaagtcactgtagctttagtaattgcttattgtattagtttagatgctagcactgcatgtgctgtgcatattctgattttattaaaataaaaagttgaactgcaaaaaaaaaa

SEQ ID NO: 114 - DNA, 4677 bp, Homo sapiens
ttttttttttttaaattttactattttatttgtgaaaaaactacaagcagaattcataaatagacatttctatttaaagcaggaaaatgataaagtggcttctaataacatagtcgtgcacatgccagtaacaggaatatattaacatcttttatttgctagacaaagagcagtgtccaatataaatttcccccaaaacatttaagacctgtgaatttttgaccagttcacaaaaccaccaactgacactttagcatgaagaaaaaaacaaacctaacagactgtcagctctaaagacattacagagcagaaacttccaaaagcgttatacaagctgtctttctgggcaaatgaaaaatatagctcgtataatacattaacaaaaattcacaagataagattgttttgacatacttaacaagcattctctatttgtctccaacaaacaaagctaaggaaataatgtaaccatctttacacagtaaattaaggttacaagtcatacacaagaacagaactgcttgcgcattaaaaactgttcagctccattgtcatactctaaatgttggctcttaaaccattttcggttacatacaagcaaaggttattatatattcagcaattaataaattttcaataatttaagatacggtagcttaaaaaagtagactgagaatggtcttgataaggcaggtgaaacatcttagtggaactaaactcacagaagcttctgccaatgtttttaaatatccagattgaaactgaaaggttttgattagaatattgtgtgggtgtcaagatgtctttttttttgtaactgcatgactcaagcagagcaagtcaggtaagctctgtgtgcgcgcacacgcacgagtgtgaaagattgcgtggtattaaaacaaatggaaacttgcaagcgtaacactgtgctttttgtttgtttaacctgctttctgtgccactgaataccaagtatttctggtcctcttttaatgtatatctttataatctacactagtgtttttacacgctgcctactaattgtagggcatactgcagacacaggaagttacaggaattccatttccagaatacatgcctgagggatgtcatcaatttccaaaattaaaagtctataaagtacctactacctcactacccaacagaatacaccacagcagctaaaggggctggccctgtaacatctgattgcttagataactcccactgttagctgcggtttctacaaagatggtaatttcatgccacttgttctaaagcaatcttcttccccttccttcacccctccccattctttaatttatcacggaggcaaaactgaaaaaccaaaacattggcatgaatgaattagcagcctatgagtagctggttaatcagctttttccactaatctatggggtccaatcactttacatgaaactagtttttgaaaaagtacacagtgtgtctgaacaaagtgcataccaacagttattggttcaataagcagtgcaacctacatgagtttggtggcatttaagttttttcaaaaagttaaaaacagcaatttcttaaacctctggaaaataaatatggctgactaatttaccctccctgagacccttaataaaaggaatattaaaactttagaaggaatgtctttgcaatatcccaccaatattaaaatgtggatttaaaattcatagtcaaatcactatgtattatatattctgatgcttatagaaagcatctgatttcctttggttcattaataaatactttaaaaatgtatttaaaaagataagcaaagcttgcatcccagacacaagcattattttaaaaaggggggaacattgtccatgcatttgagaataggaccacagcaacaaatggcactgctttataatctatacctttgagaaaagaatttaaattatggtacattagtgactacagaatagttttaatgtaaatgtgaaaggaacctttcctgttggctactcaattcaagctgttaatttttttatttgttgcctccacacacagaaattactgctattattaagcaaaccaggttcttaacaccaaaatgtggtgcttcattacaaatcaggctgccctcccgtgagtccctaaaggtcaaataaagagaggtaacctcaaattctcatgcttgaaatgtctctgaagtactacaaactctgtatctaaatgtaaaagtcaaatagaagagagaccccacatccaaacaaaagcaaaaccaaaattttaaaaaattattttaataaggagaggtggaatcttattagtggtctttgattattattattattttttttttttttgcaagacagtaaaaagagtgaagagaatgaaatagaacagtttactcaagctatctttatgtccaggaagaaaaaagattacatgctgctcgcagtaagtacgagctttcccctgcaactctggctgcaggcgcgcaagccgttcaccactggagttcctaccacagcaggggattgagaaatgtctccaaacactgaaaagctccatgtcaggactggatgtgtggttgataacctttgttcagtaaaacaaatcatagtaggttttgagaaggaaaaaaagaatgctcacaactgaatcggtagagtgaaggtttatcagacaaagggacatgaggcaaacaaattttaattacaggaaccaccactgcaatgtcatgtagaaaggagaaacaagggactagcttcctggatggaccaaaaatacagtttatagactgtttcaatcctaaaactaagacaatttctagatttacctcagacatgagtagacgtctggaaaatggatggaattcaagttacagaataccatattttcatgagtgcttatgtaagaacagcaaatgataacatgtaaccgtaatttacacgaatacttggcattctggagctactttagttacttttgaatgatcaaagccctgcccaactaaaccacttgtgatttgtcagttattccattgcaaatgcaggctatctggagcagtctttaaatttgagatcacattgtttaaaaaatatatatttttatatcgtccagtactctttagacagatgagagagtcaagttcccacatggattggaacatacttcatgtaagactgattttaattaaatttcagcactttcatagaagggactgtcccagatctgtaactgttcaatgttgtattcacttcacagtgtatcaagcaccagcgtttgccatggattggtttcaaataaccctttatatataattttatatttatatatatatagttatatcaaaactgatagtacatagtataactggaagaaagaactaaacttaaaaggatatgctgaaaggatggagtttgtgttcacaataaataaaagttccctccccctcccagccctccccaccggcaacaaaacaaaaacaaaaaaccagttgtaatgtacatggaaaattgtgcacagcagattttttttttttttataaaaagtagattcaggagcacatccaattataaatgattgttaggaaaatcatataaaacaatggaatacataaaagtgtcaagagtaatcgtcagggtgcgaaattccttggtggccagatgcccatggcaagcagaaattatcctggcagcatcactaagaggtcgatgtccacagaagattctccagggatgcaagcagcatgggcaggtggaggttttgaatttcataccctgattcatagttttcacaattccatgtgcaatttcagaaagattcatcattgactgctgacatgtcgccctttggcgtggaggaacgggaggagcccttgtctgtgctctcagaccccgagctgctctggttctgctgttcggaccctgcactggaggtcactgtggatgaggatgtcgatgaggagcgagtcttttccttaaagtctgtgataatgacggtgacgttgcccacagttactgccaactgctgtgcagtgctcctgtccacgtttttcagccggggccttgaggtgtgatttgtttcgctggtctttgttgtagcatttgcagactgtatgctgtttgcttcactaggaggatctttcagaatgtcagactttggtttggttttcttgttggtatttttcttggtaacactaggactaatttccttgtctttctcaggtttctctttgtcctgcttttcaactttctccttcttctcctttttagggggtggtggggtggcatactgttgtgccacttgttgtgccaccagctgagaattgatccgaggttttctggtggaggtgcctttcctcacatcgcagatgctgcatttaaaggcttcagcactgtttctgaaggtgcagacgctacaatcccaaaacccttcgtctgcggcaggtttcgcttgtctttttggcctggtcgggctcttcttgtcgcccatggtcatggatgggctgtaccccgccccccccaagccgaaaccggcgccgctcggaggagaaacgccgtccggggagtcgtcgcggaccggcccccctccctcccccgcgcccgcccgcccgccctcagccgctggggctcgagctccggccgccgccgccgccgccgccgccagtctccggacgagactagtccccgc

SEQ ID NO: 115 - DNA, 446 bp, Homo sapiens
gaccgtgccgaaattcccgggtcgacgatttcgtgcttacccacaatctgctgagctcgcatgtgcggggggtggggtcccgtggcttccccctgcgcctccaggccacagaggtccgtatctgccctgtggaattcaaccccaacttcgtggcgcgtatgatacctaaagtggagtggtcggcgttcctggaggcggccgataacttgcgtctgatccaggtgccgaaaggccggttgagggatatgaggagaatgaggagtttctgaggaccatgcaccacctgctgctggaggtggaagtgatagagggcaccctgcagtgcccggaatctggacgtatgttccccatcagccgcgggatccccaacatgctgctgagtgaagaggaaactgagagttgattgtgccaggcgccagtttttcttgttatgactgtgtattttt

SEQ ID NO: 116 - DNA, 1710 bp, Homo sapiens
ccggtcccgggtttttgggggaccccccgtcgcgccggtttcctgggaacgcttgccacgggtcaaaacacggggccgggccccaacaagggtgttaaaccttttcgggccagggcgccgcaacagtgtcttttgtggtattgtgttttttttttttggtagtgaatactttattttgttgtaaacaagttagttttgagggtatttcctcgtggtcctcctgccgtcactcgtccccatgttccaatgatgctgatcaactgctttattcagtttcccatctttcttcttgcccagtcatcgtagcctttctttttttaaacacatgatccctagtactcatctttggaggacaaaaggctttccatatgttagaaaaatttgaatctcatagtactcacaacaatgagcagcattgtaagttgtgatgcattcatttggattggaacattctcaatcagtccttccactctaagtaaatatttgtttctcacagaacacaaggcagttcaaagggcctcttgttagagatttataggtgtatgaatgggaaacatcatacaagcagtgaaaacaaaaatctttccaggttgtcggattttctccttcttggtcttataaaaagcaactagacatctttaatttaaaaaatacatgcacatatatacaatagtgattggaatgttatttttatccaaaacattatagagtttatctcagatatactgagtactgtcactcagtctgtaaactacccccagagggtggtttgtttcctcattccttaaaaaaaaacaaaaacaaataaacaaacaaaaaagaagtttactaaatttaaacactgacatcctgtgaagatgccagtctttacaggcgtttgtaaaagtagactgtggggagtatgttacactaatacaaagttttacaaatgaatacaagtgaaatatataaattacaatgaaatagaggaagattgtggctctgtcctgggttggttcttttagcagtcatattgctgttggtgagagcagcaaaagccacatatgcctccaagcactccatttattacttgaataagacacaagatgaattcaattccaccaagagccaagaggatagaaaacagagatacattccattccacaatgtgcttgggttcagtgcactcggaccatgtggaggtatccagaaggtactggccctcggtgctggcaaaggtgtagttccactggccgagggaatcaagacatagtggtccttctgctaagccaagggctgccacaatgacacagtagccagatcctgcaattccaatgagagcagccaatacagaagaaagcatcgcacatcgtttgccacagttttcatggccacagcagccacagcagtcatcctgttccagcccaatgaagacaaatgctggcaggagcatcagcaggccacctcctacgatgccagaaaagaaccacacgaagcggctgaggtggttttcggaggcatactttgtttccccattgggaaagtaaagcaaaatattagccgcgatgcacaggagggcgagccccaccagagaatgtccgatgcatcgtgcacacttcccatagcacatggtggtctgctaggttttctcccccttctctttgtcttcagctcagtgataccccaaattagatgaaagtgtgcccttctggtggagaaagcaaacaccac

SEQ ID NO: 117 - DNA, 2378 bp, Homo sapiens
gtcatgcagtgcgccggaggaactgtgctctttgaggccgacgctaggggcccggaagggaaactgcgaggcgaaggtgaccggggaccgagcatttcagatctgctcggtagacctggtgcaccaccaccatgttggctgcaaggctggtgtgtctccggacactaccttctagggttttccacccagctttcaccaaggcctcccctgttgtgaagaattccatcacgaagaatcaatggctgttaacacctagcagggaatatgccaccaaaacaagaattgggatccggcgtgggagaactggccaagaactcaaagaggcagcattggaaccatcgatggaaaaaatatttaaaattgatcagatgggaagatggtttgttgctggaggggctgctgttggtcttggagcattgtgctactatggcttgggactgtctaatgagattggagctattgaaaaggctgtaatttggcctcagtatgtcaaggatagaattcattccacctatatgtacttagcagggagtattggtttaacagctttgtctgccatagcaatcagcagaacgcctgttctcatgaacttcatgatgagaggctcttgggtgacaattggtgtgacctttgcagccatggttggagctggaatgctggtacgatcaataccatatgaccagagcccaggcccaaagcatcttgcttggttgctacattctggtgtgatgggtgcagtggtggctcctctgacaatattagggggtcctcttctcatcagagctgcatggtacacagctggcattgtgggaggcctctccactgtggccatgtgtgcgcccagtgaaaagtttctgaacatgggtgcacccctgggagtgggcctgggtctcgtctttgtgtcctcattgggatctatgtttcttccacctaccaccgtggctggtgccactctttactcagtggcaatgtacggtggattagttcttttcagcatgttccttctgtatgatacccagaaagtaatcaagcgtgcagaagtatcaccaatgtatggagttcaaaaatatgatcccattaactcgatgctgagtatctacatggatacattaaatatatttatgcgagttgcaactatgctggcaactggaggcaacagaaagaaatgaagtgactcagcttctggcttctctgctacatcaaatatcttgtttaatggggcagatatgcattaaatagtttgtacaagcagctttcgttgaagtttagaagataagaaacatgtcatcatatttaaatgttccggtaatgtgatgcctcaggtctgccttttttttctggagaataaatgcagtaatcctctcccaaataagcacacacattttcaattctcatgtttgagtgattttaaaatgttttggtgaatgtgaaaactaaagtttgtgtcatgagaatgtaagtcttttttctactttaaaatttagtaggttcactgagtaactaaaatttagcaaacctgtgtttgcatatttttttggagtgcagaatattgtaattaatgtcataagtgatttggagctttggtaaagggaccagagagaaggagtcacctgcagtcttttgtttttttaaatacttagaacttagcacttgtgttattgattagtgaggagccagtaagaaacatctgggtatttggaaacaagtggtcattgttacattcatctgctgaacttaacaaaactgttcatcctgaaacaggcacaggtgatgcattctcctgctgttgcttctcagtgctctctttccaatatagatgtggtcatgtttgacttgtacagaatgttaatcatacagagaatccttgatggaattatatatgtgtgttttacttttgaatgttacaaaaggaaataactttaaaactattctcaagagaaaatattcaaagcatgaaatatgttgctttttccagaatacaaacagtatactcatgaattgctaagtgtttttttatttttgcatatttattgaactgtctaattgaatacagcttgctcttgtcacctcttcaagctttcaagcctttatagaaaagcttctttgtggcttacactggaaattatgaaagcagtttttctcctaagacttttggtttctcgcattgcctctcagactaagcactaaaaagcaaagcaaaacagaactagttctgtcttaatgaaatatatcaacccaaaagtgtaatgaggaaaatgcttcattagtttcccctagcagacttttacttctcttacactgctacaccattactttcttgagacatttgtaagtcctttgatacagaagagttatatttaggaggctttaatgaaggg

SEQ ID NO: 118 - DNA, 1851 bp, Homo sapiens
agccaaaagaggaagggaccggcctcccacgtccacagggacctgacttccacctctctgcccagatttgcttatgtcactgtcgccccgggacggggaggtggggagctgagggcaagtcgcgcccgcccctgaaatcccagccgcctagcgattggctgcaagggtctcggcttggccgcggattaatcacacccgagggcttgaaaggtggctgggagcgccggacacctcagacggacggtggccagggatcaggcagcggctcaggcgaccctgagtgtgcccccaccccgccatggcccggctgctgcaggcgtcctgcctgctttccctgctcctggccggcttcgtctcgcagagccggggacaagagaagtcgaagatggactgccatggtggcataagtggcaccatttacgagtacggagccctcaccattgatggggaggagtacatccccttcaagcagtatgctggcaaatacgtcctctttgtcaacgtggccagctactgaggcctgacgggccagtacattgaactgaatgcactacaggaagagcttgcaccattcggtctggtcattctgggctttccctgcaaccaatttggaaaacaggaaccaggagagaactcagagatccttcctaccctcaagtatgtccgaccaggtggaggctttgtccctaatttccagctctttgagaaaggggatgtcaatggagagaaagagcagaaattctacactttcctaaagaactcctgtcctcccacctcggagctcctgggtacatctgaccgcctcttctgggaacccatgaaggttcacgacatccgctggaactttgagaagttcctggtggggccagatggtatacccatcatgcgctggcaccaccggaccacggtcagcaacgtcaagatggacatcctgtcctacatgaggcggcaggcagccctgggggtcaagaggaagtaactgaaggccgtctcatcccatgtccaccatgtaggggagggactttgttcaggaagaaatccgtgtctccaaccacactatctacccatcacagacccctttcctatcactcaaggccccagcctggcacaaatggatgcatacagttctgtgtactgccaggcatgtgggtgtgggtgcatgtgggtgtttacacacatgcctacaggtatgcgtgattgtgtgtgtgtgcatgggtgtacagccacgtgtctacctatgtgtctttctgggaatgtgtaccatctgtgtgcctgcagctgtgtagtgctggacagtgacaaccctttctctccagttctccactccaatgataatagttcacttacacctaaacccaaaggaaaaaccagctctaggtccaattgttctgctctaactgatacctcaaccttggggccagcatctcccactgcctccaaatattagtaactatgactgacgtccccagaagtttctgggtctaccacactccccaaccccccactcctacttcctgaagggccctcccaaggctacatccccaccccacagttctccctgagagagatcaacctccctgagatcaaccaaggcagatgtgacagcaagggccacggaccccatggcaggggtggcgtcttcatgagggaggggcccaaagcccttgtgggcggacctcccctgagcctgtctgaggggccagcccttagtgcattcaggctaaggcccctgggcagggatgccacccctgctccttcggaggacgtgccctcacccctcactggtccactggcttgagactcaccccgtctgcccagtaaaagcctttctgcagcagctgaaaaaaaaaa

SEQ ID NO: 119 - DNA, 2218 bp, Homo sapiens
ttctcccgcaaccttcccttcgctccctcccgtcccccccagctcctagcctccgactccctccccccctcacgcccgccctctcgccttcgccgaaccaaagtggattaattacacgctttctgtttctctccgtgctgttctctcccgctgtgcgcctgcccgcctctcgctgtcctctctccccctcgccctctcttcggcccccccctttcacgttcactctgtctctcccactatctctgcccccctctatccttgatacaacagctgacctcatttcccgataccttttcccccccgaaaagtacaacatctggcccgccccagcccgaagacagcccgtcctccctggacaatcagacgaattctccccccccccccaaaaaaaagccatccccccgctctgccccgtcgcacattcggcccccgcgactcggccagagcggcgctggcagaggagtgtccggcaggagggccaacgcccgctgttcggtttgcgacacgcagcagggaggtgggcggcagcgtcgccggcttccagacaccaatgggaatcccaatggggaagtcgatgctggtgcttctcaccttcttggccttcgcctcgtgctgcattgctgcttaccgccccagtgagaccctgtgcggcggggagctggtggacaccctccagttcgtctgtggggaccgcggcttctacttcagacttccaggcaggcccgcaagccgtgtgagccgtcgcagccgtggcatcgttgaggagtgctgtttccgcagctgtgacctggccctcctggagacgtactgtgctacccccgccaagtccgagagggacgtgtcgacccctccgaccgtgcttccggacaacttccccagataccccgtgggcaagttcttccaatatgacacctggaagcagtccacccagcgcctgcgcaggggcctgcctgccctcctgcgtgcccgccggggtcacgtgctcgccaaggagctcgaggcgttcagggaggccaaacgtcaccgtcccctgattgctctacccacccaagaccccgcccacgggggcgcccccccagagatggccagcaatcggaagtgagcaaaactgccgcaagtctgcagcccggcgccaccatcctgcagcctcctcctgaccacggacgtttccatcaggttccatcccgaaaatctctcggttccacgtccccctggggcttctcctgacccagtccccgtgccccgcctccccgaaacaggctactctcctcggccccctccatcgggctgaggaagcacagcagcatcttcaaacatgtacaaaatcgattggctttaaacacccttcacataccctccccccaaattatccccaattatccccacacataaaaaatcaaaacaaacaaacaaaaaaaacccaacaacaacccagaacaaagcaaaacccagcagactgtacttagcattgtctaaatccattctcaaattccaaatatcacagacacccctcacacaaggaatataaaaaccaccaccctccagcctgggcaacgtagtaaaacctcatctatacaagaatttaaaaataagctgggcgtggtggtacacacctgtggtcccagctactagggaggctgagccaggaagaacgctccagcccaggacttcgaggctgcaatgagctataattgcatcattgcactccagcctgggcaacagagaccctgtctcaaccaccaccaccaccaccacccctactacccctgtattcaaggtaaaaattgaagtttgtatgatgtaagagatgagaaaaacccaacaggaaacacagacacatcctccagttctatcaatggattgtgcagacactgagtttttagaaaaacatatccacggtaaccggtccctggcaattctgtttacatgaaatggggagaaagtcaccgaaatgggtgccgccggcccccactcccaattcattccctaacctgcaaacctttccaacttctcacgtcaggcctttgagaattctttccccctctcctggtttccacacctcagacacgcacagttcaccaagtgccttctgtagtcacatgaattgaaaaggagacgctgctcccacggaggggagcaggaatgctgcactgtttacaccctgactgtgcttaaaaacactttcactaataaatggttattactcccaaaaaaaaaa

SEQ ID NO: 120 - DNA, 2100 bp, Homo sapiens
ttttttttttttgcagctctgaggtaaacttttatttcttggctgacaggacttccacacccatgctcctcctggcaccttttactctgcccaagcagtggcagcccagtccaaaaggtgcctgccatggccaaaggggttggggagtcacttcacattccaggctggaggagtgagaggacttgggggtactcctcccaccccattgccagcaagaggccatgactcacctcaaccccaagtcctgcatcctggtgggaagtgacaatgcctcctcccagctctccatacctaatggggtcatgaccagacagggtaggacccaggcccccagcttcagttggtaacggtggcctccacggctgccccctgtccaggtgacaaccccagcccccatgatggggcagcaaaggtctcttctcctccttggtcctcagcaacagacagagccctccacaccaggcaggacagaggcaaagtcagaagcagcagcggtggcagggaaggagcagccagcacaggcccagggctctcctgaagtcatttaagctgtctgccatgcggctctgggactggccactaggtgggcgtaggcggctgtgatacaggtacttggacacctttctgtcctgatgctagctgatacttgtctttggctgctgcccgctccttggcatcaaaataccagacagtgatggcgtacctggtggcataggctggcttcacctcgtgggggttccgccggtcagaccagaaaatgagcaaccggtcaaagagtggctcgatgttggctaccacgggccggccctcagggaagatctgcagcaggccgccatgcaccttaacgtcccagttctgattcaggtaatagatacaggtgatgcagcgcccatcgccgtggggattgtcaacgtgccttacgtacccgagcccgttgcctgggtaacacgccaccatggccttggtgcgcccgttgatgacatagctgcccagccgccctgcgcagtggcggatgacggcgtccacatgggccatgagggcaccaatgcttcgacagcctggttcatggccttccacccaggcaatctggtccccacggatgctgcgcggcgggatcgccctctggctcactagctgcccgtctcgcaggcgcccaccccgtttgagggcctccacctcggccagcacgcgaccgcccagtgctgcccccaggaagctgtccttgacgcagatgccgtagtaccgcatgcagggcacgatatagtccagggccaggcgctcgggcgcagagggcagcgcctcctccatcagcccagcactggcctcaccactgccactgctgcagctgcagctcatgccaccctcccgctctgcctcctggttctcttgcctggcccagggccgtttgctgggtgaaggggcatccccaccatcctcggcccatttccgtttgggggcctcaggccgtgcgccctgggctgccaatcgctggcaccccttggtgaccagcgctgcagcgccttcactctgcagcggccgcagctcaccaccatcctgcccgccaaaaccgtcccgaagagggctggcagtggtagaggtggctgtggctctgggggtcccactccctgccgaggcctcactaggcactcctggacagtggtaggaggggagcaggggacagggcaggtaactctccactcccatcctggcccggccaggctcaggctccaagggctctgacgaagaccctggtaactgagggagagcctgacttaggggctgcggctggcacgggctgtccatggcagcagtgtcttcatcccccgggcatggagggcaccgcccgggcccatggtgccaccctcctccgcctcctcctccgcctccacttgatgcagctgggggccaccgggcctggcgtggggcagggtgaggcagggcagacagcaagagctcttctcgtgccctgggggttgcttgctggtccccaagtcctctgcggtccctaagggcttgggaagggacccttcagggtggctagagaaaggaaaaaaaaaaagggatgtgagagaaactagagacaggcaggcaggggaaagc

SEQ ID NO: 121 - DNA, 2040 bp, Homo sapiens
ttttttttttttccattcctacatatatttatttggtattgatgatgaggaaccccgtcaaaaattcctgtaagggagactactactcgactgttaggggtattgcaacatttacatacatgtagcttatcacatacgtaaacatttacacaaatagtacagcggtgaaccaccaagttctcattccacattcctttcccacactgcgtttacctgcccattcttgaaactggatctcagggcagcacattgcatttcaacaggcctagtgctgcttctcagaggcagtcaactcaatggtgcaaaagcacaggacagcgacaaggcattcacactacacagacatgtgatctcttactgacagcaggaagggaagagagatggagatcccgggtgggaaagcgacaacatgcatcacaggagccatgtgagatgcggtgaggaccgctggtacgcagcgtcccttgccaaggaatgcctcacagccatccgagaatgacaggcacgaaacatgaggaccttcctcgggtcagtcaagcatcatgctgggaggactcccacgtgtcccggtacacaggtcctggcactcatccgaccacagcttgctgtttggtccccaaaatgggcccacacccaggcgctgccaacacggcggctccgtctgagtcccttcgggtctccatcccatgggggtgcacgtctcagttttcctctaaccactgcttgagcagcctctgaaacattattttgctccccttctgcctctctcgctggcgcttctcctctgtctcctgtggctggagtgccgcttcaggcagaggcccgggctggttggtgcctaggctgagagtcaagccactgaggccctgcaccagcgtctcccaggaggagggatgtggggccctgttactctccccagggatcccagaaagattcggcctgtggctctggcagtatcgacattcacatcggaatcgattctgacttctgtcacctaatggggagattctggcttccctcccaacagcatagggggccatgtgatcgcggtgtctcctcctcacatgccgcaggaatgctttcttcctctgaaggaactccagcctctcccaccgccgctcttccagggtcttctcctctctgtaccgctggcggagcagcccctctgggagaggcacggcctggctggggccaggaccggggctcaggttactgaggcccatcatcggctgttctgagtacgaaggctgagagggcgctggaccttcctgggaagtctctgcagctgtcatcggggaagatttggaaggcgatgctggattccgtttctggagtggatccatggaggtctggtcccagctggaagctccgccaggccctcgggtccagaaaaggaggtgaagctggaggttctcagacaccaagaaggtggcgaggaatgtgtgcgggcagaacccagaccaaggcagtcaggtcgctgggttcacaaggtcgatgctgtgggtgtaggccgagtgactgctacacctttcacctacaaaagaaaataacctcactggccaggtcacattcctccaggtatttactgagggcccactccattcagcggtgccttcggtgaattatccaatgcagccccatcccaaggacgtgtcttaatctgaggaataaaatattgtccaaggagccaggaatggtggctcacgcctctaatccaagcactttgggaggctgaggtgggaggactgcttcagcccaggagtttgaggccagcctgagcaacagggcgagaccaccatctcaacaaaaaacttaaaaaattagccaggcatgatgctgcacagctatggtcccagctactggggaggctgaggtgggacgatcacttgaactcaggaggttgaggccagtgcagtccaacctgggtgacagggtgagtccatgcgcgttctcgctccggagccggttcccgccgtccaagcgccaacgcggcgcctcgtttcctctgccctggaaacgcagcgccgcccgctcgtaatt

SEQ ID NO: 122 - DNA, 3722 bp, Homo sapiens
agcgggggacagccgcggtactgggatgggtaggtgaggatcccgagactgagtgagcttctgcgcgcggtgcttttgggaacgcgggactggcaacctgcggcgccaggagctgggccgaggcgcggcggcgcggctgcgggccgccgtctggatgggaagttacggcgaagtccacccagcgtttctcagacaatctgaaggcaaatcctgtttagacccaggcgaaggttcctggtgacccaggctctcaccagccaattgtcccttgccgtcctcctgagggtatctggagcttcagtgctgtgtgctcttggcctccacactggggatgccactgactcccactgtccagggcttccagtggactctccgaggccctgatgtagaaacttccccattcggtgcaccaagagcagcctcacatggtgtgggccgacatcaagagctgcgagatccaacagtccctggccccacctcttctgccacaaacgtcagcatggtggtatctgccggcccttggtccggtgagaaggcagagatgaacattctagaaatcaacaagaaatcgcgcccccagctggcagagaacaaacagcagttcagaaacctcaaacagaaatgtcttgtaactcaagtggcctacttcctggccaaccggcaaaataattgcgactatgaagactgcaaagacctcataaaatctatgctgagggatgagcggctgctcacagaagagaagcttgcagaggagctcgggcaagctgaggagctcaggcaatataaagtcctggttcactctcaggaacgagagctgacccagttaagggagaagttacaggaagggagagatgcctcccgctcattgaatcagcatctccaggccctcctcactccggatgagccggacaactcccagggacgggacctccgagaacagctggctgagggatgtaggctggcacagcacctcgtccaaaagctcagcccagaaaatgatgacgatgaggatgaagatgttaaagttgaggaggctgagaaagtacaggaattatatgcccccagggaggtgcagaaggctgaagaaaggaagtccctgaggactcactggaggagtatgccatcacttgttcaaatagccaccacccttgtgagtccaaccagccttacgggaacaccagaatcacatttgaggaagaccaagtcgactcaactctcattgactcatcctctcatgatgaatggttggatgctgtatgcattatcccagaaaatgaaagtgatcatgagcaagaggaagaaaaagggccagtgtctcccagatcatctggaaggttttgttgtctaatctctgttggttatatcttctgtcatccctgtcctgcctggctcatcaggaatctgcaggagtctgaagaggaggaagccccccaggagtcctgggatgaaggacattggtgtgatcaagtgaaaaaggaggaccaagaggccacaagtcccaggctcagcagggagctgctggatgagaaagagcctgaagtcttgcaggactcactggatagattttattcaactccctgtgggtacctggaactgcctgacttatgccagccctacagaagtgagttttactcattgcaggaacaacaccttggcttggctcttgacgtggacagaatgaaaaaggaccaagaagaggaagaagaccaaggcccaccatgccccaggctcagcagagagctgccggaggtagtagagcctgaggacttgcaggactcactggatagatggtattcaactcctttcagttatccagaactgcctgattcatgccagccctacggcagttgcttttactcactggaggaagaacacgttggcttttctcttgacgtggatgaaattgaaaagtaccaagaaggggaagaagatcaaaacccaccatgccccaggctcaacgaggtgctgatggaagcagaagagcctgaagtcttgcaggactcactggatagatgttattcgactacttcaacttactttcaactacatgcctcattccagcagtacagaagtgccttttactcatttgaggaacaggacgtcagcttggcccttgacgtggacaataggttttttactttgacagtgataaggcaccacctggccttccagatgggagtcatattcccacactaagcagcccttactaagctgagagatgtcattgctgcaggcaggacctataggcacatgtaggtttgaatgaaactgtagttccctttggaagcccagtcataggatgggaaagtgggcatggctctattcctattctcagaccttgccagtggccacctgtgctcagtctgaagacattggacccaagttaggtgtgacacgttcacacgactatgtagcacatgccgggagtgatctgccagacattctaatttgaaccagatatctctgggtagctacaaagttcctcaggggtttcattttgcaggcatgtctctgagctgctatacctgctcaaggtcagtgtcatctttgtgtttagctcatccaaaggtgttaccctggtttcattgaacctaacctcattctttgtgtcttcagtgttggcttgttttagctgatccatctgtaacacaggagggatccttggctgaggattgtatttcagaaccaccaactgctctttacaattgttaacccgctaggctcctttggttagagaagccacagtccttcagcctccaattggtgtcagtacttaggaagaccacagctagatggacaaacagcattgggaggccttagccctgctcctctcaattccatcctgtagagaacaggagtcaggagccgctggcaggagacagcatgtcacccaggactctgccggtgcagaatatgaacaatgccatgttcttgcagaaaacgcttagcctgagtttcataggaggtaatcaccagacaactgcagaatgtagaacactgagcaggacaactgacctgtctccttcacatagtccttatcaccacaaatcacacaacaaaaaggagaagagatattttgggttcaaaaaaagtaaaaagataatgtagctgcatttctttagttattttgaaccccaaatatttcctcatctttttgttgttgtcatggatggtggtgacatggacttgtttatagaggacaggtcagctgtctggctcaatgatctacattctgaagttgtctgaaaatgtcttcatgattaaattcagcctaaacgttttgccgggaacactgcagagacaatgctgtgagtttccaacctcagcccatctgcgggcagagaaggtctagtttgtccatcaccattatgatatcaggactggttacttggttaaggaggggtctaggagatctgtcccttttagagacaccttacttataatgaagtacttgggaaagcggttttcaagagtataaatatcctgtattctaatgatcatcctctaaacattttatcatttattaatcctccctgcctgtgtctattattatattcatatctctacactgcaaattttgggtctcaatttttactgtgcctttgtttttactagtgtctgctgttgcaaaaagaagaagacattctctgcctgagttttaatttttgtccaaagttattttaatctatacaattaaaaacttttgcctaccaaaaaaaaaa

SEQ ID NO: 123 - DNA, 5054 bp, Homo sapiens
ggagttgggaggctcccggcgcggggtcccgggctcgtgtccccgcctttgtgtctggagctcgggcgcgggaggcgctggggacggcgcccgggcggagcggctgagcgggctgcagccggggtcccgccacctctccctggtccaccgccggcagcccactgtctgcggagagcagatctggggacaagaggaaggagaggaaggtgttgaaaagtctcctctagagctttggaaggctgaatgcactaaacatgaagagcttgaaagcgaagttcaggaagagtgacaccaatgagtggaacaagaatgatgaccggctactgcaggccgtggagaatggagatgcggagaaggtggcctcactgctcggcaagaagggggccagtgccaccaaacacgacagtgagggcaagaccgctttccatcttgctgctgcaaaaggacacgtggaatgcctcagggtcatgattacacatggtgtggatgtgacagcccaagatactaccggacacagcgccttacatctcgcagccaagaacagccaccatgaatgcatcaggaagctgcttcagtctaaatgcccagccgaaagtgttgacagctctgggaaaacagctttacattatgcagcggctcagggctgccttcaagctgtgcagattctctgcgaacacaagagccccataaacctcaaagatttggatgggaatataccgctgctgcttgctgtacaaaatggtcacagtgagatctgtcactttctcctggatcatggagcagatgtcaattccaggaacaaaagtggaagaactgctctcatgctggcctgtgagattggcagctctaacgctgtggaagccttaattaaaaagggtgcagacctaaaccttgtagattctcttggatacaatgccttacattattccaaactctcagaaaatgcaggaattcaaagccttctattatcaaaaatctctcaggatgctgatttaaagaccccaacaaaaccaaagcagcatgaccaagtctctaaaataagctcagaaagaagtggaactccaaaaaaacgcaaagctccaccacctcctatcagtcctacccagttgagtgatgtctcttccccaagatcaataacttcgactccactatcgggaaaggaatcggtattttttgctgaaccacccttcaaggctgagatcagttctatacgagaaaacaaagacagactaagtgacagtactacaggtgctgatagcttattggatataagttctgaagctgaccaacaagatcttctctctctattgcaagcaaaagttgcttcccttaccttacacaataaggagttacaagataaattacaggccaaatcacccaaggaggcggaagcagacctaagctttgactcataccattccacccaaactgacttgggcccatccctgggaaaacctggtgaaacctctcccccagactccaaatcatctccatctgtcttaatacattctttaggtaaatccactactgacaatgatgtcagaattcagcaactgcaagagattttgcaagatctacagaagagattagagagctctgaagcagagagaaaacagctacaggtcgaactccaatcccgaagggcagaactggtatgcttaaacaacactgagatttcagagaacagctctgacctcagccagaaacttaaagaaactcagagcaaatacgaggaggctatgaaagaagtccttagtgtgcagaagcagatgaaactcggtcttgtctcacctgaaagcatggataattattcacatttccacgagctgagggtcacggaagaggaaataaatgtgctaaagcaggatctgcagaatgcattagaagaaagtgaaagaaataaagagaaagtgagagagttagaggaaaaactggtagagagggagaaaggtacagtgattaagccacctgtggaagagtacgaggaaatgaaaagttcatattgctctgttattgagaatatgaataaggagaaagcatttttgtttgagaaataccaagaagcccaagaagaaatcatgaaattaaaagacacactaaaaagtcagatgacacaggaagccagtgatgaagctgaggacatgaaagaagccatgaataggatgatagatgaactcaataaacaggtgagcgagctgtcacagctgtacaaagaagcccaggctgagctggaggattacaggaagaggaaatctctagaggatgtcacagctgaatatatccataaagcagagcatgagaaactgatgcaattgacaaacgtgtccagggctaaagcagaagatgcactgtctgaaatgaagtctcagtattcaaaagtgttgaatgagttgacccagctcaaacaactggtggatgcacaaaaagagaactctgtctctatcacagaacatttgcaagtgataaccacgctgcggactgcagcaaaagagatggaagaaaaaataagcaatcttaaggaacaccttgcaagcaaggaagtggaagtagcaaagctggagaaacaactcttagaagagaaagctgctatgactgatgcaatggtacctcggtcttcctatgaaaaactccagtcatccttagagagtgaagtgagtgtgttggcatcgaaattaaaggaatctgtgaaagagaaagagaaggtccattcagaggttgtccagattagaagtgaggtctcacaggtgaaaagagaaaaggaaaatattcagactctcttgaaatccaaagagcaagaagtaaatgaacttctgcaaaaattccagcaagctcaggaagaacttgcagaaatgaaaagatacgctgagagctcttcaaaactggaggaagataaagataaaaagataaatgagatgtcgaaggaagtcaccaaattgaaggaggccttgaacagcctctcccagctctcctactcaacaagctcatccaaaaggcagagtcagcagctggaggcgctgcagcagcaagtcaaacagctccagaaccagctggcggaatgcaagaaacaacaccaggaggtcatatcagtttacagaatgcatcttctgtatgctgtgcagggccagatggatgaagatgtccagaaagtactgaagcaaatccttaccatgtgtaaaaaccagtctcaaaagaagtaaagtggattccttggcaggacactgccccttgtcatctgtctttgtgttagatccagagttgtcggcagccgctgccattgttctcattcgtggtatgcactgtggcctagcgtagcttcttccctttccaaaggtttctgaggacttctcccaggagaagactgcccgcctcagaactgcttagagacttcaaaccagcagaggtgaaagtccctgtcatcccttcagattccagagctgggatcagccatgcccagaggtctggtcctgatgctggcaggggggccccctcctccatccctgactggctgagtggctttatcaccaccgagtgatgtgctgaggcctcctgcagtgaatgctccttccattcctgtactcgggcagtgccattcagcacaggagagctctttttgcctttggctttcaattccaaaacatgatttaatttctaactaaattagtatggcactagttatgaagtatctgcttaaaacccttcatcatgatatcctgtggatttaaaaactctaattccatgttttcttcccatctgccttatatatctcatcaccctgcttatcaatattcagtttgatgagcactattaactaaaatatgaaacttaaaaacaaaagcaagttgtccttaaaagttctttttttaagtaaattgttgacatactgcaaattttctatgcaaacttgcctcctgctgttatctgtgaagctcaggaaatccaaacatttgtgtttcaacaagggacagtaaactgtgtgtttacagccaaaagaaatgcctcatagttcttaacctcaacttttgtagaagtatttttttctctgtaatatttttattggctcataaagatgttttcatatctgaactcctaaataagtgaaattacagtagattatattaacaaaatactttttaggtagccatgcttgagactttttaaaaatataactttttccttaaagttttcagctatagcaaaaggtagttatgtatgccagacctaatatgagctgccaccaacacccctagaactttcagccatggtgtcttcagaattgtagcgcatttctgaatctagcaaatcctccttttacccgttgaatgttttgaatgccctgactctaccagcgcccataaatgatctctagaaggactgttagtaccaatctgtttttcaactttgaagctaaaaaccctgatatggtaatattatggtgcatagcagaggtctcggaaaaaaaatatttctgttcactttactttcaggttaaaaatgtttctaacacgcttgcaacttcccttatggcattaatcttgttgagggagagagacagaatcctggactctccaaagtatttaactgaaagtagggcctgctctgacagggcccatgtcccacaaggctgcttggcctcagtgggtgcttggctgtgctggatgatatgttgatctgtattggataaggaccaatgacagcaaagcaaaaatgggctttaaagcttggtgttacttttcttaagttgtttaattatagttaagcaatttcaaaaatgctccaaagaaatgtgaaaggaccttttgtcacagcacttcagaaaatacacaacagccccttctgcccccgcacagaaatgctgcagagtatataaaacttgagacatttttgtaggatgcctgacgaggtgtagccttttatcttgtttccggatgcatatttattacgagtactctggttaaatattgaaaagttatatgctgtagtttttagtattttgtctttgtaatttacagaagttattggagaaaataaacttgtttcattttgcaaaaaaaaaa

SEQ ID NO: 124 - DNA, 2661 bp, Homo sapiens
agagcagtaagcttgtgataaaggccaattccaggtagctcttgaaggtgatagccatctactttccagtggctgccaaccacagggagtgccagttaacactggaaggattaaggcaaggtcccttctcttgagactcccctctgagatctgaaaaatgaagtggcttaggaacatcagcagtgaagaactgccaagagttggtgaaggttgtctcttccgagggccttctgaagacagggctcttgaacagacaagtggaagggctgtaccagggataaaggaaagaagtgcctgtccagcagggagcttgaatttaagttccatgtatgaagtcattggctctatctgcatttttctgtcattctcttcatttgttttaaggtggaaaattttcttacagttgatgcaaagtatcaactactttaccctaccttctccccttttagatgggttcttcctgagttttggagtcttgtatgattatcagtattcccctgtcaaaatcaaatctattcaggtttcttcactgttgagaacacctaaatgtttttatttttgagaagtggggacagagtctcactatgtcacccaggctggagtgcaatggcatgatctcagctcactgcaaccttcgcctcctgggttcaagcgattctcctgcctccgcctcctgagtagctgggattataggcacgcaccaccacgcccagctaattttttgtatttttagtagagacagagtttcaccatgttggccaggctggtcttgaactcctgaccttgtgatccacccacctcggcctcccagagtgctgggattacaggcatgagccaccacgcttggctaagaacacctaaatttttatgtttcttggctcaaaaaccagttccatttctaatgttgtcctcacaagaaggctaattggtggtgagacagcaggggaggaggaagagctgtggtttgtaacttgttcaactcaggcaataagcgattttagctttatttaaagtcttctgtccagctttaagcactttgtaagacatggctgaaagtagcttttctatcagaattgcagatagtcatgttgggctaacagtcaattggatatattcctttacctcacatgaccccagcaactgtggtggtatctagaggtgaaacaggcaagtgaaatggacacctctgctgtgaatgttttagagaaggaaattcaaaaaatgttgtaactgaaagcactgttgaatatgggtatcggctttctttttcactttgactcttaacattatcagtcaacttccacattaatgaaagttgaccatagttatttccaaataaaaagaaaccaactcttaccaggtcttggactgtgatgtcatattattcagttttatgcttgttcctgagcagaactcataagagtgacatagtcagctgctgacggcacctcagccacgccactcttactcagttcagtgggtgtgcttgcgtggtaggatgtggtgcagccctctctacgctcttctatttttggtatatttcctatctaaccttcaaatagcttccaattctttttttcttggactggcttcattctgaatttgtgctaaaataatctttcataaagagacctcagtttatagcgtaacagactacacaatgcactgatgttttcataatgtttaagggacccactgcaagaaggttgctgcctccttttaattgtattcatttagattttgattttccatgttaagaaggtgaggtccatgttggtgcccttcagagtagagaaccatgtaaacattaggaatgaacagaggccttaggaatgaatagagagtttgccttatacaatttcctgttacaaagctctccctctcatgcaaagtagggaacaccttttgagcatctttgaatttgacaaatggtgctgttgcaaacactttttttttgagatgaagtctcgcggttgtcacccgggctggagtgcagtggcgtgatctcggctcactgcaacttccacctcctgggttccagcagttctcctgcctcagcctcccaagtagctgagattacaggcgcctgccaccccacctggctgatttttgtaattttagtagagacggggtttcaccatgttggccaggctgattaactcctgacctcaggtgatccacctttctcggcctcccaaagtgctgggattacgggtgtgagccaccgtgcccggcctgcaaacacattttaattgacaacactagggctgttgtacaaaatagtaatgatagccatggaagttttaccttattctgtgagaagtgttcttaaacttattaagtgtctaaactaaggtttagtgcttttttaaaggaaagttgtcccaggattcatcctaaagaaagcaaaagttaattcaactgatccaccaatggaattagatgggtagagttgggttcttgagttttaccaccacttagttcccactgaattttgtaacttcctgtgtttgcatcctctgttcctattctgcccttgctctgtgtcatctcagtcatttgacttagaaagtgcccttcaaaaggaccctgttcactgctgcacttttcaatgaattaaaatttatttctgttctagtgaacaacacacaacaacaaagg

SEQ ID NO: 125 - DNA, 4516 bp, Homo sapiens
aagcggctcgggctgcggctggctcagagtgccgcggggggcgtggggcggtgctgaggagctgaagccgtggccagctcgactccggacagtccagcgagcagcacggcgggaaccggcagccggagcagtcccggagcagaagcagcagcagcagcagcagccctcgccgttcgcggagcgcagccgagccggccatggcgttgtcgatgccgctgaatgggctgaaggaggaggacaaagagcccctcatcgagctcttcgtcaaggctggcagtgatggtgaaagcataggaaactgccccttttcccagaggctcttcatgattctttggctcaaaggagttgtatttagtgtgacgactgttgacctgaaaaggaagccagcagacctgcagaacttggctcccgggacccacccaccatttataactttcaacagtgaagtcaaaacggatgtaaataagattgaggaatttcttgaagaggtcttatgccctcccaagtacttaaagctttcaccaaaacacccagaatcaaatactgctggaatggacatctttgccaaattctctgcatatatcaagaattcaaggccagaggctaatgaagcactggagaggggtctcctgaaaaccctgcagaaactggatgaatatctgaattctcctctccctgatgaaattgatgaaaatagtatggaggacataaagttttctacacgtaaatttctggatggcaatgaaatgacattagctgattgcaacctgctgcccaaactgcatattgtcaaggtggtggccaaaaaatatcgcaactttgatattccaaaagaaatgactggcatctggagatacctaactaatgcatacagtagggacgagttcaccaatacctgtcccagtgataaggaggttgaaatagcatatagtgatgtagccaaaagactcaccaagtaaaatcgcgtttgtaaaagagatgtcttcatgtcttcccctaagaatacgcttttcctaacaggctactccttcctgtagagcagaaattgtattttgcacgaacatgcagttattgaagattaggatcaaggatagacaaggtatagtagttatcttaaaatatacactcctaagcagtattattttaaaatcctttaccctggctacctcccctacccgggttcccctctctttaatttggagacactccaccacaaacttttcactttagaggtagcttgccatctctcaggagccctcaccattgtgtccattcactgtgtatagatggcagaacttttgaggtgcaatgtttaattgttaaaaatagtagccacgactttatcaggcagccccaaactggtgcataatgcatggtacaagaaatatttatgtattttttggaattttgtaatatttagtaggagtatatgaaaggattgctactgtatcagaaatattgtttcaatttagtctatcctggatatgtactaacgaatattaccaccagagaagagagctttctacaaaagtcactacagattttgctatattgctttgtagatagatttttacttttgcctaaaagcatttatccttcataccaattgtaacatctgacaccatgtagaagctaaaagtttagagggagtgagcgttttctcaagaccttcctcaagcattttatctttagaagagaaactgatgggcacctgatactctgtctaaatacgtttgttatatgtgttttgccctgtgccattcatttggaactttattgcattctttattttaaaaagcttgtttttacgtaatcatagagcttgctatttgtacatctgttgagcaacactacataactgatttttagttgacttagctatagcagtacaatgattagtaatgtaaaaattaacacagaaattaacctaaggaatgaagggtgggtttgtcaaaatatcaagtaaatttttgtttctaaagtacatttaatgtagatgacctaaagaatgcgttatccatcctatataaaagaaagataaaacacaggtcaccaattttctcatttcaccccatttaccttgtatagaggattgttcattcctttgggactaagttatagttatggtgagtgtgtatttactgtagttttgcctgatctcactcattgcacttcctggagttaaattttccaacagccatgttgaggaatagcactctgcatgtttttgttttgtttttcggggttttttttaattgaagccctaaaccaggaattatttgtgttctaacaggaggatgaacttgctgaaaataaaactttgctatgtatttactcttttttaaaagacaaaagcaaaaccagactttctacgtactactccaaagactgtgattgtgactataatacatttttggtaatttttttatacctaatttgtataggaagtgctatttctcataggctgtttcttgaaattttaagtttattgctttaaaatggcagtgtttctcccactttgatatgctaacatttagtaagcactggctttatgaaagcggctttttataagtatactgcattttttgagcctatcattaattagcttagtatgaaagataagaaaatctccatgttgtatccatttggctcaggaagattctttgccttacctttcttagaactctttattgcttatcaaaagtttgagtacccgcttggtttttttttggtaattaaatattgtatgatttatctggttcaaggaagatgcactattcagttatctattgagaaattattttgcagtggttttagtgggtgaaaatgtcccatctgcaccagtacacaggcaggcattatcattcttcacctactttttaaatagtggcaacttgggattctttctggtgattctgaaccttgcctcatagcttaaagtataaaaaaagattcaagagcagtgaggtttgttctttccagtgaatggtggactgagtggtgcgaggtggagggctaacaagaggaaagaactacattcttcagaatacagtgatgaaaattcattttgaaactcaaatattttcattttggatattctcctgtttttattaaaccagtgattacacctggccatccctctaaatgttctaggaaggcatgtctattgtgattttgatgaagacagaattatttttctctgtagaaacacagataccactttatcagggaagttagtcaaatgaaatggaaattggtaaatggacaaaagctagctagtaaaaaggacgacccagcaacatgctttaaccccattgtatgtttgtggaaagagcatagtttaacatcttgagaaatttgggacataaagttttcatggtagacagttcatgcagtatatgaattgacataatggaaataatctgattttatttttacaactaacatccattccccttcatttaaacaccttttgtgttttacttcagtgaggagattggagtctgaatggatctgttttccaagagattctgagaaatttttgtattcagcagttggaaagctctctattctagttgataaaacttcccttttttgatgtagatgcagatattctatacagttctgttgtcttttactaggactgtaaacttttgtgataaaattcaaataagattttatttcttggtaattttggctttcacaatttatctttaaatccttgagcaatctgtatacaattaagagatttctgacatttattcttacactaaatggatcaactctaggatttaggcatgttaacttctgttgtgttttgaatctctccagagttgcatgtagatagcatttatttctgtgcccttaaacccatttagaaaataactacaaagtaaaaatgtagaggaaatagaaatgtattttttcatgaacattttgatacaaatttcatcatttaatgattcaccaatttcttgcattaatttgaatttaagcatttaattcaaagagaggggagcatccattattgatacatgtgggcttttaaaaactccatcctttataaatagtcaaggtttgggccacacaaagtatatttttatcatggaaaaatttcaactcctcaagccgtaatgttgaacagaattggagtattttctttataatttcttgaacaggcaaatgaaagcttattatagaatgcatgtattttcttttatctttggaacatcagcaccagtatattgctggcagctattgtattaaaaaataaagtatattttcactatcataaaggattcttttttcccccctcatgaaaataaacaacaacttggggtacaagtgcaaaaagagagaaaagggaagaacacacacttgccggggcccatgacccccgaaaaaccgttctgaaaacaacacactgtgagcaccaccgggaccccaatgcgcacagacaacggggccacacgcgggtcccagaggaaaaccgcgggagaaaacaaaggcgcgggaa

SEQ ID NO: 126 - DNA, 2368 bp, Homo sapiens
ttttttttttttcaccgggtgaaccaaagactttatttttcaaaagcaggtaacaccaaagtactatgtggtatccatattcgttgcaaaaatgataattactggaattttccaaacatcaaatgaagggggatcaatggttaccactatcgttttcaaccaatatacagatgttcgctcaaggtctaggttttatttctacatagtagtattcacatgagttccctattctgaagtattatcaaaacgaggacccttgaaggtcgagcccagctttgtcttgacttcaaagatgacacagcagccaacctagaatcctggcttgctgcttgagtcctagaaatcatgtcttctcatgttttacaacaagctgtgtctctgaaaactaaaatcagactttagattcctctgaaacagttctggttcccaagcatccgcaccatggtacccagacatgctcaaaatgtgctttcccttatctttcaaaacccaccaccaggaaaccaaaacggaccccactctgagagttccatgatgaaggtgtttaagaatcacattaaccccaagtaaaggcagtagatgaaattatccatttctttttctttttttttttttaagtgagactacattggcaaatgggaaaatgacaccaatcatttgattacagaaaatggttttataaatcctcctcttgaaattatgttcaggcccagcatggtagcttatgcctgcaatcccagcacttcgggaggccaaggcagaaggatcgcttgagcccaggagttcgacaccagcctgggcaacatagtaagaccccatctctgtttttttttaaaaaaaagaaattctgttcaaaagtatttcagaccaaaaggaggtcataaaaactgttcatataattactctatgagaaaaaaatccctgtatggaaaggggcactgaagatctggcacagagaaacaaggggagacagggcagtgataagatccagccctatttttctagcatgcatttacgaccttgtggatatgtctgtactgggtgttaatagccccctccttgtatttaaaaaaaaaattaagaaattaaagtgaatctgtgtgctaatgaagtctgcagttacagaatctcaaagccaagcctgtaaagtctgtaaggcaagatctttgtcatcagggacgggaagagacggataagataatggtaggcactaaaggctggttcagccgagctctgggcagaacagcctcaaaaataaggcaactgtggcttctcagtttgagactgccaccagaaaggcccatggaagcaggaaaaaagagccactgatggcagatcacaggaagatattcggatagggcaatgatcacagttagatggcaggactcagggtctcagggaggcaggaaaccgtggaactgacactcaaggggaatgtctttgcaagtcctatgcacgactccaagcagcaatttctggggtttggagatttgttagttttgcgacgtattccccccaaaagaagacatgaaggtgggccccctggagaggtgagaccaccagggcagaacctccaccaggcgtgaagctggatgagaggtggaaaggacttcctgcggcacccggctccctccacgtctggctgagtcctacaaacgcttgtaggtgcccaggagagctctgcagttgggacagtaatggtccacgtcctgcagggcatccacgcagaaggggatgaagcagcagcccgctatgcaccccagcaggcacaggctcccgcaggacagccaggtcagagcaccggcgttataggacagctgactcacgatcatcttgttgcaggaaggacaacacatttggatagggcggtccaaaaaggtgatggggtgctgcacgtagaccgtctgcacggtaattggattgttattggggatgggcgctggctgggtataatacgaaggaggattcatgcccttcccatcaggccccgtcacaagccccgtagttggcccaggcatgggagctggaggtgtggggtaataactgttaacagccactgtctcttcataggatggaggtgcggatggtgctgaggaaggcccagtggccgcctggtaaggtcctggaaccgacattttacccagcaccggcggtggacggtgagcggcgtctgggcccagagctgggtgccatcagcagtaagaggacccctgcgctcgcggggtgcccgccttaccccgcggggaggggtcaggcctaggggccacggcccgcttcgctctctgactttcacctccccagggtctcccaggggcctcgggtgtccttcccggatcttgcgcgaagtcgcgggggcagggagagaaac

SEQ ID NO: 127 - DNA, 2056 bp, Homo sapiens
cggtcaggtccagcacttgggagctgactgtgctggaggtgacaggctttgcggggtccgcctgtgtgcaggagtcgcaaggtcgctgagcaggacccaaaggtggcccgaggcagccgggatgacagctctccccaggaatcctgctgcctgctgagaaacatggtcagcaagtcccgctggaagctcctggccatgttggctctggtcctggtcgtcatggtgtggtattccatctcccgggaagacaggtacatcgagcttttttattttcccatcccagagaagaaggagccgtgcctccagggtgaggcagagagcaaggcctctaagctctttggcaactactcccgggatcagcccatcttcctgcggcttgaggattatttctgggtcaagacgccatctgcttacgagctgccctatgggaccaaggggagtgaggatctgctcctccgggtgctagccatcaccagctcctccatccccaagaacatccagagcctcaggtgccgccgctgtgtggtcgtggggaacgggcaccggctgcggaacagctcactgggagatgccatcaacaagtacgatgtggtcatcagattgaacaatgccccagtggctggctatgagggtgacgtgggctccaagaccaccatgcgtctcttctaccctgaatctgcccacttcgaccccaaagtagaaaacaacccagacacactcctcgtcctggtagctttcaaggcaatggacttccactggattgagaccatcctgagtgataagaagcgggtgcgaaagggtttctggaaacagcctcccctcatctgggatgtcaatcctaaacagattcggattctcaaccccttcttcatggagattgcagctgacaaactgctgagcctgccaatgcaacagccacggaagattaagcagaagcccaccacgggcctgttggccatcacgctggccctccacctctgtgacttggtgcacattgccggctttggctacccagacgcctacaacaagaagcagaccattcactactatgagcagatcacgctcaagtccatggcggggtcaggccataatgtctcccaagaggccctggccattaagcggatgctggagatgggagctatcaagaacctcacgtccttctgacctgggcaagagctgtagcctgtcggttgcctactctgctgtctgggtgacccccatgcgtggctgtgggggtggctggtgccagtatgacccacttggactcaccccctcttggggagggagttctgggcctggccaggtctgagatgaggccatgcccctggctgctcttatggagccgagatccagtcagggtgggggcgctggagccgtgggagcccggccagggcagggggctcgttgctgtggcaccccctctctgccagcaccaagagattatttaatgggctatttaattaaggggtaggaaggtgctgtgggctggtcccacacatccaggaaagaggccagtagagaattctgcccactttttataaaaacttacagcgatggccccaccaaggcctagacacggcactggcctcccaggagggcaggggcattgggaatgggtgggtgccctccagagaggggctgctacctcccagcaggcatgggaagagcactggtgtgggggttccaccgagaaggggacctcatctagaaaagaggttacaaacctaccattaaactatttttcctaaaacggaaaaaaaaaaaaaacgacacgtagcaacaaaactgtgttgggcgaggctgtggccctgaaaaagttttataacacaatcggtgtgggagcacggggcccccagtaggtatggggaacatggggccatacacgtggtccccaagagaaaccgtgggcacgggaacatgaggcgtggggagtttcccccagtaagaaaacggcccggggcggacaccgaggtgttcggggaaacaccccaaagggctccagaggggccaagagcagaccaacacagggggatccaaggagcccagataattagcc

SEQ ID NO: 128 - DNA, 1267 bp, Homo sapiens
ttttttttttttcctagtgccaggtttattccctcacatgggtggttcacatacacagcacagaggcacgggcaccatgggagagggcagcactcctgccttctgaggggatcttggcctcacggtgtaagaagggagaggatggtttctcttctgccctcactagggcctagggaacccaggagcaaatcccaccacgccttccatctctcagccaaggagaagccaccttggtgacgtttagttccaaccattatagtaagtggagaagggattggcctggtcccaaccattacagggtgaagatataaacagtaaaggaagatacagtttggatgaggccacaggaaggagcagatgacaccatcagaagcatatgcagggaaagggcagttactgggcttctgggctgcttagtccctggcttggcaggaagggtagggaagatggatggggctcattgtttggcattgatgatgtccacgaattcgggcttgagggaagcaccacccacaaggaagccatccacatcaggctggctggccagctccttgcaggttgccccagtcacagagcctccataaatgatacgggtgctctgagccaccgcatcagagacgttggacttcagccatcctcggagcttctcgtgtacttcctgggcctgttggggtgttgcagtcttgccagtaccaatggcccacacaggctcataggccaggacgaccttgctccagtccttcacgttatctgcgatgacctttgtctgctcgaaaacaaccttctcagtgatgccaggcttccctttcatctagcttctccccaatgcaggcgattactccgagtccctctgccagagcatgggccactttctgcccaatcagctcatctgaktscccaaagacatgccttctctctgattgcccagggacaaccaagttggtccgcagtcttggatctgccaggctgattctcgcccagtaaaaaagccccgaattagtcccttgggttgccagtcagtggccacccaagaacctttggggaattagcccattgccgggaagaaaccaatatggccgatgggggggcacaacacccctcgtgtatcgtgctggaccttgcgcccgatcaaacgagcgggtgaaccccaaataagaagatcaaggcaatatataataatctcacgagcagaatacgtgggagcgggtgctgtcaacctatactaatacaacgtcctatgatacatatatgttcgctgcaagcatta

SEQ ID NO: 129 - DNA, 2768 bp, Homo sapiens
ggaaggcaaagatcgcgaagcttggcgctccagaacgctcagggggcaggtgacacagtcgtgggttccccggcgggcgctggcttgacagtttcctccccgcccactggcaggggagcgccccgccgggctgcacgcgcgcgcgcgcaggggggcataaaagccgcggccgcgcggagacgcggagctcgcccaccgcccgccccagcagtggctgcaccatgcacgtgaacggcaaagtggcgctggtgaccggcgcggctcagggcataggcagagcctttgcagaggcgctgctgcttaagggcgccaaggtagcgctggtggattggaatcttgaagcaggtgtacagtgtaaagctgccctggatgagcagtttgaacctcagaagactctgttcatccagtgcgatgtggctgaccagcaacaactgagagacacttttagaaaagttgtagaccactttggaagactggacattttggtcaataatgctggagtgaataatgagaaaaactgggaaaaaactctgcaaattaatttggtttctgttatcagtggaacctatcttggtttggattacatgagtaagcaaaatggaggtgaaggcggcatcattatcaatatgtcatctttagcaggactcatgcccgttgcacagcagccggtttattgtgcttcaaagcatggcatagttggattcacacgctcagcagcgttggctgctaatcttatgaacagtggtgtgagactgaatgccatttgtccaggctttgttaacacagccatccttgaatcaatttgaaaaagaagaaaacatggggacaatatatacgaatatccagggatcatatcaagggatatgattaaatactatgggaattttggacccaaccattgattgccaaatggattgataacactcattgaagatgatgcctttaaatggtgctattatgaagatcacaacttctaagggaattcattttcaagactatgatacaactccatttcaagcaaaaacccaatgaacagcttatgtgttagccatagctgaaaataagcacaaatagcttatattcagatcctatcttcatttgaatatagcttttaaatgaaatgttacagtttgaagttttccttcatgcacttggtgataaacgttttctaaatttttagttaagtatatggataaaaagttatgaactattaaaaatgtgatgtggaccaaaggctaggttgtaatcttgatagtctaaaaaatgatcaaaacaaatgattttcaaggaatattcaatattctgcctttcagaaagtgtatttatatctgtgcttcataaatattaatgttcttcagaacatcattttaaaggagatacttgaattgttatttaaatcaaaccagatgtaaaacactcacatacaagttcatactttaaaagaggaaagctacttaacaatgacaaatatttcacaataataatttttacttatataccatctttcaactgaacatttcagttcttccaagagcttcttagagtagtatattttgggggcagtcaaggaataaactacagtgtaaacatatcccagatgaaaactgctgtatggaaaaatgacagaaagtaactgattgacactgttgattcacagttcagcctcctatctgggaaagacatttctttcctctgctcactttaagaacttttaccgactccaaaaatctcaggaattaaacttttaacagttacagcaataaagaatagttagtactccaaaaatattatatttaagatgctcaacaagaaaaaaatgcaaatgtaatatttttttcaaattacttctttattgacttgtccaaatttcaaaagtgcctacccttcaataaaacttttttattctgatctccataaattacttagtcttctatgtatagctatcaaggaaataaaaccaattttgccacagccacaactgtaaatgtttttgtacccatgctgaaactcataacaacacagacataaaaatagctgtgaggttttgctttttttgttgtcagctatcttaagaatcattaaatacacctgctttgggtaaaactctttgcaagcagtaattaacactagtaacagtgaaagcacaagatttccaaatcagtcgttttctcaaaaaaatatcgtataagtgactcatcctgtctgctaactccagacctcccagcttgaagccaaatctttccatgtgagattgatatggatttcctagaagtactggaatgttgtcatatcttgccctattttaattctgctatagaaaacaattgccttcacttttaaggagtaatttgaatattaataactctggtctagattttcatataatgtattaaagacaaagtagtgaacatcaatgaacatctgatagagataaactgtaatcaggcataagcttgtttgtatgttctggcagtgactaatcagtaaatgatgtcggtttgcccagtatcacttatcttctgtatttttcctctgtcgtgtaaatagtataaccttttcatttatggacaattttttggactagtagccttcaatatacattctgctttgaattaattttttcaaatcaataaattatgtagacatttaaaatcaaatatcaagtagaattgaaaaatgtgagttacataagttaaaaacttactttaaatcttaccttctataggtagctctaaataaattcatatggttatatggcaaaaaaaaaa

SEQ ID NO: 130 - DNA, 1316 bp, Homo sapiens
  misc_feature (1)...(1316): n = a,t,c or g
tggacataggcctattaggtgcacatagaacaagtntgtacanaaagcaggctgggtacggtccgggaattccggggatatcgtcgacccacgcgtccgcccacgcgtccgcccacgcgtccgcccacgcgtccgcttttgtctttccgtggagctgtcgccatgaaggtcgagctgtgcagttttagcgggtacaagatctaccccggacacgggaggcgctacgccaggaccgacgggaaggttttccagtttcttaatgcgaaatgcgagtcggctttcctttccaagaggaatcctcggcagataaactggactgtcctctacagaaggaagcacaaaaagggacagtcggaagaaattcaaaagaaaagaacccgccgagcagtcaaattccagagggccattactggtgcatctcttgctgatataatggccaagaggaatcagaaacctgaagttagaaaggctcaacgagaacaagctatcagggctgctaaggaagcaaaaaaggctaagcaagcatctaaaaagactgcaatggctgctgctaaggcacctacaaaggcagcacctaagcaaaagattgtgaagcctgtgaaagtttcagctccccgagttggtggaaaacgctaaactggcagattagatttttaaataaagattggattattcaacaaacacaacaaaacacacggaaaacaaaaaaacttcggaggggcatctaatcgccgcggctggcgcggacacacacagaggtgcacttggaaatgcggcaccattggcgcataaggcgttgttcacctgagacccccagttttctttggcacaacctgtgggaacaatctgcggcggaatcacccccaaaaaaggggcagccccgcaacaataaaacattcgcgcatagaggcccggggttacacccggccatttaaggaaactggcgggaaaaaaaccgcacgcaccacgacacacgagacaagcagagacacgaggacgcagaccaacacagcgcggggttctttcaccaatcttgatgtattaaacaaaataaaagtatagtggataacacgtgacaaagatgtagttattaaaacagaacttgatgacagcaggataagagaaagagctaaaccttatataatagagtaaagaaaatacagagtataacgaaagataatataagattttacagatgcacgttcactagctagaataatgcagtcagtttggactgacagatatacctacattacactcatagcatgcgaactaagaagtgatagataataagagatagaaatggaaagaatgtg

SEQ ID NO: 131 - DNA, 2122 bp, Homo sapiens
tgggacactgctcagggaagagcctgctacggtggactgtgagactcagtgcactgtcctcctcccagcgaccccacgctggaccccctgccggaccctccacccttcggcccccaagcttcccaggggcttcctttggactggactgtccctgctcatccattctcctgccacccccagacctcctcagctccaggttgccacctcctctcgccagagtgatgaggtcccggcttctgctctccgtggcccatctgcccacaattcgggagaccacggaggagatgctgcttgggggtcctggacaggagcccccaccctctcctagcctggatgactacgtgaggtctatatctcgactggcacagcccacctctgtgctggacaaggccacggcccagggccaacccaggccaccccacaggccagcccaggcctgccggaagggccgccctgctgtgtccctgcgagacatcaccgcacgtttcagtggccagcagcccacactgcccatggctgatactgtggaccccctggactggctttttggggagtcccaggaaaagcagccaagccagagggacctgccaaggaggactggcccctctgctggcctctggggtccacatagacagatggacagcagcaagcccatgggggcccccagagggaggctctgtgaagccaggatgcctgggcattccctggcaagaccaccgcaggatgggcagcagagctctgacctaagaagctggacttttgggcagtctgcccaagccatggcctcccgccaccgcccccgccccagcagtgtcctcagaacactctactcgcacctcccggtgatccatgaactctgacccctccccagtaaaggcttctgtagagagcatgctgggtctgcatctcctctcgtctcctccatggtggtcactgcccctggcaggtctctgaaagggaaatgcttttctgcagaggcccctgcttgggcagttcacagtgagaccgaccccctctgaatatgataacagcctgtttcacatgaggagatgttaccaatcccgttcgctctgacccttgctggctgatcaccttgagcaacttacttaacatctgtgttcctcagtttctcatgggtaatatagggataattactggcacctgcctcccaggccattctgacgtgtaaccgcatataggagcccactggctgagtagctaccatcatcgctggtggggaaactggtggtaggggtgtgagggtagtgggggtgtcagccccccaggtgtttcagaacaaggcctcgggcactcccaagtctgcctcttggctcccaccctcaaagcccatgttctgtgaggcccaagagaacacatggagtcttagcaaatgcactaatgtattccgggggactgtcacctggcaccactggggcactctgctggctacaactcatacgtcctgtggtggcattgggagagttcccccatgatgagggccaagatagaatctgtaccactcagtgctaccatccccacccctacaccacttccacacaggggcctcatggcatggtcagggtcccagctgtgggtgagagcagggcactgtccagctgtccactggggaagtcaagatgtcctaaggcccaggccagggcatctggagtctgaaggaccctagttcctagaggcatctggcagcaagaaggtgaggcatcagggaacgggaatcaggctgggactgatcagaggtgaagggacagagagaggagaggaggaagattgagctgggggcaacagccaagctcacctgggcaggtctctgccacctccttgctctgtgagctgtcagtctaggttattctctttttttgtggctatttttaattgctttggatttgttaaatgttttctgtcttctgttaagtgtgttttctctggagatagaatgtaaaccatattaaaaggaaaaagtttcagacaagcaattacccagtttccttatctataaaatggggacatcagcaatgttcttcacaccctgcaagggctgggaattgcgcatgtgaacttggagctgcatttatgagcactgtagacaaatgtttgtatctgtcac

SEQ ID NO: 132 - DNA, 1734 bp, Homo sapiens
cgtgacaccttaaagaaaattttataatgagtctagtaagtttcgggtctagggtgcattttaatgtagctaacaaggtgccagttagcgtatttttgagcttggaactgccctaataaaataagttctctaaaaacagtaatcaggcatattagctttaatgtaggtggcgatgagtttttaggccaaggaaggaataatgttttatgtaccaaagccttttgtccccattttccatcatacgaatagtattccctgttgctaagccgatgatacattacccttttcccataggtgtgagtggcggtctgaatggagaagttcaatagttctgattgcagatcctatgcagaagagataataaggaaaataatctttgtctcctggattaagctgaggctggcaaagagtgaaatgtcccaagccctctaacaacaaacaacatactttgtgttgtcctggatgctggtctggttgccaaatatgtggaactggccccatatgcgtgtactgttgtccatttcatgagagtaggcttgaggacaccatgggcaaggatctgatggttgccagcctaagcgttttagacttttgacccagagattttttgttttgggtgtggaaaaaattttagaggatagggtctcaagatataatcctttttataggcggcaggtcttaagagatgagggtccagaggaacggatgaagcctgcttggaagcatgctgggatggccatttggaaggagtgttgcatggaagcatggccttggctgggcgctgccaggagcttaagggttgtaggttgtttgtctgatcggctctcggcctaatcttgtggcttccaggaggaagaggagagatcaagctggctgtctgatgggcatggctttattctggaatggtgaacccaatggagagggtcctgcagatggacggcagttggtgtgctataaatgaccgggtagggtctggtccattgaggctgtagagtttgaggggtcagacttttgacaaggactgatcgtccagctagggtgtcttcatatggctgggaatctggagtaggcaagagaagattagcagtttggcaaatttcctgtctagcctgctagaggactggaagatagttgcccagggggctggtgtctggaacaagattgtggctgagtaagaaggtgcatccatataaaattgaaatgggttgtaggatggagaaatcataagtgccgttttctggccatttggaaccattgtcaagtttatattgcggccaagcagtaattgcagaagaaaataagacgtttgagttttatatcaggtgttagtttaagagaagtttttaagtacacaggctaagggggaagagggaggaatggagggcggaagattgcccaaagtgaaggaggtaagtttaaagagaaaagtagagacacggagaagggcgggggtgagcagccaaagcaggcgtccccgcaaatgacttgccaccatgggaatgtgggtgaatgaccaaggcaggcatccccaaggtgatcagacaccagtggaatgtgggtgaataattaggcaggcgtccccgcagtgattagacaccaagggaagactgtcttcctgagtctgtgaccagcgccagagttttgggtccacggataaaatgtgtctcctttgtctctactagagaagaaaaagactggacagggagattggagggtagcgagagaggctggagt

SEQ ID NO: 133 - DNA, 1968 bp, Homo sapiens
cccacacccaagtgagcggcctgctcactcctcagctgcaggagccagacgtgtggagtcccagcagaggccaacctgtgtctcttcatctccctgggaaaggtgcccccgaggtgaaagagatggcctggtggaaatcctggattgaacaggagggtgtcacagtgaagagcagctcccacttcaacccagaccctgatgcagagaccctctacaaagccatgaaggggatcgggaccaacgagcaggctatcatcgatgtgctcaccaagagaagcaacacgcagcggcagcagatcgccaagtccttcaaggctcagttcggcaaggacctcactgagaccttgaagtctgagctcagtggcaagtttgagaggctcattgtggcccttatgtacccgccatacagatacgaagccaaggagctgcatgacgccatgaagggcttaggaaccaaggagggtgtcatcattgagatcctggcctctcggaccaagaaccagctgcgggagataatgaaggcgtatgaggaagactatgggtccagcctggaggaggacatccaagcagacacaagtggctacctggagaggatcctggtgtgcctcctgcagggcagcagggatgatgtgagcagctttgtggacccaggactggccctccaagacgcacaggatctgtatgcggcaggcgagaagattcgtgggactgatgagatgaaattcatcaccatcctgtgcacgcgcagtgccactcacctgctgagagtgtttgaagagtatgagaaaattgccaacaagagcattgaggacagcatcaagagtgagacccatggctcactggaggaggccatgctcactgtggtgaaatgcacccaaaacctccacagctactttgcagagagactctactatgccatgaagggagcagggacgcgtgatgggaccctgataaggaaacatcgtttcaaggagcgagattgacttaaatcttatcaaatgtcacttcaagaagatgtacggcaagaccctcagcagcatgatcatggaagacaccagcggcgactacaagaacgccctgctgagcctggtgggcagcgacccctgaggcacagaagaacaagagcaaagaccatgaagccagagtctccaggactcctcactcaacctcggccatggacgcaggttgggtgtgaggggggtcccagcctttcggtcttctatttccctatttccagtgctttccagccgggtttctgacccagagggtggaaccggcctggactcctcttcccaacttcctccaggtcatttcccagtgtgagcacaatgccaaccttagtgtttctccagccagacagatgcctcagcatgaagggcttggggacttgtggatcattccttcctccctgcaggagcttcccaagctggtcacagagtctcctgggcacaggttatacagaccccagccccattcccatctactgaaacagggtctccacaagaggggccagggaatatgggtttttaacaagcgtcttacaaaacacttctctatcatgcagccggagagctggctgggagcccttttgttttagaacacacatccttcagcagctgagaaacgaacacgaatccatcccaaccgagatgccattaacattcatctaaaaatgttaggctctaaatggacgaaaaattctctcgccatcttaataacaaaataaactacaaattcctgacccaaggacactgtgttataagaggcgtgggctcccctggtggctgaccaggtcagctgccctggccttgcacccctctgcatgcagcacagaagggtgtgaccatgccctcagcaccactcttgtccccactgaacggcaactgagactgggtacctggagattctgaagtgcctttgctgtggttttcaaaataataaagatttgtattcaactcaaaaaaaaaa

SEQ ID NO: 134 - DNA, 4073 bp, Homo sapiens
tttttttttttttttacagctgttcctgctgattgctttttaagctaggctcaagtgtggggccacggaatccttcaggtgcccttcaaatcagacattacatttcagctctcagggctagaatgcttccccctcttatcttgggcaggtctttgaagaagccagtttagccttggtaattttgaatttggccatagtatacggaggagagctaggtagctatcaaaacgcttagacaaacgtatggtaaaatgcagcccagcctgaacctccgcaaaacccccaaacctggagcagcaagtgggcaaaggagtgtgtgtttggggcagggtactgagtcccatatgtaatcaagagacctggagggcccaaggaagtcagtgacacccccacaagctacatatcctccaatggattgtggtggtcatctccggctaccgaagccaccttgcttattcccataggcttacaaacattatgatgcttcacacgagttgtgggtgaagtgaaggaattggaaagtcccggtctaaggccctgcaaaactgctgtctggtaaaaacaagtgactatggcaaggccctgaatgtactacgtatagacttaagtcagtatttgtgcctaacagcaaagcatgccacaagaggctcctcaaaagccgggtaattgatgccattgttttcttgacctagttgaagagtcaaagaagagaaggtgatgcagaaacttctttccagtgaagtgacagatccaagcaaggaacacctgcctgtgaggggagcggtaggggagggggtagattcggcagcactcgggtagtggcagggaccacatattgtcggtgttaaccactgttatcactggcccaggtcgagtgaggacgagtcatttccccactaagcacttggggagtggcagggaccacatattgtcagtgttaaccactgttatgactggcccaggtcgggtgacgacgagccatttccgcactattgtcccttcttcctcactgcacccccagccctgcaccctcagctccaaatacacattctcgttcactcaacgtttgttgacacctagcgtgggccctgtgggatggggtaaaagttcggtgttgggaggagccccggtgacagatttttggttttggtggtggcttttgggcaaggacaggtcagttcataaaagatgacgccccaggtctggatcgaattctcctgggagccagaccaaagcaccttcctggactgcaaagtgtggaagccgccgcgggccgggcgcggggaggtgtcatgcgccggaacctgcgcttggggccaagctctggagctgacgcgcaggggcaaggcgccccgcgtcccggactggcggctccgcgcatgctcctcccaccggcgtcgcaggcctcgagaggctccggaagtactgggtgcagcctgatggcgcaggaggtagacacggcacagggcgccgagatgcggcggggcgcgggcgcggctcggggacgcgcttcctggtgctgggccctggcgctgctttggctcgcggtggttccgggctggtcccgggtctcgggcatcccctcccggcgccactggccggtgccctacaagcgctttgacttccgtccaaaacctgatccttattgtcaagctaagtatactttctgtccaactggctcacctatcccagttatggagggtgatgatgacattgaagtttttcgattacaagccccagtatgggaatttaaatatggagacctcctgggacacttgaaaattatgcatgatgccattggattcagaagtacattaactggcaagaactacacaatggaatggtatgaacttttccaacttggcaactgtacatttccccatctccgacctgaaatggatgcccctttctggtgtaatcaaggcgctgcctgcttttttgagggaattgatgatgttcactggaaggaaaatgggacattagttcaagtagcaactatatcaggaaacatgttcaaccaaatggcaaagtgggtgaaacaggacaatgaaacaggaatttattatgagacatggaatgtaaaagccagcccagaaaagggggcagagacatggtttgattcctacgactgttccaaatttgtgttaaggacctttaacaagttggctgaatttggagcagagttcaagaacatagaaaccaactatacaagaatatttctttacagtggagaacctacttatctgggaaatgaaacatctgtttttgggccaacaggaaacaagactcttggtttagccataaaaagattttattaccccttcaaaccacatttgccaactaaagaatttctgttgagtctcttgcaaatttttgatgcagtgattgtgcacaaacagttctatttgttttataattttgaatattggtttttacctatgaaattcccttttattaaaataacatatgaagaaatccctttacctatcagaaacaaaacactctctggtttataaaacaccttaattctactgctcttttttctccaatcaccagcatctgtttttcagggggtgattttacttttgtgaattccttagcctttcttccttggtgcataaagttaaaatgcacatcagcagaattgctgcatattaacatctcaggactcttctcttgtaaagaagctgaaattcgtactatattggccaaagtgagcgagttaggtgatcttggtttcaatttccgagcctttgttaatatggagaattatggttcatatcagttatgtaggacctttggacccagggtcctacagatagatatggtgtgcccagattttaaaaataccttcaaaaataaaaaatacattcagtgacattttcatggtgggagctcttctttctgatatggcagttacactttttcacttaagtgctttagtttagactaactttacaacttctataacttttggaaccaagtttagtatagtctgattacattccattcacctaactttagacattcgtttagacaccataactggagtgattgtgcttctagatgtggcaaatccagtgttaacacatatttctggctgagattttggaactagctagtaactggcttgtgttctttaagcatactaacatcactaaatcttaggatttaggattgctgtaaagatgtaagttgtgtatgtttggcaggtcacattgaatggcagtgataatgattaatcaaagaacaaatgtcatccttgatcttgcctaatgtagtttatgtgccaaactttccagggttttgtagtcacctagattttaagctgatagcatagtgcttcagcggttcttctaaccggggtatgcaggaacatggctgcagacacgtttgggtaaacaggcaccttctgacttcttcattgtttcctgtagttctccctcttcccacaaagctgtcagcgcagtggaagaggttgcacttctccgagagaggacaggtttctgttaagatcaccaagtagctgtgctttaattagagccagacaagctttcaaggtcctttaagtatttgatgatcaactgaacacgtttctattcaaggagaaaacaccattcagtaagaagatggagtagatatcagataaaacaattcacgtttaatatgtaaatgtaccaattatgtgattcagtttcaactttcaagtacttcctgagaggttagtacattattattgagctctcacagaaagcttaatcatagatataattaacctgatccaaatgagtaaagtggaccttagaaaggctaagtgatctttctctggctatccagctagtagtaatgaagtcaggtcttgaaccccggttctgctgactgaattggatgcactatagtacaggcttttagcaccgaagtgtggtcctcagaccagtgcctgccaaccagatgttactggtctgtgaggaaataagtacagatactgacaggaagcttttataaacaatttattggagtgtttttgtttctgttgggtctaattaaaaaaattggagcttgtaaaaaaaaaa

SEQ ID NO: 135 - DNA, 3017 bp, Homo sapiens
atactcctaagctcctcccccggcggcgagccagggagaaaggatggccggcctggcggcgcggttggtcctgctagctggggcagcggcgctggcgagcggctcccagggcgactgcgtactgcagtgcgaagagcagaactgctctgggggcgctctgaatcacttccgctcccgccagccaatctacatgagtctagcaggctggacctgtcgggacgactgtaagtatgagtgtatgtgggtcaccgttgggctctacctccaggaaggtcacaaagtgcctcagttccatggcaagtggcccttctcccggttcctgttctttcaagagccggcatcggccgtggcctcgtttctcaatggcctggccagcctggtgatgctctgccgctaccgcaccttcgtgccagcctcctcccccatgtaccacacctgtgtggccttcgcctgggtgtccctcaatgcatggttctggtccacagttttccacaccagggacactgacctcacagagaaaatggactacttctgtgcctccactgtcatcctacactcaatctacctgtgctgcgtcaggtgagcctgcctgggtggctgcaggggcaaaatcgaaccctgggggcagaaaggggtcacccagccttcccctgggggccttcttcactagtctcccaacacctacgccccccaacccccaacacatcagctgtcctgggtgaggactctggggtaggactgggggccctggctcctgacaaggagctgtagcacttgctgcccagctgtggcctgtttggtggggagaggggtagtgacttcaggggccatgcaccaatgttggggggaggagatgcttcagggaatgctgctctggggatgggccacctgccctctgagcaaccctggacggtggggcaggaccgtggggctgcagcacccagctgtggtcagtgccttccgggctctcctgctgctcatgctgaccgtgcacgtctcctacctgagcctcatccgcttcgactatggctacaacctggtggccagcgtggctattggcctggtcaacgtggtgtggtggctggcctggtgcctgtggaaccagcggcggctgcctcacgtgcgcaagtgcgtggtggtggtcttgctgctgcaggggctgtccctgctcgagctgcttgacttcccaccgctcttctgggtcctggatgcccatgccatctggcacatcagcaccatccctgtccacgtcctctttttcagctttctggaagatgacagcctgtacctgctgaaggaatcagaggacaagttcaagctggactgaagaccttggagcgagtctgccccagtggggatcctgcccccgccctgctggcctcccttctcccctcaacccttgagatgattttctcttttcaacttcttgaacttggacatgaaggatgtgggcccagaatcatgtggccagcccaccccctgttggccctcaccagccttggagtctgttctagggaaggcctcccagcatctgggactcgagagtgggcagcccctctacctcctggagctgaactggggtggaactgagtgtgctcttagctctaccgggaggacagctgcctgtttcctccccatcagcctcctccccacatccccagctgcctggctgggtcctgaagccctctgtctacctgggagaccagggaccacaggccttagggatacagggggtccccttctgttaccaccccccaccctcctccaggacaccactaggtggtgctggatgcttgttctttggccagccaaggttcacggcgattctccccatgggatcttgagggaccaagctgctgggattgggaaggagtttcaccctgaccattgccctagccaggttcccaggaggcctcaccatactccctttcagggccagggctccagcaagcccagggcaaggatcctgtgctgctgtctggttgagagcctgccaccgtgtgtcgggagtgtgggccaggctgagtgcataggtgacagggccgtgagcatgggcctgggtgtgtgtgagctcaggcctaggtgcgcagtgtggagacgggtgttgtcggggaagaggtgtggcttcaaagtgtgtgtgtgcagggggtgggtgtgttagcgtgggttaggggaacgtgtgtgcgcgtgctggtgggcatgtgagatgagtgactgccggtgaatgtgtccacagttgagaggttggagcaggatgagggaatcctgtcaccatcaataatcacttgtggagcgccagctctgcccaaggcgccacctgggcggacagccaggagctctccatggccaggctgcctgtgtgcatgttccctgtctggtgcccctttgcccgcctcctgcaaacctcacagggtccccacacaacagtgccctccagaagcagcccctcggaggcagaggaaggaaaatggggatggctggggctctctccatcctccttttctccttgccttcgcatggctggccttcccctccaaaacctccattcccctgctgccagcccctttgccatagcctgattttggggaggaggaaggggcgatttgagggagaaggggagaaagcttatggctgggtctggtttcttcccttcccagagggtcttactgttccagggtggccccagggcaggcaggggccacactatgcctgcgccctggtaaaggtgacccctgccatttaccagcagccctggcatgttcctgccccacaggaatagaatggagggagctccagaaactttccatcccaaaggcagtctccgtggttgaagcagactggatttttgctctgcccctgaccccttgtccctctttgagggaggggagctatgctaggactccaacctcagggactcgggtggcctgcgctagcttcttttgatactgaaaacttttaaggtgggagggtggcaagggatgtgcttaataaatcaattccaagcctcaaaaaaaaaa

SEQ ID NO: 136 - DNA, 1827 bp, Homo sapiens
gcgtggcgacgcgtggaaattctgcctttcctctttttctatttatctgattattattattattattattattttctttgagacagagtctcactctgttgcccaggctggagtgcaatggcgcaatctcggctcactgcaacctccgcctcccaggttcaagcgattctcctgcctcagcttcccgagtagctgggattacaggtgcccaccaccacgcccagctaatttttgtatttttagcagagacggggtttcgccatgttggccaggctggtttcgaactcctgacctcaggtgatccgcctgcctcagcctcccaaactgctgggattataggcatgagccacctcgccagccctatttatctgattatttaagtaaaactttaataaaccatgacctacattttctatgcaattttaagatactcagagttaatattttaatattgaggttcttgatttttttaatgatcagctttcaaattatatttcagtatatactctgagtctacgtgtatgctacaaaaggtgaaatgaagttagcttatttttcagtgagtttaggctatattaagagttaggtaagttaggtaagggtgaaactgctttggggcccagactgcgctggaatgtactgtttaaattcaaaggtaattgatggccagtgttcagttgctctatttgtaacgtttgcatgttggtctggctgaagtatcaggaaaacacaaaattcatgaaaatagcaccttttataattttatacttttataaagcacttgttaaagaagtatagcaaatttctatgtattttaacatacaagtcgctgcattttaatgttcatttttggtatagctatggtaacttataatagtcatttttatattcataacttgttttctgaaagatatagtcattattaaaataaacattcatgtaaatggagtaaatcataggggaatcaatcgtaataaataccttataaattataaacttgtttagatactagatttctataaccataaattttatactgtaaagtctgtttaaaatagggtttaatgaagttattttaatttttagagactcccctctaaataatttactcctacattgtaaatacattgatgccaacaaaattccaactgctactaacaaaggtttggttggtgataagctaataacagctactttgtgtaggaggtaaatatgtgtactggagggggtaaaaatccatttaggttatggcaaagatgggaatcaaactgtaaaactcatagccccataaaattaatattctttgttaagtgccagagggtttaagagaacttcttgcttagagtttattgataataataatgcttcagaatatcccatttaaatgtacagtgtaaatatgtaaaatattttacttcccaggcaagtttgtggctgtattgccacttagtggctctttgtgactggcagttctgtatatctgaaacaaataagctgtaagcacttttgttaaaactttgtcaaataatccttttatgtacttgttctcagacctgttctctggttatgaaatgtgttaaagacaaggtgcaaatttaaaacaatgcctgtattgaaataaatgacttaaacagaaaaaaaaaaaaaagaagcaaaaaaccagggaaacaaccctgtgctgcggcggactcgggcccttggaaaagggtcttcaaacaaccctccgtttgggcggcgcggggccccacagggtcagtgagaccaggtggcctaagccggtcccaagagaaaacggggaggacaaagcgctgggttttccccgtgtag

SEQ ID NO: 137 - DNA, 4608 bp, Homo sapiens
tttttacaccagacgtgccaacttttccgtgtgggtctcccgagagggcccagcccagctccccctgtaccgccgcttttattcctccttggcccttgtacaaactggaccgaacctggccctggggatctttgcgccccccttttttttttttgattaattgagtgattttagtcaagtgaatattgatacatggctgaaaaagcatgaaaataaaatgaacacgtacgggaattactattaacataagcgataacatcaaaacatctggtaaaatgcagttaaaaaaacaacacaaatgaaatggaatgtaaaacattttcacagtattcaaagcttttgtaagagacttaggatctaaaagaggagtactacaggaagaaactagaggaaacgggaatttcatccatgtcctgtgtatctgctggcaacaggtcagaacggccagtatgttattccctgcaggctgcctagggtgctctcctcaaacagatcacctgagcctcctgcatctatgaagttatgacacagcaaccagttactcagagtctgatgagaaaaacagattttaggtttgggaaatgggattactgtaatttacacatccaaatgcaaactggagctctgattgaattctaccctggggagaacttgatgctaacccacaggtaccaagagccaagtgttacacaggatattttaaaaataaaatgtttttggaatcctcacctcccatgctatcttctaagataactacaaatattcttcaaagatttaactgagttctgccaaggacctcccaggactctatccagaatgattattgtaaagctttacaaatcccaccttggccctagcgataattaggaaatcacaggcaaatcacaggcaaacctcctctctcggagaccatgaccaggccaatcagtctgcacattggttttgttagatactttgtggagaaaaacaaaggctcgtgatagtgcagctctgtgcctacagagagcctcccttttggttctgaaattgctgatgtgacagagacaaagctgctatgggtctaaaaccttcaataaagtaactaatgacactcaaggtcctgggactctgagacagacggtggtaaaacccacagctgcgattcacatttccaatttattttgagctctttctgaagctgttgccttcctacctgagaattcccatttagagagctgcacagcacagtcacctgctcttccgtattctgtggtaactacttatgttccaggtaaacccctccactaaggactctgccgcagagagagggcccggttgcatgaggcactttgtcaaaatgagcagatacgtatgagcactgaactcttgagtgaatcaaccagaactaagacccagatccacgcactcaggaacttgctctgaatttcagtttgacaacagagaagtagaatatttctaattagctaatatatatacacattttttaatcatccaaaattacaggcaaatcacttaaggtccccagcactttacgatgaaaggtcagagagaaccccacaaaaaaggtgttaaaaggacaggatcactaactgtgagaggttaatttatcaggataactctccggtaggtaactaggcgggcatgctgattttcatactggagtcttcaagagttaacagaatctaccatcctttctccgggtcaggctagggccgcagggggccactttacagcctcactgcagcatcctcactgggtataagcattggcccagagggacaatcataaatgtcctcaaagtgttgcagagaattaagaatccggctttgggggaagaaattaatatgcattttttttagaactacttcctgtacattggacaagaagggtaaagttgtctaagtgaactggcttatatacatcgctgattaaacataagggctttgggaagtatctcagggtacttgggaaaaactgcagagatgttttgcttttgaaactctctcgctggatggggacaccccacccatgtcaactttccatctgcagaaatgaaacaaatatatgtaaaaagtgcgggggaacaggcaggctgttctgaatttctttgatccataggcaatcaagttcaaaggaaatgtttctttacaggaaagaaaaaaacggaaagctctgtgagttttgctagggggtgttaggttctagggcaaccacggactcttcaggaaggaaagccacacagctacactaccagggaaatccgcctcccttggcaaatgcctggggagagctgctcctctgggaagcagcctcggacggatcaggagaccttgttctagcacacctttcaaatgctcaatgtagactgttttaaaaccttgaaaaataagtgggtgtttgtcattgttcttttaaaaatgtgaaaaggaaaaaacatgagattagaatcctaagctcttcacccaatttcacaattcaccctgactagcaatttgctggactgttctaaaatttttttcatttgtttcttttttaactatgtgttttgaaaactactgccttctcagcccgaaaatcgccgtctctctcaggctcactgtggtttcctttttctgacacaaaggcaggcacaggctgcccctccacatgtcttggggatcagatcatgccccgggctcataggaaccgaaactttggggcatctgagactggctgattcagattcaaagacaatcacacggaaagactgtgggcagagaaggcaatgcctctcccctggtccctttgctgtcactattagataatggacttgcacttttcctccctgcacttatcactttctgggcttgaccttaattgtaagtgtggtatgagtctgtttccatttaaagcagacagaaagaaactactctggacctgaaaacaacgtgacttgccaatcattagaattttctagttgaaaggcatagatcagccaatagatccacaccaacaagttgcaaaatgtagtttttgctgctggctctcactttccgcccaatccccctttttgtgttttagtggctgtgttgctgttggaaatggtttgtcacctcctcctgtgcagtggctgctgctccacattgcggatcttaaaaaccttcctaatctaaatggcccttgctttacccggccatggctaccctggggtttggagcgtggctatggagggaaagggagcgggaatgctgcaagaacaagccgactggattacaatgtccactactgacagggcagtgcgtgtgtgtgaccacgggttcccgggcactgtcccccccgctcccaccccacccgaggctccctccccaccctgcccccgggagaatcacttaaacacggactgaaaggtggggcactcatggtttttcattttcttcatgaagtttttgaactccttgtttttcttgtcccacttgtggatggccgtcagcaagtactggctcttcaccttgcggcccatgatgaggaagtggtggctgaggttgtccagctggtggcagggacagtcagccccattcttcaggtacagcacaagcttcttcaggtccttcttcttgatgggccccaacttcaggggcttcttcttcttggggacaatcttcttgtcgccattttcttttttcacttcttttattttcatcctcagtgcaaactcgctggcacagagatgttcaatgatggcctcagatttcaactcgttgtcacagggaggacacaccgttgtgccttggggcttggaggcttcggtggcattgggcggcgtcatggcgatgcagacgtccccctccgggaacttgtcacacttaagcatctcgggccagtagaagccgaagaactgcatgaccggctcgcacgagtcgcgcacggcctcgcagagccagcgacacgggtagatgggccggtccaggcagacgggcgcgaagagcgagcagaggaagacctgggtcccggcgtggcagttcttgttgagcaggggcacccagctgctggcctgctgcttcacctccgccatggtctcgtgctccagcaggttgggcagcaccatcttcttgtagcccacgttgtggcacagccgcaggtccgcggggatgtccacgcactgaggtggcttggtgtagaagcgcccgctctggtacgggccgatgtccgactggaagctcacgtagtcgtactcgctggccgagcccacggccagaagcgccgcgcccagcgccagcagcacgcccagggccccgcggcggcccccctcgctgcgcccgatgcccatgccggctctgcgccctgttctccgcgacgtcggggctgcctccgccgcctccccgcgcgcgtcctgccgcaaacttccagggacctccggggacaaaaggcgcagtccccagcgttgcccggctccgcggccgcaagctgctgcccggtccccccggccagtggcggccctcggcctgcggtcggaggcggcgcgggcggggaggcggcgctgcgggctgggtgcgccccggctcccggaggtgcggcgagcaggaaggcgcggggcggcgggcgcgcggcactgactccggaggctgcagg

SEQ ID NO: 138 - DNA, 3820 bp, Homo sapiens
gacacactcctctacaacaccagagactcccaaacacaaggccttatattgactcatttcagctcacatcctggcgactctcaagagagaaacctcagagtgactaaaatctccataatgagaagacatgtacattcagtatctattttggcattttccccaatacatctctgctcatctgactcttatcttggcatctgcttcctggtggatctgaactgacccataagccacgcttactggtgattttccagaagatgaatccggcctcggcgccccctccgctcccgccgcctgggcagcaagtgatccacgtcacgcaggacctagacacagacctcgaagccctcttcaactctgtcatgaatccgaagcctagctcgtggcggaagaagatcctgccggagtctttctttaaggagcctgattcgggctcgcactcgcgccagtccagcaccgactcgtcgggcggccacccggggcctcgactggctgggggtgcccagcatgtccgctcgcactcgtcgcccgcgtccctgcagctgggcaccggcgcgggtgctgcgggtagccccgcgcagcagcacgcgcacctccgccagcagtcctacgacgtgaccgacgagctgccactgcccccgggctgggagatgaccttcacggccactggccagaggtacttcctcaatcacatagaaaaaatcaccacatggcaagaccctaggaaggcgatgaatcagcctctgaatcatatgaacctccaccctgccgtcagttccacaccagtgcctcagaggtccatggcagtatcccagccaaatctcgtgatgaatcaccaacaccagcagcagatggcccccagtaccctgagccagcagaaccaccccactcagaacccacccgcagggctcatgagtatgcccaatgcgctgaccactcagcagcagcagcagcagaaactgcggcttcagagaatccagatggagagagaaaggattcgaatgcgccaagaggagctcatgaggcaggaagctgccctctgtcgacagctccccatggaagctgagactcttgccccagttcaggctgctgtcaacccacccacgatgaccccagacatgagatccatcactaataatagctcagatcctttcctcaatggagggccatatcattcgagggagcagagcactgacagtggcctggggttagggtgctacagtgtccccacaactccggaggacttcctcagcaatgtggatgagatggatacaggagaaaacgcaggacaaacacccatgaacatcaatccccaacagacccgtttccctgatttccttgactgtcttccaggaacaaacgttgacttaggaactttggaatctgaagacctgatccccctcttcaatgatgtagagtctgctctgaacaaaagtgagccctttctaacctggctgtaatcactaccattgtaacttggatgtagccatgaccttacatttcctgggcctcttggaaaaagtgatggagcagagcaagtctgcaggtgcaccacttcccgcctccatgactcgtgctccctcctttttatgttgccagtttaatcattgcctggttttgattgagagtaacttaagttaaacataaataaatattctattttcattttctgcaagcctgcgttcttgtgacagattatacagaattgtgtctgcaggattgattatgcagaatacttttctctttcttctctgctgccccatggctaagctttatgggtgttaattgaaatttatacaccaattgattttaaaccataaaaagctgaccacaggcagttacttctgagggcatcttggtccaggaaatgtgcacaaaattcgacctgatttacagtttcaaaaactgtattgatgacagtagtaccaaatgctttaaaaactatttaacttgagctttaaaaatcattgtatggatagtaaaattctactgtatggaatacaatgtaattttgaatccatgctggctctgatggctcttattagtctgtatttataaaggcacacagtcctattgtagcttatctttcgttattttactgcagagcatctagacaacttagtccctccagcgtgaaagtagcagcagcagcattagtcacagttcttacactacagatcttgtgaaagagaccagtttggtactaattatgagcattttattcaaacaaaagtttttgaaatattacaactggggatttaaaaaattgcagcttagaatctgatggttttttttttttcttgatgttgtttgtttgtttttgagatcgagttttgctcttgttgtccaggctggaatgcaatggcacaatctcggctcactgcaacctctgccttctgggttcaagcgattctcctgccttagcctcccgagtagctgggattacaggcgcctgccaccacgtccggctaattttttgtattttgagtagagacggggtttcaccataatggtcaggctgttctcaaactcctgatctcaggtgatccacccatctcggccttccaaagtgctgggattactggcgtgagccaccgcacccggccttgatgtttattttataaagcactgtaattttgtagctgatgacaaaaggcagccaaatgtttttgataaatcagtggcaactgtatttttgtcttttgaaataactctgaaaacatcaggacaacatagatttcaacctgatagcacaccacacacagtgagctgttgctttttaaattctgaagccttgtcaggtttgcttcctagatttcaagtgtttaaaataattctatctatgaaactgaaggatgaagcagatctctgactgacatgtaaaaaaaaatgccctttgagggtgtatggtggagataaatgtttctgaattcagtaaaattgattcctaagtatattatcctaatcctgtttgctacagttggtataaaaaggcatgaaatatgtattcaatacctcttatgtaaccaaaaccatttttaattagcttttaaggactgagagagcatcatgttcaactggcatgcagtctgcctgcattgccaatgaagtcctcaactgtttaatattttgaactaatattatttataatctatgaatttaatcttttttgaaagactttaataatttgagtctctgagaggatactttcaatttccatgggggacttatttgttggggatcttaaataagattccttttgatctaccggaatatacatgtacagagtacattggatcatgttggaaagaaggcaagtgaaaaggtcagagatgaagtagcgaagttatggaatatcgtggaaaggatactagttgtgaaatggaaagagacaagttatagtaccccaaaagcaaaacaagcaggagatgcaagagatgccccaaaaggacaaagcaacaattttctgttgccacctttataccggaagactctgttgtagaagaaaagaaggctttggtgcaccttatgtgggaggaggaggggcagggcatgctgatgctgagcgtacaggcagacaagagcgtagcctgctgttgcctccatcactatgaaatgacttattttacctgaaggacccatggtttatgttcctctaattcctttcactctccctaagccctctgagagagatgaagatagatgattttattgctactaaattgaagggagcactatttctttttgtcttttgttagcaaaaaattgcaaaaagaattgtacattcttgctaaaaataaataaataaataaaaaaaaaa

SEQ ID NO: 139 - DNA, 380 bp, Homo sapiens
ggttggtaattacgttcgcgatttgctgctggccaaggccaggtctggattaatggctttaaccttggtcgctattggcagcccgggccctcagctgaccttgtttgtgccccagacattctgatgacctcggccccaaacaccatcaccgtgctggaactggagtgggcaccctgcagcagtgatgatccagaactatgtgctgtgacgttccgtggacaggccagttattggctcatctgtgacctacgatcatccctccaaacctgtttgaaaaaagactcatgcccccacccccgcaaaaaaacaaagattcatggctggaccatgtatgaggatgaaagcctgtgtctttgagggattctactctgaagatacct

SEQ ID NO: 140 - DNA, 4139 bp, Homo sapiens
gaccactgagacgagcgggagcgcggagcagcagcctctgctgccctgactttttaagaaatctcaatgaactatttgtagagaatcactgatccggcctgcaagcattttgcacggcaaaaatatcgatcagtgttaagtgaagatcacattttatatgcgatcttgacttttttgtcttacattatatttttatagattttgttataaacatggtgctgggaaaggtgaagagtttgacaataagctttgactgtcttaatgacagcaatgtccctgtgtattctagtggggataccgtctcaggaagggtaaatttagaagttactggggaaatcagagtaaaatctcttaaaattcatgcaagaggacatgcgaaagtacgctggactgaatctagaaacgccggctccaatactgcctatacacagaattacactgaagaagtagagtatttcaaccataaagacatcttaattgggcacgaaagagatgatgataattccgaagaaggcttccacactattcattcaggaaggcatgaatatgcattcagcttcgagcttccacagacaccactcgctacctcattcgaaggccgacatggcagtgtgcgctattgggtgaaagccgaattgcacaggccttggctactaccagtaaaattaaagaaggaatttacagtctttgagcatatagatatcaacactccttcattactgtcaccccaagcaggcacaaaagaaaagacactctgttgctggttctgtacctcaggcccaatatccttaagtgccaaaattgaaaggaagggctataccccaggtgaatcaattcagatatttgctgagattgagaactgctcttcccgaatggtggtgccaaaggcagccatttaccaaacacaggccttctatgccaaagggaaaatgaaggaagtaaaacagcttgtggctaacttgcgtggggaatccttatcatctggaaagacagagacgtggaatggcaagttgctgaaaattccaccagtttctccctctatcctcgactgtagtataatccgcgtggaatattcactaatggtatatgtggatattcctggagctatggatttatttcttaatttgccacttgtcatcggtaccattcctctacatccatttggtagcagaacctcaagtgtaagcagtcagtgtagcatgaatatgaactggctcagtttatcacttcctgaaagacctgaagcaccacccagctatgcagaagtggtaacagaggaacaaaggcggaacaatcttgcaccagtgagtgcttgtgatgactttgagagagcccttcaaggaccactgtttgcatatatccaggagtttcgattcttgcctccacctctttattcagagattgatccaaatcctgatcagtcagcagatgatagaccatcctgcccctctcgttgaaggaacacttggttgaatcaagttgatgtgggttccgaactgtatctcttccggctgaggacagagaagtatcttggagacacgtttcagaggaagtggaattacttttgcccagaaaaatggcgaatacatgaaacaaccagtgatcatgctttagaagcctacagcaacattctgagactgctccaacatgcttgaagatctaagcttttctcttttaaaactggcacatactcagagcagtcttcttagcctatggtcgtacgtgtcaagacatcacgttgtaaagagggatgatttccttcttttgatttgaaaatttgcacatgctcaatgcttacattgtgcggttcgacgtcactacagcttctttttttttttttttttttttctatttttgccagactcttgatactcttaaaacttgtttgtggtcagcacaacaaggaacaaaacaaagctttgaaaaaactttaacatgaaaaaacgcactgacatttttttttatttaatatagcctggactttacctgcgtatgcacatgctcagaattgtctactaggctgactatgtatcacctcttcagcttggatccaattgtggatttatttacaaacatcaaatgccttcaagccaatcctttttgctgtatgttttgcagcctactgtagtagatacgcaacagataatgtgggaaaaaaagagataagaggaggaagctaataagagactgtcaagattgtataccttcttggtttcttttaagaatttgttgcctttctactattacagcaaagcagcattttgttactgactgcctaaaatcacttaatctcaggtgaacgcatcacttgccaaactgttggaatgctatttgtgttttgttgcactgtttttttcgtttgtttgtttgtttatttggttggctttttggagagggaaatttggaaacgggacatacacaaaagttacacacccacattccctttttatcatgacatacaagaagaaactagcagagctaagaatggagtgaagaaaggcagtatggcaggcaccagcaaagagttgagggctgttgctcttaaaaattattttttttattattattttgaaagtatggaagttttccattcactggggaaaggagggaaaagtgcatttatttttatacagagttacttaattacctccaaaacacatatgttggaaatcgcttttgctggtgcaaagtatattaatgagcaggaatacatacattgaggttatgaatagagagctcaatttgtacctttgctgtcttgctcaagcttggtatggcatgaaaactcgactttattccaaaagtaacttcaaaatttaaaatactagaacgtttgctgcgataaatcttttggatttttgtgtttttctaatgagaatactgtttttcattacctaaagaacaatttgctaaacatgagaaatcactcactttgattatgtatagattacataggaagaacaatcacatcagtaagttatagtttatattaaaggtaattttctgttggctcataacaaatataccagcattcatgatagcatttcagcattttccaaggtaccaagtgtacttattttgttgttgttgttgttgttgtattttagaaggaattcagctctgatgtttttaaagaaaaccagcatctctgatgttgcaacatacgtgtaaaatgggtgttacatctatcctgccatttaaccccacagttaataaagtggctgaaaataatagtagctctggcttggtgcttgacctggttaaatactgtcttaaagctcatacaaaacaaataggcttttccataagtggcctttaagaaaacatggaagacaattcatgtttgacaaatgctgacagggtgaagaaagcccagtgtaaaaatgaatcgcgttttaagtgattcggttaaagagtttgggctcccgtagcaaactaatactagataataaggaaatgggggtgaaatatttttttattgttgaatcattttgtgaatgtccccctcaaaaaaagctaatggaatatttggcataaagggcatttggtggttttatttttgtttgagggggattgtcagaaaatcccttttctctcttacgtctaactgactagggaacaattgttgatatgcatagcattggaatacttgtcattatatactcttacaaataacacatgaagcaagaatgaccaatattctgataattggcactggatcacaaaatgtgataaaactttaaatgtataaaactttatcaaataaagttttattttcccctttaaaatgtatttctttagaggcattacttttttaaaaatattggtcaattcctgacataagatgtgaggttcacagttgtattccagtattcaagatagattcctgatttttcaattaggaaaagtaaaatccaaaatgttagcaaaacaaagtgcaatattaaatgtttgctttatagattatattctatggctgtttgtaatttctctttttttccttttttatttggtgctgaatatgtccttgtaggctctgttttaagaaaacaatatgtgggaaatgatttaatttttcctattgctcttccttgtggaaaataaagtgttttgtttttttctgttttgtaaaaaaaaaa

SEQ ID NO: 141 - DNA, 1506 bp, Homo sapiens
atcccggtggactgtagaggcggcagcgagctagagcccgagtcgcagctccgggccgcagagcgctgggcgagcgcgagcgccagggcaccggcagggcaggcagctgcgcgcggctggagtcatgctatactgaaaagacacttcatcaagataactctgggagaagcagaaaaccctgtgccagggacaggaaagataggagaaagaaagtttatcagaattttttaaacctgtctcagaaataacaacatattttaatcagagatttatgttgctatgaggacagattcatcaaaaatgactgacgtggagtctggggtcgccaattttgcatcttcagcaagggcaggccgccggaatgccttaccagacatccagagttcagctgccacagacggaacctcagatttgcccctcaaactggaggctctctccgtgaaggaagatgcaaaagagaaagatgaaaaaacaacacaagaccaattggaaaagcctcaaaatgaagaaaaatgaaggctcataatctatcaagagtgctgaatttctgcatgttgaaagacttagtggttctgttttcttgagacatttaatctggtggtaactgtggtaacattgcagccctaagcagcatgtgtatattagataattgtgttgtgatgctactcactttgattgcaatgatgatgtccaaggtaagctattaaaaggcaggttacttccaaatcgcactgaaggaaaaggttaagaataatacatgatcacagaaatgcataccactgtctgtaaacccaacaaaattcactgttctcttttggatttatttagcctgatgtatttttaattcaatttttatggtgatgggcaaatcattcttggtaaatgtaaatcaaacatgattgatttaaaacttcatggaatttgtagaaaattatggacatttttggtgagaaagaacaatagtcaaaactcacatggatagagtgtgtttgttttttgccaaaaatgccccagactttttcccaaacctcaaaaacgtcttggaaaaattgtaaaagtttgataacagaaacatctttaggatatttttgtctgacgtattttgcttctagtatgtgcctactgtgatttttttcatgtggaaaatgcaaaatttgtaagccaaaaatgggcttaatatgggaaccatgccccttaattaaaaccggaattttttactaattctttcccccaagaaactccaaaactaacaacacctaacaaccaaacaaactgtttgtgggcgcgccctgcggaccctcaaacaagcacgtgtttgagacaaccactggcgtggcgggacaccgggcaccacccgcgctgtaccgagcgaggatccgtcgcacaacatcgtgtcacccaaaagacactcccgggggccacgatacatagaggcagcgacatctccccccaagtgcaaaaaacgcccgcgcggcaacccaagcggttcataacaaattcacaggt

SEQ ID NO: 142 - DNA, 1458 bp, Homo sapiens
cccggtctgtkgtgctcagagtgtggtcaggcggctcggactgagcaggactttccttatcccagttgattgtgcagaatacactgcctgtcgcttgtcttctattcaccatggcttcttctgatatccaggtgaaagaactggagaagcgtgcctcaggccaggcttttgagctgattctcagccctcggtcaaaagaatctgttccagaattccccctttcccctccaaagaagaaggatctttccctggaggaaattcagaagaaattagaagctgcagaagaaagacgcaagtcccatgaagctgaggtcttgaagcagctggctgagaaacgagagcacgagaaagaagtgcttcagaaggcaatagaagagaacaacaacttcagtaaaatggcagaagagaaactgacccacaaaatggaagctaataaagagaaccgagaggcacaaatggctgccaaactggaacgtttgcgagagaaggataagcacattgaagaagtgcggaagaacaaagaatccaaagaccctgctgacgagactgaagctgactaatttgttctgagaactgactttctccccatccccttcctaaatatccaaagactgtactggccagtgtcattttattttttccctcctgacaaatattttagaagctaatgtaggactgtataggtagatccagatccagactgtaagatgttgttttaggggctaaaggggagaaactgaaagtgttttactctttttctaaagtgttggtctttctaatgtagctatttttcttgttgcatcttttctacttcagtacacttggtgtactgggttaatggctagtactgtattggctctgtgaaaacatatttgtgaaaagagtatgtagtggcttcttttgaactgttagatgctgaatatctgttcacttttcaatcccaattctgtcccaatcttaccagatgctactggacttgaatggttaataaaactgcacagtgctgttggtggcagtgacttcttttgagttaggttaataaatcaagccatagagcccctcctggttgatacttgttccagatggggcctttggggctggtagaaatacccaacgcacaaatgaccgcacgttctctgccccgtttcttgccccagtgtggtttgcattgtctccttccacaatgactgctttgtttggatgcctcagcccaggtcagctgttactttctttcagatgtttatttgcaaacaaccattttttgttctgtgtcccttttaaaaggcagattaaaagcacaagcgtgtttctagagaacagttgagagagaatctcaagattctacttggtggtttgcttgctctacgttacaggtggggcatgtcctcatcctttcctgccataaaagctatgacacgagaatcagaatattaataaaactttatgtactgctgtagc

SEQ ID NO: 143 - DNA, 362 bp, Homo sapiens
tgtatttagactcaaatacagtctaagaatcacattaagcacaagtgaattaaatgctacagttaaaataccagcatagtaagactgggggaaagtgtagctatacgttgtttataagagatctacataaaagataaatataggggaggttgtgtgtagaaggatgaaaaaagacataccatgaaaaccgtaaccaaaagaaactgatgtagtcagtcaagtttccactggaaaaaacaagtctgtaggatgtatgtattgaaagattcaactattcacaatagcaaagacatggaatcaacctaaatgcccatcaatgatagagtgggtaaagaaaatatggtacatatactctatgaact

SEQ ID NO: 144 - DNA, 3121 bp, Homo sapiens
aataatattcttcaagagatttacagagttccttgagtgaattgttggtttgttcttaatactgaatttcctattcaaatttatttagaagttcatttcttacagtgatctcatctcctattaagatattcttcaagatctggaggccatcctttaagcttcttgcaacagtctgggagcaaagagtttactcgccactgggtagtgggccatggacaccccagtctccaccagaagttcgggattgcaaaatgggactctggcagcaaatttcaaactgtatgccagacctggccctttgcaggtgtctggaaagatggctgaataggaacagctctgctctgcagctcccagcgagatcaacgcagaaggagataatttctgcatttccaactaaagtacccagctcatctcattgggactggttagacagtgggtgcagcccacagaaggcaagcagaagcagggtggggtgtcgcctcacccgggaagcgcaaggggtcagggaactccctcccctagccaagggaagctgtgagggactgtgccgtgaggaacggggcattccggcacagatactatgctttccccacggtctttgcaacccacagaccaggagattcccttgggtgcctgcaccaccagggccctgggtttcaagcagaaaactgggcagccatttgggcagacactgagctagcagcaggagtttttttcataccctagtagcccctagaatgccagcgagacagaactgttcactcccctggaaaggggcactgaagccagggagccaagtggtctagctcagcagatcccacccccacggagcccaacaagctaagacccactgggttgaaattctcgctgccagcacagcagtctgatgtccacctggaatgcttgagcttggtgcagggaggggcgtctgccattactgaggcttgattaggcagtttccccctcacagtgtaaacaaagctgctgggaagtttgaactgggtggagcccactgcagctcggcaaagttgctgtagcaagagtgtctctctagattcctcctctctgagcagggcatctctgaaacaaaggcagcagccccagtcagggacttatagataaaactcccatctccctgggacagagcacctgggggaaggggcagctgtgggcacagcttcaggacacttaaacgttcctgcctgctggctctgaagagagcagcagatctcccagcacagtgctcaagttctgctaagggacagactgcctcctcaagtgggtccctgacccctgtgcctccggagtgggagagaccttccagcaggggtcaacagacatctggtgggtgcccgtctgagacgaagcttccagaggaaggaacaggcagcaatctgtgctgttctgtagcctgcgctggtgatacccaggtaaacagggtctggagtggatctccaacaaactccagcagacctgcagcagaggggcctgactgttataaggaaaactaacaaacagaaaggaatagcgtcaacatcaacaaaaaggacatccacacaaaaaccccatccgaaggtcaccagcatcaaagaccaaaggtagataaatccatgaagatgaggaaaaaccagtgcaaaaaggctgaaaattccaaaaaccagaacaccttttctcctgcaaaggatcacaactccttgccagcaagagaacaaaactggatggagaatgagtttgacgaatttacagaaggaggcttcagaaggtgggtaataacaaactcctctgagctaaaggagcatgttctaacccaatgcaaggaagctaaaaatgaaaaaaggctggaggaattgctaactagaataaccactttagagaagaacataaatgatctgatggagctgaaaaacacagcacgagaccttcgtgaagcatacagaagtatcaatagctgaatcgatcaagcagaagaaaggatatcagagattgaagatcaacttaatgacataaagtgtgacgtcaagattagagaaaaaaagaatgaaaaggaacgaacaaagcctccaagaaatatgggactatgtgaaaagaccaaacctatgtttaattgatgtacctgaaagtgctggggagaatagaaccaagtttgaaaacactcttaggatattatccaggagaacttccccaacctagcaagacaggccaatattcaaatcagtaaatacagagaacaccacaaagatactcctcgagaagagcaaccccaagacacataatcatcagattcaccaaggatgaaatgaagaaaaaaatgttaagggcagcccagagagaaaggtcggtttactcacaaagggaagcccattaaactaatagcagatttgtctgctgaaaccctacaagccagaatagagtggggggccaatatttaacattcttaaagaaaagaattttcagcccagaatttcatatccagccaaactaagcttcattagcaaagaagaaataaaatcctgagagacaagcaaatgctgagcgattttgtcaccaccaggcctgccttacaagagctccagaaggcagcactaaacacataaaggaaaaaccagtaccagccactgcaaaaacataacaaactataaagaccaccgacactatgaagaaactgcatcaactaacaggcaaaataaccaactagcatcataatgacaggatcagattaacacataacaatattaaccttaaatgcaaacgggctaaatgccacaattaaaagacacagactggcaaattggatagagtcaaaatccatcattgtgctgtattcaggagacccatctcacgtgcaaagacacacataggctcaaaataaagggatggaggaatatttaccaagcaaaatgggaaagggaaaggaaaaaaaagcaagggggttgcaatcctagtctctcataaaacagactttaaaccaacaaagataaacaaaagacaaagaagggcattacataactggtaaagggatgaatgcaacaagcagagctaactattctacatatatatgcacccaatacaggagcaccagattcataaagcaagttcttagagacctacaaagagacttaga

SEQ ID NO: 145 - DNA, 1715 bp, Homo sapiens
tattcttaaccttattctgagtcattcccaatatgtacaccaccgaattagttccttcccagattccaatctccagttttcccattccacgacctttaaacacggcaggtgcctagctataatccactccctataggaccaccttgtacaaaaactgggtacgcctaacctggccccttgtaggataatcttagacgcccctctcgatctagaactagtcctagttctagatcccgcatcgcccccctttttttttttttgaaatttagggtaagctaggacaatttcctactttttaatatatagatattttagatttgacaatcgtttccacatacactcagacaggcttacagaagaatttcaaatatcaaatagagaagctgttaattcacgcacgttatgacttcagttaattcttccagtgtttagacttcagagctgctaataacactaaactcaataccgtgtttgttgagtctgtcaatcaactttgttttggaaaaagctgctccaggtgtgaagaccccgcccgccttaggcagatgagaagcatcacttagaagagtcatggctgcctgaaccatagctatgggggtagccacatagccagcctctggtcctttcacctgagtacaaattttgatatttggtttgttcttatctgtaccagtgccttggctgtatccttgaccaaagaatgtcagcgtgaatgaggcagcatcaatctgtttttgtgttgggccttgttttgaaaaatagccaaaggagaagaaccatgggaattttatgagaagttgccttccaattccaaacctcacaaagaacaaaaagaaaagtcctgcaaacatcagcttaataacagaggtgatgcctcccacagttacatacgcagcatactgaactggtgattcctctaaattttcatacaagtaacgttgagtcctccttacaacagacacatcagatcccataaaaggaatggaataacctttgagttcccgacaataagaaattggccaccttctcttcaattttggaccaatgagcgggacaggtttcagatttgatacatttcttagttttctcaaattactctgatctccaaaaccataaattgctgacttccaggtaccatcatgaatgctcaacccctcaggtcctgaatgtatagtcaggaaactttccacagcagtcaaagtaccattcattttatttctggtatatattactcccagatctgctggaatggagtcaaagccgctgcttccaatgatatwaaaccctttgtctgcagctttctcatgatacttcagttgcattagttccagaaactgaggttctccactgatgtcgatacaactggctccattttcaatacatgcttttattacaggttctccataaaaccgatatggtcctacgcaattgaggacaactgttgcctgtttagccatttcatcaagcgaggctggattagcaatatcacagatgatgattccaacttcagatgacagtgttggtcttcccagcttcagggccgccttctccagcacccgctgcagcttctcccgggagcggcccgccacgcccagggcaggctgggtccgctccgggtccacctgctcccgggccacctcctcggtcacgaactggccggtgaagccagacgcgccgaacaccaccaggtggaaaggcctctgctccgtcgccat

SEQ ID NO: 146 - DNA, 2787 bp, Homo sapiens
ttttttttttttctcaagccgtttttattacacttagtgtattaagacaagtacaaaataaccttgtaattaagatactgtatcagtcaaaaaagaagtcactattgtatgaagagatttacaaatgactaaaatatacaggctgtgacagaattaacagtttgaaagagggttgcttttttcttttagaaatgctaaattttcttaacaagacaaaaatacagtgctctaaatatgcattaccatgaaaacgttaaagaaaagcagtcttaacacttaactactattaacagcctttgccaacacatgcctgcctactccctttcctaactttaaagaactgtttcctctaaggaatactagtgcagcataacccttaaataatttcatttatttttaaagttacaacctacagagaaattaacatcttgtcaatctaataacagtggcaaccattcttcacatgcacttctcttagaataaatccccttggctggcaggataaggcttatgctgtagaaccttctcccccacagccacaaatccccttctataagtccctcctaccctcatccccccgcatccccactggcattcacctttcccaccccaaaaagtgcagctcatggtagccttctagaaaatggttttaatgggtatcccagcatacacgcttttttaaaagccccctctgaacaccagaggtggtgaaaatgaattgtgttcttggatttttttttttttaagcctccactgggtcaaaaatatgtgctcttaatacttgagtttttgctttgtgtgtgggttttctttctttttcatttagatatcgtgggataaagtggagaggacatctccattttcccatacaaactgagggtgagaagagaaagagaagcaagctgttgcccccactttggcctggcttcccagccatcttcccagctctggttctttcataggaactagttattgcttccacaatgccgttatacggaatgttccacaaaggctgtgaacctagtcacagtctacccacaacaagaactctgctctgaaaaaccagcccaagagctcttacccagaagaacaatctttagccctcaaggtcactgaaacttcattagagcagtttagagtagacgtgtaagatttggcatatattaaatgattattggcacaatgttctccagttccatgtataaatgttgatatgcacatcggccagggcccaggatgaatcagccaatctgcaccatttttatgtcagcaataattccatctcttccctttgagcactgtagggagagctgcttcatccggttctccaaggcctggccctcaggggaggtgctgctttggctcttactgctgccaccactgccactgctactgctgaggccccggttgttgttggctttgtcacttgttttattctctgccccttctgccctgtctcctcgttctacttcacattcaggggaggaggccccgctgcattcacttcgagggcccaacactgggaacatcatcccaaactctgacagggacacagggctgggcagatccaggctgccaggcctcacaaccgcagggaactggtcaggcatctcagacgggcttgttggtcctgaactaaagctggacacggactgggtttccgagtcatcttcagacacaaagttgctacagctgtcatcttcaaaggcctccgaggccacagaaatggcatcaggctcaggtttgctccctggcagatcctccacagatgtgctgctgccctcagcaccaacaccgcatccccgaggccccatggcactggagcgccgccgctcgtggatctcatctgagatcatctccaggttcttcagggccatcttgtactcgccttttgccagggtcagtttggcctgcaggtcatccacagtctttttcagttgctcgagctgcacatagtactttgccttgagttcaaaataaggcttggacttgttgatggctctcttgagtttcttctccagctgtcgcatgcggcccatggcggcattgtacctggctgccgtctccttatgcaccagctcgctcctggtcttggtctgctccgcctccatgaccctctgagtggcgtgattcagcatctcctgccaggcggagtcgaactgccgcttgtcatcctccagcagccgctgctcggccagggagatggtctccttggcggcacggagcacctctgtggccctctggaagtcctgcgtggctttctgagcttccagctgagcctgcctcgccaccctccgtgcctcccagtagggcttggagtcttccacagctttgccaattttcttcaccagttcatccagtttcaccgttgcttcaaccagaacagagcggaacttctgacgagcatcctcaagttcagtctcccgtctgttgatatcatccgtggactgatttaacttctccagttctccctggatccggggatccacctcttcttcctcctccagcccctgctccatcccctcttcctcctcctcctcctcgtcccgggcaggcggcaggatttcggctggctcctccgagcggctccgcttcagtgccgcgtccatgcaggcagccggcacgcgcgccgcgcagtgggctccggagcgccccgggggtcgcggctgccacaggctgggctggagccgcctcgccacagccgggcacggtcggggagccgccggggccgacacccgggagacgcagctcgccgatgcggatacctccggccgcggccggacgcgt

SEQ ID NO: 147 - DNA, 4159 bp, Homo sapiens
gtttatttatggtctgtttctggaatgtccgctcctgggactgggaccatgattttctggcgcagtgcgggtgtctcggcgtccgggatcgggcgggtcgcagtagggctccacatttgttgagtgactgaacaccgttcccggccggggagagcgccgcagccgggtccacttcaggtaggggctgggctttcccggccccgcctaggccccgcccccagcgcgaacccgctcccacctcgcctgtccgcggagcagcagggggtttgactgtgcttttccctcttgcttccctcgctctttctgcagctgccacgaaaacccggaacggcggagcggcgccgcccctcgcggcacctccctggcagcccttggaggccgcgctgggcatgctcagtcagctgggccgcctcagctctcggagtaggaagctcgggcgctccggctgtaaggagccgcggcggggggaaaatggagcccttcaccaatgatcggcttcagctccccaggaatatgattgaaaacagcatgtttgaggaagaaccagatgtggtggatttagccaaagagccttgtttacatcctctagagcctgatgaggtggaatatgagccccggggttcccgactgctggtgcggggtcttggtgagcatgagatggaggaggatgaagaggattatgagtcatcagcaaagctgctgggcatgtccttcatgaatagaagctcaggccttcggaacagtgcaactggttacaggcagagcccagatggggcttgttcagtaccctctgcaaggaccatggtggtctgtgcttttgtcatcgtggttgctgtttctgtaatcatggtgatttacttactgcccagatgtacctttaccaaagaaggctgccataaaaaaaaccagtcaattggactaattcagccatttgcaacaaatgggaaattgtttccatgggcacagatcaggcttcccactgccgtggtgccactacgctatgaactcagcctacacccgaacctaacctcgatgacattcaggggttctgtgacaatttcagttcaggctcttcaggtcacatggaatatcattcttcatagcacaggtcataatatttcaagagtgacctttatgtcagcagtttcaagccaagaaaaacaagctgagatcctggaatatgcatatcatggacagatcgccattgttgcccccgaagcccttctagcagggcacaattatacgttgaagatagagtactcggcaaatatatctagttcttattatgggttttatggcttctcctacacagatgaaagtaatgagaaaaagtactttgcagcaactcagtttgaacccctggcagcaagatctgcttttccttgttttgatgaaccagcatttaaagccacttttatcatcaagatcataagggatgagcaatacaccgctttatcaaatatgcctaagaagtcatcagtcgttctagatgatggacttgttcaggatgagttttctgagagtgtgaagatgagcacttacttggttgctttcattgtgggagagatgaagaacctgagtcaggacgtaaatggaaccctggtttctatatatgctgtaccagaaaagattggtcaagttcattatgccttggaaacaactgtgaagcttcttgagttttttcaaaactactttgaaattcagtacccacttaagaaattggatttggtggctattcctgactttgaagcaggagcaatggaaaattggggtttgctcaccttccgagaggagacacttctgtatgacagtaacacttcttcaatggcggatagaaagctggtgactaaaatcattgctcatgagctggcccaccagtggtttggcaatctggtaacaatgaagtggtggaatgacctatggctaaatgaaggttttgccactttcatggagtatttctctttggaaaaaatattcaaagagctttctagttatgaagatttcttagatgctcgatttaaaaccatgaagaaagattccttaaattcatctcatccaatatcatcatctgttcagtcttcagaacaaattgaagaaatgtttgattctctttcctattttaagggatcttctctcttgttgatgttgaaaacttaccttagtgaagatgtgtttcaacatgctgttgtcctttacctgcataatcacagctatgcatctattcaaagtgatgatctgtgggatagttttaatgaggtcacaaaccaaacactagatgtaaagagaatgatgaaaacctggaccctgcagaaaggatttcctttagtgactgttcaaaagaaaggaaaggaactttttatacaacaagagagattctttttaaatatgaagcctgaaattcagccttcagatacaagctacctgtggcatattccactatcctatgtcactgaaggaagaaattattcaaaatatcaatcggtatcattactggataagaaatcaggtgtcatcaatcttacagaagaagtgctgtgggtcaaagtgaatataaacatgaatggttattatattgtacactatgcagatgatgattgggaagcactaatccatcagttgaaaataaatccttatgttctgagtgacaaagaccgagccaaccttatcaacaacatctttgaacttgcaggcctaggcaaggtacctctcaagagggcctttgatttgattaattatcttggaaatgagaaccatactgcacccatcaccgaagccctgtttcagacagacctcatctataacctccttgaaaaactgggatacatggatctggcctcaagactggtgactagggtatttaaattacttcaaaaccaaattcaacaacaaacttggactgatgagggcactccatctatgcgagagcttcggtcagccctgctagagtttgcttgcacccacaacctggggaactgctctactactgccatgaaactgtttgatgactggatggcatccaatggaactcaaagcctacctactgatgtcatgacaactgtgttcaaagttggagcaaaaactgacaaaggctggtcattccttttgggcaaatacatttctataggctctgaagcagagaagaaccaaatactagaagcacttgccagctcagaggatgtgcggaagctttactggttaatgaaaagtagcctgaatggagataacttccgaacacagaagctgtcttttatcattagaacagtgggtcgacattttcctggacacttactggcatgggattttgtcaaagagaactggaataagcttgtacagaagttccctctggggtcctataccatacaaaatattgttgctggatcaacttacctgttttcaacaaagacacatttatctgaggttcaggcattctttgaaaatcagtcagaggcaaccttccggcttcgttgtgtccaggaggctttggaagtcattcagttgaatatccagtggatggagaagaacctcaaaagtctcacatggtggctgtagcatgcacaaccgcacctcattttgttgcccattcagagagcttgtaagcttgggctctgccgcttttgcaaaagccaaggtaaagccaggatcgctgccaagttgtttgcactctttggagttctagttagctcagggcctgactgtatttttcatccatcttttctgaagtgtctttgggcagtatgtagttatttattacaaaattatattcacctaaatgccaaccatctacaaaaacaatgagtaatttttctactttgaagatacacagatggggacaaaaaccctgttttggaattctgttctattcctcagtatccagaaagttactgacacagtaaaacaaggaaagttctaccctaagagccgccatcacttcaggccgctggtttgtcagccatctgttgcttcttattgatagatggcattggaatgtggtacaaagttagctctgaagaatatggtaacgaagacaataaagcatgcactgtaagaactgacctcaggtgtgcagatctactttgatttggggttttgattaattcttatttttctgaaaaaaagtttaaataatgtctgtaactattgtgtttttttcctgccgaat

SEQ ID NO: 148 - DNA, 1880 bp, Homo sapiens
gtggtggactcaccgctagcccgcagcgctcggcttcctggtaattcttcacctcttttctcagctccctgcagcatgggtgctgggccctccttgctgctcgccgccctcctgctgcttctctccggcgacggcgccgtgcgctgcgacacacctgccaactgcacctatcttgacctgctgggcacctgggtcttccaggtgggctccagcggttcccagcgcgatgtcaactgctcggttatgggaccacaagaaaaaaaagtagtggtgtaccttcagaagctggatacagcatatgatgaccttggcaattctggccatttcaccatcatttacaaccaaggctttgagattgtgttgaatgactacaagtggtttgccttttttaagtataaagaagagggcagcaaggtgaccacttactgcaacgagacaatgactgggtgggtgcatgatgtgttgggccggaactgggcttgtttcaccggaaagaaggtgggaactgcctctgagaatgtgtatgtcaacacagcacaccttaagaattctcaggaaaagtattctaataggctctacaagtatgatcacaactttgtgaaagctatcaatgccattcagaagtcttggactgcaactacatacatggaatatgagactcttaccctgggagatatgattaggagaagtggtggccacagtcgaaaaatcccaaggcccaaacctgcaccactgactgctgaaatacagcaaaagattttgcatttgccaacatcttgggactggagaaatgttcatggtatcaattttgtcagtcctgttcgaaaccaagcatcctgtggcagctgctactcatttgcttctatgggtatgctagaagcgagaatccgtatactaaccaacaattctcagaccccaatcctaagccctcaggaggttgtgtcttgtagccagtatgctcaaggctgtgaaggcggcttcccataccttattgcaggaaagtacgcccaagattttgggctggtggaagaagcttgcttcccctacacaggcactgattctccatgcaaaatgaaggaagactgctttcgttattactcctctgagtaccactatgtaggaggtttctatggaggctgcaatgaagccctgatgaagcttgagttggtccatcatgggcccatggcagttgcttttgaagtatatgatgacttcctccactacaaaaaggggatctaccaccacactggtctaagagaccctttcaacccctttgagctgactaatcatgctgttctgcttgtgggctatggcactgactcagcctctgggatggattactggattgttaaaaacagctggggcaccggctggggtgagaatggctacttccggatccgcagaggaactgatgagtgtgcaattgagagcatagcagtggcagccacaccaattcctaaattgtagggtatgccttccagtatttcataatgatctgcatcagttgtaaaggggaattggtatattcacagactgtagactttcagcagcaatctcagaagcttacaaatagatttccatgaagatatttgtcttcagaattaaaactgcccttaattttaatatacctttcaatcggccactggccatttttttctaagtattcaattaagtgggaattttctggaagatggtcagctatgaagtaatagagtttgcttaatcatttgtaattcaaacatgctatattttttaaaatcaatgtgaaaacatagacttatttttaaattgtaccaatcacaagaaaataatggcaataattatcaaaacttttaaaatagatgctcatatttttaaaataaagttttaaaaataactgc

SEQ ID NO: 149 - DNA, 1666 bp, Homo sapiens
gaggacgcctatggacgacaaggagttaattgaatactttaagtctcagatgaaagaagatcctgacatggcctcagcagtggctgccatccggacgttgctggagttcttgaagagagataaaggggagacaatccagggtctgagggccaatctcaccagtgccatagaaaccctgtgtggtgtggactcctctgtggcagtgtcctctggcggggagctcttcctccgcttcatcagtcttgcctccctggaatactccgattactccaaatgtaaaaagatcatgattgagagaggagagctttttctcaggagaatatcactgtcaagaaacaaaattgcagatctgtgccatactttcatcaaagatggagcgacaatattgactcacgcctactccagagtggtcctgagagtcctggaagcagccgtggcggccaagaagcgatttagtgtatacgtcacagagtcacagcctgatttgtcaggtaagaaaatggccaaagccctctgccacctcaacgtccctgtcactgtggtgctagatgctgctgtcggctacatcatggagaaagcagatcttgtcatagttggtgctgaaggagttgttgaaaacggaggaattattaacaagattggaaccaaccagatggctgtgtgtgccaaagcacagaacaaacctttctatgtggttgcagaaagtttcaagtttgtccggctctttccactaaaccagcaagacgtcccagataagtttaagtataaggcagacactctcaaggtcgcgcagactggacaagacctcaaagaggagcatccgtgggtcgactacactgccccttccttaatcactctgctgtttacagacctgggcgtgctgacaccctcagcagtcagcgatgagctcatcaagctctatctgtaacctgtgagccctttcctgccaaggtgcagcttacgtagttgaggcagggtgagtagctgcttgacaccccagtgagtcaggccaaaactgagatgtgtttaatgaagatttatggagtaaggacttaaaatcatacatcttggagaacctttcttactcatttcagtcccatctaaaaatgtgtcagctattctaaatcccaacttaaattgttcttacggtttctagaaactttccttttcagtttccagaaatacaagttagataattggctacttaactgatgaaagatgagcccaagtccacctgtcttcatcctcccctgcactccagactgatctgcctaaagcacgcgagatgcaggcgaaaagcagccacacccctctgccacaaatgaccaacagctggtcaggacgttacacgcggtgccttgtaagaggcaagaaacacttgccgaatctgcatctggcttccagtggtaagcacattcctcagcaggatcaagccaaacagtaaaaactaccaagagaacacgaggaaggcagaaacgatgtttagcaacagtattctgcatggttcactgcttaagaaaatgccttctggaatatttgtaaactgaaattctgtatgtgtaagagatgtttaaatatgtttgggtcctaaacagctttttaaaattatacttgggaataaattcagcatcttttcaaataaactctatgaaagacaaaaaaaaaa

SEQ ID NO: 150 - DNA, 2492 bp, Homo sapiens
ttttttttttttgaggctctgagagtttattgtctgccccagtgaggctcctgggcttcctgggaggaactgggggaggaactgggggctggtcacacaggtctataggtcccattgtagctaaaagggggaggcatcgagcagtccctgtcctcagggatccagcgctggacgtagttggggccgttgtcccgaggccacacgatcacagtgtctctggatgccagggaggggtcctctgggaagaagttgaatggccggagcaggaagcccacggagttcccaggtgtggctgtgttgggaatgtcctctgggaagaagttgaatggccggagcaggaagcccacggagttcccaggtgtggctgtgttgggaatgtcctctgagtgggggatgtgcaggaagcccaccgtcacccaggccaccaggtcctcattttcaatgttctcgttgttgtgaagaaactgctcaaagaccacgggcgggtcccaggggtcgttctggtggtagatgctgctgctgcacagctctgactcccggtacttggtcactgccagggggtaccttgcccaggtgatggcctgctcctcctgccagcctgggggcagcacctggtcggccatggagtggatctgcaggcggtagctgcgcttgtggccccaggggttctcctgggggctggtaaagagcaggtacttaggcagcttccttttgaagcggaaggccgcctggcgctcccaggagtactgcgtctgctccagagttggctggaccacgcggtgtcttgggctccaggggttggtgatgttttctagcttcatctgcagtgtctggaagctgttcttggtgcctgccacatccaggtctacgcggtagtgcaccaagtgagtgtgtatgttgccaatcaggtgggtgtgcaggcgagtgccgtggcgcagcccctcggggggtgtagaaggtggcgtggacgtagccagtggcatgcatcttggcctccatcaccccgttggggtagaagataaagtcccaaatgtaatcataattgtagacagttgaagttgtccgcagcaccagcacctggcccttcagccctgcatagaagttgaagccacctttaaagttggaattaaagtgccgccgaaggggcacccctgtgggcatttcaaagaggcagagggctcggggataatggaccgggtcatcggcatcatagtagtggaaagtgtccaggaaggtggcggtctccgggcagtcgatgccgggggctaactcatgagtgacgctgcccaggccccagccgacatcgaggtacttggtctgcatgcctgcaggtgtgtgtcctccatacagcgccactgcctcttgcacgctgacctcataggcaatgcgctctccgccgaagtgcacgttcaggacctgcagcccggaggaggagcgcagccggaaggcaaagctccagccgccgtagagcacagcgttgccctccagcctgaagcgagggccgtggggctggaccaagcgggggccgctcacatggatggggctggggaagtccccgcggggcttgtgggaggagaagaggggcggctcctctgtgctgtcatgccccttgcccccaggcagcgggtcctccaggaccaccacgtccacctctccatctgcatacttccgagccagttcctctgggctcccatagaacttcccgttgtaccacacctgctccacggcccagtgcccagcatctgtgctcccatgatccacgaggagctccagcccagtggggtgcagaaagtagccttctacatagcgctgtatgataagccaactgcggcgctggccagaagccacaccccggggggccacatcggtgaaggccaggcatctgtcatggcagtcttggaatgagaagcctgtggtattgaggaagaactgatgcaggggcttggtggcttcctgcagggtgtggtagaggagggcatactctgctgtggagatgggcctcgatgcccaggaggactggtacccaggcctgggggacagtgctcgcatgtagcagggccctggcaggggccccacagcaaactcggtgacattgggatgctcctggtcaccaaagaagatgacggcacgggcttcccgcacaggatgcctttcacctttatccagaaacctcagcacatggtacttcttgggcagcagcatctcgatgagaaacacggtgttcttggccatggtggtggtactggagggctgcagcctcagctccttcttggaccagaggaagctgtgcactgccttcagctcttggttgcttaggtctgaaaacacccctgccttcctgggcagagtccccggggagggctccgccatggccgtctgcagcatcaggatggcagccacggcccagcccagggccggcatctctcgctccacggctctgtgtgctctgctcccagttcgctctgcttccagcctttgcccttaagctgatc

SEQ ID NO: 151 - DNA, 772 bp, Homo sapiens
ggtgagaccctacccacccccctgcccgcgccgggcctcgtccgctccccggccccttccccgcgggcgtgtgggtcccgggctggggtctcggcgtccgcgatcccgagcccgctcgcttcggcccccctcaggaggctgcgaggaggggtggcggcggcatggaggcgcgcttcacgcgcgggaagtcggcgctgctggagcgcgcgctggcgcggccgcgcaccgaggtgagcctgagcgccttcgcactgctgttctccgagctggtacagcactgccagagccgcgtcttctccgtggccgagctgcagtcgcgcctggccgcgctgggccgccaggtgggcgcgcgcgtgctggatgcgctggtggcgcgcgaaaagggtgcccggcgtgagaccaaggtgctaggcgcgttgctcttcgtcaagggcgccgtgtggaaggcgctcttcggcaaggaggcggacaagctggagcaggccaacgatgacgcgcgcaccttctacatcatcgagcgcgagccgctcatcaacacctacatctccgtgcccaaggagaacagcacgctcaactgcgccagcttcacggcgggcatcgtggaggcggtgctcacacacagcggcttccctgccaaggtcacggcgcactggcacaagggcaccacgctcatgatcaagttcgaggaggcagtcatcgctcgagaccgggccctggagggccgctgaccctgccggagataaaggatacagagagcccctcaaaaaaaaaa

SEQ ID NO: 152 - DNA, 3334 bp, Homo sapiens
ttttttttttttccccttttagaagctatacataaaaagttgttttccttctgtactgtcacagaacttttacatacattctcagtcctagttgtgaaaggcctaaagagaaagaaactcaatttgcagtccaacacaaaggggggaatttctaaaataaataatccaacagttttttgcatttttttaaattaatttttcatttttttaaaataaaataaccaaaaaagtgtaaagttacaaaaaatgtcgttgaagaataatatattaaaactgtggaaaaaaaggaaaaagacacgtcacaaaattttaagattaatatgaagatcataatttaacataaaagaatatattctatggatttgtcatcccgataaatatgaacaaaattaacaaaaaaaagcatagtttggcaataaatacgttttgataagttaaataagcttttttatattgatgtgcagtgacaagcaaaatttttgctctccaatttctgaaagttatatgaagtttaaaacccagggaagaaagcatggcgtgagtgctctaaggatagacctacggtattctagagcaaaaaccattaaagctacttctacaggaaatcgttttacacagatattgtatgtggaatgaataccattaactgctcaccccttacttttttttttttagcttttctctcattttttttttgttgttattttttttaaaaagatgtcacatatgaactggggaactttagcaccaaaatcaagtctctcctagtccatctagcttccccttcctccccacttaaaaaaaagaaaaaattaaatcacaaagtcccacttaagtcaaaatcttcgtccgctttttcagccttccttcctgcagacctacacaaacccaggcaagattagtcaacaggggttcagatcgggaagaaaaaggttttgaatgtcaagacaggtttcccccaaaaccctggtctggcaacaactcttccaaggggcaggggtggggggggtgggggggcgggtacaggtggagaggtgccaccgggaagaggggaggaggaataagtgtgcgggagactgaaatgagggaaggtgcagttgtgtcgccagtggagggggctgctggttccgggtctccaccccgccatgggcagaggctccgggaggcccacgggtgccctctggcgctgaagaggtaatgtagtcacagtgacaaagttagattacaaggcactaagttgcttctgtaaactgttactgctttttctcttgtgatttggcacttaaggcttaagccggaaaaaaaaaggcatctactgacaaaatatgggacttgtctgttatgcatggtaagtgggctataaaatccagggagggggtttcaagccagaagaagctactgacaaattgacttgtccttatgttaggtggggttatgagggggagagggagggcacattctgaggtgctgggggaaaggggttgagcttaaccttgttaatgtagggcctgtggggaatgggatgggtagggagaagagggtatgggatgtgggtgcagggtaggggctggagtaggcaggaggtccctccctaccctggcttagtcatctgagatggaaagtctgctgaagatgggcaggcgtcttgagttgtccaaggtcggggagtctgagccactgtggctgctgctggagctgctcaggtagccctcctggtccgagagagaatcctgagggctggggggagagtcaaacatgtgaggggactcggacatgggccggaagaggaaggtggtcggggagccacccccgggcagccccatgctaggggcaaagaggcttgccagctcctggctggagaaggcaaaagggttattggtgccatcgggcagggtaggtgagcccaggaggtcatcggcgctcagaatagggggtggggtgatggacgtggggctgtccagcagcccggtggcagcggcggtggcagcggcactgggaaacccagcaaagctaaagctatgctggaggcggggacggtcagcggagaggtcccgggccccggccagggcacggcgctcttcagcgttgtggatgaagtggcagcggggcccgtaggggcaaaagccgatggtgtggaaggtgcggcacagctccgtcttgtacttggggtggcgggtcaggctgcggagctcgtggatgccgtgtgcgaactggcacttgtccccgtacttacaggcaccgttttcctcaaaggggcggcacagctccgtcttgtagcggctggagttgacctggccgcccccgggctgcttctgggtgggcagcagccgctcgcccccttccgagaaggagcggtctcggaagcggctgtctcgcgagctcagagcgggggctggctcacccttgaggctgctgaggagctggttctggtggaacttggagctgggcagggtgactgagtgcctccgagggaagcccccaccagcaggggtgcccactgcctttctgtccagcaggcaaccccctgcactgggagcactatagttgagcatcttgttaccctggagagagaagagaaggatggtaaggacagaggacatccaccaggatgtccactatgggcagccccctacacaatcacaaacgcccgctctttctcaaagaactcatctctacctcggctctagcaagctcccttccctctctccctcccataggccattcacctgggtttattttggccccatgcgtaagaaaccacaagatccaaactgtgtgacaagcaccctgctccatgctgactcctgcaatgcaacccccatgtcctctgtccccaaagctaccactttaaagttcaacttttttactagtcaaatagattcttcaactcaaaatatctcacacaacccagacctctctagattaccgcacccgccccgccaccgcccgcgacaaaaacaggtaaacctcagaaaggagtctatcataggcacgttaggtccccttccaatcagtctctgcttaattgataccccctccttcaagacctggcctaagactctcaacttcctccttcagaagtgttcccttcctttggcaacaggttttcagactgcctttgctttttcttgtggggaggagattgggggcctggtctgaggttgggggagacagggatgtgattcctgaaaataaaactctttgccctaagttcccggaagagatattttctacaataatctctctcaccatttccactcagccctagcccaccccgcccccttcactgagaagatgcctttgcaattagtcttttggctgcaagagcaagctt

SEQ ID NO: 153 - DNA, 412 bp, Homo sapiens
ccggtccgaaattcccgggtcgacttcgctgtcgacgtatttcgtccgccgccgccctacccctacctcgtcacagggatacccacccaccatcccagggtctacaacatccacagccggaccgtcacccgctatcctgccaactctatcgtggacgtaggaggctgtcctgtctgcagggttggggtgctggaggactgcttcaccttcctgggcatcttcctggccatcatcctcttcccctttggattcatttgctgttttgccttgaggaagcgacgatgccccaactgtggagccaccttcgcttaaagggaacaccaggcccggctttcctacagccagcttcttaatctaatgtaaatgttgtgtacaatagttttatttgattaagcttcaggactgttttgta

SEQ ID NO: 154 - DNA, 3043 bp, Homo sapiens
ggcgcgcggcgagctgagggtggcggcggtcgacatgttccaggtcccggatagcgagggcggccgcgccggctccagggccatgaagcccccaggaggagaatcgagcaatctttttggaagtccagaagaagccactccttccagcaggcctaataggatggcatctaatatttttggaccaacagaagaacctcagaacatacccaagaggacaaatcccccagggggtaaaggaagtggtatctttgacgaatcaacccccgtgcagactcgacagcacctgaacccacctggagggaagaccagcgacatttttgggtctccggtcactgccacttcacgcttggcacacccaaacaaacccaaggatcatgttttcttatgtgaaggagaagaaccaaaatcggatcttaaagctgcaaggagcatcccggctggagcagagccaggtgagaaaggcagcgccagaaaagcaggccccgccaaggagcaggagcccatgcccacagtcgacagccatgagccccggctggggccgcggcctcgctctcacaacaaggtcctgaacccaccgggaggcaaatccagcatctccttctactaagagaagccactgctccacccggagccagaccagaaactcaagagatagggtagccatgttttcatttccttttgcccaaatgagcggggtgggaagagggttagtcttatgtgagcctggctgctcagcgtctcctggccgtcatgacagctgcttggagacccgtgccttccagatggctgggagatgcctctgtggggatgaaatggggcacccctggccatcactcatgtgtagtccaggtttgagaggaactggaaggggggtgagggtggggaggtggggcagggcatggtccttggatcaacagcccgccagctgattggatgtctaggaatgactgaaagaaaccaaaacagcctgtccactgctgctgtgggatggaggaggcgtaagcagaaacactaacagtatattgacctcttagcagaaccgcttccattctggagatcacggctgctaaatccagcatccccacttcattttacccccagcatattgttctgtagtcttttcttgaaacatcttgattgcttttcctcggcagctttcaaaaaaccaaataataatagttatccgtcttctacttcatggaagattgttttggtgccctgaccctctgaagtgcccagttcctgccatctgaaacctcggcctgatctgatctcatgttggaatctgcctgtctttcacacagggctggtcttggtcctttacatgccagttttgcttgtgaattcttgcttttttcctctcatcagccttaagtttaggcgtttgttgttctccagtgatgtagacagttcccttcacaagtcacagttcttcccataaatgaggcccgctgacctctgcgggactttaaaaatctattcagatatttccgagtaagtggcttgtttaaattcttcctgtgtctttctttattccttaattggttggtggaaagaagagatgcttgggaaccttgggttcttaggtttggattctttaataatatctaaaaagctaaattttaaataccagctttacataaatgattgttgactctggtctgtttctgacacctttccagaaaaaagtcaattgttcaggtacaccaaagaggaagaagagctgtggaggccaccctctacaaagctttatagaacttctggatctaactcacaaacaagcttccagaagagactagagaccttaggccaggagatgaaggagttcagtagcaaagtcacacctgtccaattccctgagctttgctcactcagctaatgggatggcaaaggtggtggtgctttcatcttcaggcagaagcctctgcccatccccctcaagggctgcaggcccagttctcatgctgcccttgggtgggcatctgttaacagaggagaacgtctgggtggcggcagcagctttgctctgagtgcctacaaagctaatgcttggtgctagaaacatcatcattattaaacttcagaaaagcagcagccatgttcagtcaggctcatgctgcctcactgcttaagtgcctgcaggagccgcctgccaagctccccttcctacacctggcacactggggtctgcacaaggctttgtcaaccaaagacagcttcccccttttgattgcctgtagactttggagccaagaaacactctgtgtgactctacacacacttcaggtggtttgtgcttcaaagtcattgatgcaacttgaaaggaaacagtttaatggtggaaatgaactaccatttataacttctgtttttttattgagaaaatgattcacgaattccaaatcagattgccaggaagaaataggacgtgacggtactgggccctgtgattctcccagcccttgcagtccgctaggtgagaggaaaagctctttacttccgcccctggcagggacttctgggttatgggagaaaccagagatgggaatgaggaaaatatgaactacagcagaagcccctgggcagctgtgatggagcccctgacattactcttcttgcatctgtcctgccttctttccctctgcgaggcagtggggtgggattcagagtgcttagtctgctcactgggagaagaagagttcctgcgcatgcaagccctgctgtgtggctgtcgtttacatttgggaggtgtcctgtatgtctgtacgttggggactgcctgtatttggaagatttaaaaacctagcatcctgttctcaccctctaagctgcattgagaaatgactcgtctctgtatttgtattaagccttaacacttttcttaagtgcattcggtgccaacattttttagagctgtaccaaaacaaaaagcctgtactcacatcacaatgtcattttgataggagcgttttgttatttttacaaggcagaatggggtgtaacagttgaattaaacttagcaatcacgtgctcaaaaaaaaaa

SEQ ID NO: 155 - DNA, 5735 bp, Homo sapiens
cctggaggagggctctggaagtcacgtcaggttggctcttcaggttcatttccatagttccctgcggcctctgccttggggagttatgttttgttaccgagatccgcgctaccagattgcaccggggctgatttgggggctgggaatttgccattctgctgtacagacactgatttttttttcttctttttaaaaagcaaggtttgttttcattttggattttaggtgatgggcaagtcagaaagtcagatggatataactgatatcaacactccaaagccaaagaagaaacagcgatggactcgactggagatcagcctctcggtccttgtcctgctcctcaccatcatagctgtgagaatgatcgcactctatgcaacctacgatgatggtatttgcaagtcatcagactgcataaaatcagctgctcgactgatccaaaacatggatgccaccactgagccttgtagagactttttcaaatatgcttgcggaggctggttgaaacgtaatgtcattcccgagaccagctcccgttacggcaactttgacattttaagagatgaactagaagtcgttttgaaagatgtccttcaagaacccaaaactgaagatatagtagcagtgcagaaagcaaaagcattgtacaggtcttgtataaatgaatctgctattgatagcagaggtggagaacctctactcaaactgttaccagacatatatgggtggccagtagcaacagaaaactgggagcaaaaatatggtgcttcttggacagctgaaaaagctattgcacaactgaattctaaatatgggaaaaaagtccttattaatttgtttgttggcactgatgataagaattctgtgaatcatgtaattcatattgaccaacctcgacttggcctcccttctagagattactatgaatgcactggaatctataaagaggcttgtacagcatatgtggattttatgatttctgtggccagattgattcgtcaggaagaaagattgcccatcgatgaaaaccagcttgctttggaaatgaataaagttatggaattggaaaaagaaattgccaatgctacggctaaacctgaagatcgaaatgatccaatgcttctgtataacaagatgagattggcccagatccaaaataacttttcactagagatcaatgggaagccattcagctggttgaatttcacaaatgaaatcatgtcaactgtgaatattagtattacaaatgaggaagatgtggttgtttatgctccagaatatttaaccaaacttaagcccattcttaccaaatattctgccagagatcttcaaaatttaatgtcctggagattcataatggatcttgtaagcagcctcagccgaacctacaaggagtccagaaatgctttccgcaaggccctttatggtacaacctcagaaacagcaacttggagacgttgtgcaaactatgtcaatgggaatatggaaaatgctgtggggaggctttatgtggaagcagcatttgctggagagagtaaacatgtggtcgaggatttgattgcacagatccgagaagtttttattcagactttagatgacctcacttggatggatgccgagacaaaaaagagagctgaagaaaaggccttagcaattaaagaaaggatcggctatcctgatgacattgtttcaaatgataacaaactgaataatgagtacctcgagttgaactacaaagaagatgaatacttcgagaacataattcaaaatttgaaattcagccaaagtaaacaactgaagaagctccgagaaaaggtggacaaagatgagtggataagtggagcagctgtagtcaatgcattttactcttcaggaagaaatcagatagtcttcccagccggcattctgcagccccccttctttagtgcccagcagtccaactcattgaactatgggggcatcggcatggtcataggacacgaaatcacccatggcttcgatgacaatggcagaaactttaacaaagatggagacctcgttgactggtggactcaacagtctgcaagtaactttaaggagcaatcccagtgcatggtgtatcagtatggaaacttttcctgggacctggcaggtggacagcaccttaatggaattaatacactgggagaaaacattgctgataatggaggtcttggtcaagcatacagagcctatcagaattatattaaaaagaatggcgaagaaaaattacttcctggacttgacctaaatcacaaacaactatttttcttgaactttgcacaggtgtggtgtggaacctataggccagagtatgcggttaactccattaaaacagatgtgcacagtccaggcaatttcaggattattgggactttgcagaactctgcagagttttcagaagcctttcactgccgcaagaattcatacatgaatccagaaaagaagtgccgggtttggtgatcttcaaaagaagcattgcagcccttggctagacttgccaacaccacagaaatggggaattctctaatcgaaagaaaatgggccctaggggtcactgtactgacttgagggtgattaacagagagggcaccatcacaatacagataacattaggttgtcctagaaagggtgtggagggaggaagggggtctaaggtctatcaagtcaatcatttctcactgtgtacataatgcttaatttctaaagataatattactgtttatttctgtttctcatatggtctaccagtttgctgatgtccctagaaaacaatgcaaaacctttgaggtagaccaggatttctaatcaaaagggaaaagaagatgttgaagaatagagttaggcaccagaagaagagtaggtgacactatagtttaaaacacattgcctaactactagtttttacttttatttgcaacatttacagtccttcaaaatccttccaaagaattcttatacacattggggccttggagcttacatagttttaaactcatttttgccatacatcagttattcattctgtgatcatttattttaagcactcttaaagcaaaaaatgaatgtctaaaattgttttttgttgtacctgctttgactgatgctgagattcttcaggcttcctgcaattttctaagcaatttcttgctctatctctcaaaacttggtatttttcagagatttatataaatgtaaaaataataatttttatatttaattattaactacatttatgagtaactattattataggtaatcaatgaatattgaagtttcagcttaaaataaacagttgtgaaccaagatctataaagcgatatacagatgaaaatttgagactatttaaacttataaatcatattgatgaaaagatttaagcacaaactttagggtaaaaattgcgattggacagttgtctagagatatatatacttgtggttttcaaattggactttcaaaattaaatctgtccctgagagtgtctctgataaaagggcaaatctgcacctatgtagctctgcatctcctgtcttttcaggtttgtcatcagatggaaatattttgataataaattgaaattgtgaactcattgctccctaagactgtgacaactgtctaactttagaagtgcatttctgaatagaaatgggaggcctctgatggaccttctagaattataagtcacaaagagttctggaaaagaactgtttactgcttgataggaattcatcttttgaggcttctgttcctctcttttcctgttgtattgactattttcgttcattacttgattaagattttacaaaagaggagcacttccaaaattcttatttttcctaacaaaagatgaaagcagggaatttctatctaaatgatgagtattagttccctgtctcttgaaaaatgcccatttgcctttaaaaaaaaaagttacagaaatactataacatatgtacataaattgcataaagcataagtatacagttcaataaacttaactttaactgaacaatggccctgtagccagcacctgtaagaaacagagcagtaccagcgctctaaaagcacctccttgtcactttattactcccagaacaacaactatcctgacttctaatatcattcactagctttgcctggttttgtcttttatgcagatagaatcaatcagtatgtattcttttgtgcctggcttctttctctcagccttacatttgtgagattcctctgtattgtgctgattgtggatcttttcattctcattgcagaataatgttctattgtgggacttattacaatttgttcatcctattgttgatgggcacttgagaactttccattttggcgctattacaaatagtgcaactatgaatgtactgcatgttaccatcttacttgagcctttaatggacttatttcttcaaatccttccaaaaattattataagcattgaaattatagtttcaagccaactgtggatacccttaccctttcctcctttatcacaaccaccgttacaagtatacttatatttccctaaaatacatttaaaacttacctaagtgacatttgtagttggagtaataggagcttccagctctaataaaacagctgtctctaacttattttatttccatcatgtcagagcaggtgaagagccagaagtgaagagtgactagtacaaattataaaaagccactagactcttcactgttagctttttaaaacattaggctcccatccctatggaggaacaactctccagtgcctggatcccctctgtctacaaatataagattttctgggcctaaaggatagatcaaagtcaaaaatagcaatgcctccctatccctcacacatccagacatcatgaattttacatggtactcttgttgagttctatagagccttctgatgtctctaaagcactaccgattctttggagttgtcacatcagataagacatatctctaattccatccataaatccagttctactatggctgagttctggtcaaagaaagaaagtttagaagctgagacacaaagggttgggagctgatgaaactcacaaatgatggtaggaagaagctctcgacaatacccgttggcaaggagtctgcctccatgctgcagtgttcgagtggattgtaggtgcaagatggaaaggattgtaggtgcaagctgtccagagaaaagagtccttgttccagccctattctgccactcctgacagggtgaccttgggtatttgcaatattcctttgggcctctgcttctctcacctaaaaaaagagaattagattatattggtggttctcagcaagagaaggagtatgtgtccaatgctgccttcccatgaatctgtctcccagttatgaatcagtgggcaggataaactgaaaactcccatttaagtgtctgaatcgagtgagacaaaattttagtccaaataacaagtaccaaagttttatcaagtttgggtctgtgctgctgttactgttaaccatttaagtggggcaaaaccttgctaattttctcaaaagcatttatcattcttgttgccacagctggagctctcaaactaaaagacatttgttattttggaaagaagaaagactctattctcaaagtttcctaatcagaaatttttatcagtttccagtctcaaaaatacaaaataaaaacaaacgtttttaatactaaaaaaaaaa

SEQ ID NO: 156 - DNA, 4098 bp, Homo sapiens
gacggtcggctgacaggctccacagagctccactcacgctcaggccctggacggacaggcagtccaacggaacagaaacatccctcagccccacaggcacgatctgttcctcctgggaagatgcagaggctcatgatgctcctcgccacatcgggcgcctgcctgggcctgctggcagtggcagcagtggcagcagcaggtgctaaccctgcccaacgggacacccacagcctgctgcccacccaccggcgccaaaagagagattggatttggaaccagatgcacattgatgaagagaaaaacacctcacttccccatcatgtaggcaagatcaagtcaagcgtgagtcgcaagaatgccaagtacctgctcaaaggagaatatgtgggcaaggtcttccgggtcgatgcagagacaggagacgtgttcgccattgagaggctggaccgggagaatatctcagagtaccacctcactgctgtcattgtggacaaggacactggtgaaaacctggagactccttccagcttcaccatcaaagttcatgacgtgaacgacaactggcctgtgttcacgcatcggttgttcaatgcgtccgtgcctgagtcgtcggctgtggggacctcagtcatctctgtgacagcagtggatgcagacgaccccactgtgggagaccacgcctctgtcatgtaccaaatcctgaaggggaaagagtattttgccatcgataattctggacgtattatcacaataacgaaaagcttggaccgagagaagcaggccaggtatgagatcgtggtggaagcgcgagatgcccagggcctccggggggactcgggcacggccaccgtgctggtcactctgcaagacatcaatgacaacttccccttcttcacccagaccaagtacacatttgtcgtgcctgaagacacccgtgtgggcacctctgtgggctctctgtttgttgaggacccagatgagccccagaaccggatgaccaagtacagcatcttgcggggcgactaccaggacgctttcaccattgagacaaaccccgcccacaacgagggcatcatcaagcccatgaagcctctggattatgaatacatccagcaatacagcttcatcgtcgaggccacagaccccaccatcgacctccgatacatgagccctcccgcgggaaacagagcccaggtcattatcaacatcacagatgtggacgagccccccattttccagcagcctttctaccacttccagctgaaggaaaaccagaagaagcctctgattggcacagtgctggccatggaccctgatgcggctaggcatagcattggatactccatccgcaggaccagtgacaagggccagttcttccgagtcacaaaaaagggggacatttacaatgagaaagaactggacagagaagtctacccctggtataacctgactgtggaggccaaagaactggattccactggaacccccacaggaaaagaatccattgtgcaagtccacattgaagttttggatgagaatgacaatgccccggagtttgccaagccctaccagcccaaagtgtgtgagaacgctgtccatggccagctggtcctgcagatctccgcaatagacaaggacataacaccacgaaacgtgaagttcaaattcaccttgaatactgagaacaactttaccctcacggataatcacgataacacggccaacatcacagtcaagtatgggcagtttgaccgggagcataccaaggtccacttcctacccgtggtcatctcagacaatgggatgccaagtcgcacgggcaccagcacgctgaccgtggccgtgtgcaagtgcaacgagcagggcgagttcaccttctgcgaggatatggccgcccaggtgggcgtgagcatccaggcagtggtagccatcttactctgcatcctcaccatcacagtgatcaccctgctcatcttcctgcggcggcggctccggaagcaggcccgcgcgcacggcaagagcgtgccggagatccacgagcagctggtcacctacgacgaggagggcggcggcgagatggacaccaccagctacgatgtgtcggtgctcaactcggtgcgccgcggcggggccaagcccccgcggcccgcgctggacgcccggccttccctctatgcgcaggtgcagaagccaccgaggcacgcgcctggggcacacggagggcccggggagatggcagccatgatcgaggtgaagaaggacgaggcggaccacgacggcgacggccccccctacgacacgctgcacatctacggctacgagggctccgagtccatagccgagtccctcagctccctgggcaccgactcatccgactctgacgtggattacgacttccttaacgactggggacccaggtttaagatgctggctgagctgtacggctcggacccccgggaggagctgctgtattaggcggccgaggtcactctgggcctggggacccaaaccccctgcagcccaggccagtcagacgccaggcaccacagcctccaaaaatggcagtgactccccagcccagcaccccttcctcgtgggtcccagagacctcatcagccttgggatagcaaactccaggttcctgaaatatccaggaatatatgtcagtgatgactattctcaaatgctggcaaatccaggctggtgttctgtctgggctcagacatccacataaccctgtcacccacagaccgccgtctaactcaaagacttcctctggctccccaaggctgcaaagcaaaacagactgtgtttaactgctgcagggtctttttctagggtccctgaacgccctggtaaggctggtgaggtcctggtgcctatctgcctggaggcaaaggcctggacagcttgacttgtggggcaggattctctgcagcccattcccaagggagactgaccatcatgccctctctcgggagccctagccctgctccaactccatactccactccaagtgccccaccactccccaacccctctccaggcctgtcaagagggaggaaggggccccatggcagctcctgaccttgggtcctgaagtgacctcactggcctgccatgccagtaactgtgctgtactgagcactgaaccacattcagggaaatggcttattaaactttgaagcaactgtgaattcattctggaggggcagtggagatcaggagtgacagatcacagggtgagggccacctccacacccaccccctctggagaaggcctggaagagctgagaccttgctttgagactcctcagcacccctccagttttgcctgagaaggggcagatgttcccggagcagaagacgtctccccttctctgcctcacctggtcgccaatccatgctctctttcttttctctgtctactccttatcccttggtttagaggaacccaagatgtggcctttagcaaaactggacaatgtccaaacccactcatgactgcatgacggagccgagccatgtgtctttacacctcgctgttgtcacatctcagggaactgaccctcaggcacaccttgcagaaggcaaggccctgccctgcccaacctctgtggtcacccatgcatcttccactggaacgtttcactgcaaacacaccttggagaagtggcatcagtcaacagagaggggcagggaaggagacaccaagctcacccttcgtcatggaccgaggttcccactctgggcaaagcccctcacactgcaagggattgtagataacactgacttgtttgttttaaccaataactagcttcttataatgatttttttactaatgatacttacaagtttctagctctcacagacatatagaataagggtttttgcataataagcaggttgttatttaggttaacaatattaattcaggttttttagttggaaaaacaattcctgtaaccttctattttctataattgtagtaattgctctacagataatgtctatatattggccaaactggtgcatgacaagtactgtatttttttatacctaaataaagaaaaatctttagcctgggcaaaaaaaaaa

SEQ ID NO: 157 - DNA, 952 bp, Homo sapiens
  misc_feature (1)...(952): n = a,t,c or g
caccagcacagtctggtaggctacagcagcaagtctctaaagaaaggctgagaacacccagaacaggagagttcaggtccaggatggccagcctgttccggtcctatctgccagcaatctggctgctgctgagccaactccttagagaaagcctagcagcagagctgaggggatgtggtccccgatttggaaaacacttgctgtcatattgccccatgcctgagaagacattcaccaccaccccaggagggtggctgctggaatctggacgtcccaaagaaatggtgtcaacctccaacaacaaagatggacaagccttaggtacgacatcagaattcattcctaatttgtcaccagagctgaagaaaccactgtctgaagggcagccatcattgaagaaaataatactttcccgcaaaaagagaagtggacgtcacagatttgatccattctgttgtgaagtaatttgtgacgatggaacttcagttaaattatgtacatagtagagtaatcatggactggacatctcatccattctcatatgtattctcaatgacaaattcactgatgcccaattaaatgattgctgtttattagaacatgagaatcattattagtattcacatgtttcacttgctctgtactaatatagtctctccaaatggaggaagttagatagatggaataagttctagtagttgatagtacaatgggggaaaanttatactttacaataattcactgtatatttccaaawtagctagaagagaattgtaatgwttccaacacaaaaaagatgawtgttagtttggttgcatatcccaattacccwgttttgttcwttacacattatatacacgtwtcaaaatatcacatgtactacaaaaatgtgtataactgtmatatgtgaactacaaacttactggaaataaatttttaaagttttacacac

SEQ ID NO: 158 - DNA, 1605 bp, Homo sapiens
ttttttttttttaaaccaatccgttttttaattcttaaattcttgacattacagaactaaactgaaatttattaacattccactcttacatttcttatcgacaaacagaaataaaattcatgagccaaaaaacccaaaacaaaactaaaaacagggaaaagcttataaaactaaatatggatcccagcattaacagctgaacagagaatgtgatttttaaattcttagcggatgataaagttgtgtagaaactgaacacttacaaattatttaaaacctggaatcactgaccagaaattacacagttggatcatgggagaacagcagaaaggggttattgagggaacctacactgttctagctgcaccccatgcccttctcagaggaaagcctggcattgattagatactgggccagactaatactggcagcagagccagtgatagtaacctgcctaccagaggagccttccactgggttggcaattttgatctgggccccggacatctggcggatctcattaatgttggcgccttggcgcccgattatgcagccaattaagttatttggaatggtgagttcatgggtggtttgagtagatgcatccaaacttgcccaatagcctttcacctctggagagctggagtcaattccggcgaatccggtcccgccgtgcatcatggcaaagtgagactgttgtcttgccacctggttcagcttggccagatcgagcggagaaatggtgtgttgtccttgaatcgagtaggcatctagaggtggtccctccaggtcatgggtggcatgggggtagcccgcagcgtcgctgcaccgatcttggccgcccgcgcagatgactggggagctggccggcatgggctggtacggaatggtcatgactctcccttgcggagactgggagagcgtctccagcatgaccaggcaaatctgcttgacacactcggtgacagactgcggcacgccagcgatggtgatggcccgctcggtggagttgggcagcatatcccccgccacctggacctgcgcccccgtactctcgcggatctctttgatcttacacccgcctttcccaatcagggagccgcactgggtggccggcaccaccagcctcagggtgaccgggggcctgctggccgcggtactgttggtcatggagctgttgatatcttcctccagcttgtcgatgatcatagcgaaagccttaaagatggcattggtggggccggtcagagtgatgattctctccggacaattcccctccgagatgttgatccgcgcgccactctcctcgcggatcctcttaaccgactcccctttcttcccaatgatgcttcctacttcctttccgtgcataagaagccgaatggtgagagtcacatttagtccactttcagtcacaccggcatccatggcgagcggcgggcggcgttcgggggagttgggctcgttacgtggtcaagtctttggcggctggcggggggaggggaggtgtaggcccaaaactaccggcgcgaggcgagcgaggaccgcgggagcgagcgggagcgggcgggagtccgcagcgtagtcgcagggtcgggcggcgtc

SEQ ID NO: 159 - DNA, 461 bp, Homo sapiens
  misc_feature (1)...(461): n = a,t,c or g
cggtccgcaattcccgggtcgacgatttctgttnttnttgnncttccttcgcgctccctcaatcgcaggaaaaaaaaaaaaaaaaaagaaaaaaaaaaaaaaaaaagcggccgctctaggggttccaaggttacgtacgcgtgcttgcggcgccatagctcttctatagggtcccctaaattcaattccctggccgccgttttacaacgtcgtgattgggaaaaccctggggttacccaatttaatcgccttgcaggacatccccctttcgccagctggcgtaaaagcgaagaggcccgcaccgatcccccttcccaaaagttgcgcagcctgaatggcgaatgggacgcccctgtagcgcgcattaagcgggcaggtgttggggttaagcgcagggaccgttaaacttgcagcgcctagccccctcctttccttttttcccttccttctcgccaggtcgc

SEQ ID NO: 160 - DNA, 2970 bp, Homo sapiens
atcaaggccctgggctggaggaagacatcccagatccagaggagctcgactgggggtccaagtactatgcgtcgctgcaggagctccaggggcagcacaactttgatgaagatgaaatggatgatcctggagattcagatggggtcaacctcatttctatggttggggagatccaagaccagggtgaggctgaagtcaaaggcactgtgtccccaaaaaaagcagttgccaccctgaagatctacaacaggtccctggaggaagaatttaaccactttgaagactggctgaatgtgtttcctctgtaccgagggcaagggggccaggatggaggtggagaagaggaaggatctggacaccttgtgggcaagttcaagggctccttcctcatttaccctgaatcagaggcagtgttgttctctgagccccagatctctcgggggatcccacagaaccggcccatcaagctcctggtcagagtgtatgttgtaaaggctaccaacctggctcctgcagaccccaatggcaaagcagacccttacgtggtggtgagcgctggccgggagcggcaggacaccaaggaacgctacatccccaagcagctcaaccccatctttggagagatcctggagctaagcatctctctcccagctgagacggagctgacggtcgccgtatttgaacatgacctcgtgggttctgacgacctcatcggggagacccacattgatctggaaaaccgattctatagccaccacagagcaaactgtgggctggcctcccagtatgaagtgtgggtccagcagggcccacaggagccattctgagtttctggccaaacacattcaagctcacattcccttttgtgtctccagatcctatgatttcatggaaggggaccctcccacccaccgccactgccaaccaagacatagctcagtggtcaagacttgggcttgggagtcgggatcctgtaacgaatgtcacttgaccgctttctttttttatgaaacagtctcgctctgtctcccaggttggagtgcagtggcacgatctcggctgactgcaacctccacctcctgggttcaagcgattctcctgcctcagcctccccagtagctgggattacaggcgtgggcccccatgtccagctaatttttatattttcgctctgtctcccaggttggagtgcagtggcacgatctcggctgactgcaacctccacctcctgggttcaagcgattctcctgcctcagcctccccagtagctgggattacaggcgtgggcccccatgtccagctaatttttatatttttagtagagacagggtttcaccatgttgtccaggctggtcttgaacccctgacctcaagtgatccacccacctctgcctcccaaagtgctgggattacaggtgtgagccaccatgccaggccctcttaacctcttcaagtctgttttctcatctgcaaaacagaggtaataagatcagtatcttcttaatggaagcacctgggctacatttttttcattcattgttatcataaatgaggactaacctgtctcccgttgggagttttgaacctagacctcatgtcttcatgacgtcatcactgccccaggcccagctgtgtccctacaccagccccagctgacgcatcttctttttctgcctgtagagatggttacaatgcctggcgtgatgcattctggccttcgcagatcctggcggggctgtgccaacgctgtggcctccctgcccctgaataccgagccggtgctgtcaaggtgggcagcaaagtcttcctgacaccaccggagaccctgcccccagggatctcttcacatgtggattgacatctttcctcaagatgtgcctgctccacccccagttgacatcaagcctcggcagccaatcagctatgagctcagagttgtcatctggaacacggaggatgtggttctggatgacgagaatccactcaccggagagatgtcgagtgacatctatgtgaagagctgggtgaaggggttggagcatgacaagcaggagacagacgttcacttcaactccctgactggggaggggaacttcaattggcgctttgtgttccgctttgactacctgcccacggagcgggaggtgagcgtctggcgcaggtctggaccctttgccctggaggaggcggagttccggcagcctgcagtgctggtcctgcaggtctgggactatgaccgcatctctgccaatgacttccttggatccctggagttgcagctaccagacatggtgcgtggggcccggggccccgagctctgctctgtgcagctggcccgcaatggggccgggccgaggtgcaatctgtttcgctgccgccgcctgaggggctggtggccggtagtgaagctgaaggaggcagaggacgtggagcgggaggcgcaggaggctcaggctggcaagaagaagcgaaagcagaggaggaggaagggccggccagaagacctggagttcacagacatgggtggcaatgtgtacatcctcacgggcaaggtggaggcagagtttgagctgctgactgtggaggaggccgagaaacggccagtggggaaggggcggaagcagccagagcctctggagaaacccagccgccccaaaacttccttcaactggtttgtgaacccgctgaagacctttgtcttcttcatctggcgccggtactggcgcaccctggtgctgctgctactggtgctgctcaccgtcttcctcctcctggtcttctacaccatccctggccagatcagccaggtcatcttccgtcccctccacaagtgactctcgctgaccttggacactcacccagggtgccaacccttcaatgcctgctcctggaagtctttcttacccatgtgagctaccccagagtctagtgcttcctctgaataaacctatcacagccacaaaaaaaaaa

SEQ ID NO: 161 - DNA, 1005 bp, Homo sapiens
aaggatccttaattaaattaatccccccccccccccccggctttcccttcgcggtgcccactccactccttgtgcggcgctaggccccccgtcccggtcatggccatgctcagggtccagcccgaggcccaagccaaggtggatgtgtttcgtgaagacctctgtaccaagacagagaacctgctcgggagctatttccccaagaagatttctgagctggatgcatttttaaaggagccagctctcaatgaagccaacttgagcaatctgaaggccccattggacatcccagtgcctgatccagtcaaggagaaagagaaagaggagcggaagaaacagcaggagaaggaagacaaggatgaaaagaagaagggggaggatgaagacaaaggtcctccctgtggcccagtgaactgcaatgaaaagatcgtggtccttctgcagcgcttgaagcctgagatcaaggatgtcattgagcagctcaacctggtcaccacctggttgcagctgcagatacctcggattgaggatggtaacaattttggagtggctgtccaggagaaggtgtttgagctgatgaccagcctccacaccaagctagaaggcttccacactcaaatctctaagtatttctctgagcgtggtgatgcagtgactaaagcagccaagcagccccatgtgggtgattatcggcagctggtgcacgagctggatgaggcagagtaccgggacatccggctgatggtcatggagatccgcaatgcttatgctgtgttatatgacatcatcctgaagaacttcgagaagctcaagaagcccaggggagaaacaaagggaatgatctattgagagccctctctcccattctgtgatgagtacagcagagaccttcctgctttttactggggactccagattttccccaaacttgcttctgttgagatttttccctcaccttgcctctcaggcacaataaatatagttataccactgccaaaaaaaaaa

SEQ ID NO: 162 - DNA, 1167 bp, Homo sapiens
  misc_feature (1)...(1167): n = a,t,c or g
caagggcccttgtcatggtccgtggcctttatatgcggcttattgtgccaaaggtgcattgctangggtatatcccacattcggtgggaaacccggaaataccgcctttgagtggaggtgaatacgaggttgcgcaagcaacacggaccgaaggcaaggcaagtcagttaagctaaggatcatgaacttaacctctataaaaggggaagggccgccaacaccgggacgcccacttgtctgctaatacaattcttttttttttgaggtttgcagctattttatttacaagtatacatttaacacaatgaaataaacactgatatactgaagcctagttaatagtagtgtaacaatatgcatcattttgatgattacattattttaaacaacaaactacactgaaaaattaatgccgataaaattcttggtcataatattaagaaatacaatatataaattgaaaatatgattgcttaaaatttgaaaatggaagtgaactcatttggacagactcagagttaacataatctgaagggaggggagctctgacccaaatgatatctttcaggttaacagaagaaaaaaagaagcatagtttatcttcaaggagaacgggcagtttgcttcttcaggtagaatatattcccagtgtcctcaggctttgcagcagaatcacatcaccgagcatgaagacttgccttgtgaagctgccccgtccattttttctgcctccaaaattatccttcgaaaaacatccacagcagtctgattttctttagcagaagattccaaaaaagctgcattccaagattctgccaaagctttcccttcttcataactgatcaccctttccatatgcaggtctttcttattcccaaccaacataataggtatttgtactttcccaccatatccaacaatttgccatggataactttaatcacttcaaaacttttgattgatggaacagaatacacaagaatatttgcttttatattttttgggtgtgctcgaagaaagattaatatttcatcctgttccaggaggttatataagaaatgtcactggtacttataatctaagacttgtaggatcaaaacccttcactggcttgacaatgacactgggaataggcgctttatgatcaaaaaatttctttgtgtacac

SEQ ID NO: 163 - DNA, 2754 bp, Homo sapiens
gttgttggccacagcgtgggaagcagctctgggggagctcggagctcccgatcacggcttcttgggggtagctacggctgggtgtgtagaacggggccggggctggggctgggtcccctagtggagacccaagtgcgagaggcaagaactctgcagcttcctgccttctgggtcagttccttattcaagtctgcagccggctcccagggagatctcggtggaacttcagaaacgctgggcagtctgcctttcaaccatgcccctgtccctgggagccgagatgtgggggcctgaggcctggctgctgctgctgctactgctggcatcatttacaggccggtgccccgcgggtgagctggagacctcagacgtggtaactgtggtgctgggccaggacgcaaaactgccctgcttctaccgaggggactccggcgagcaagtggggcaagtggcatgggctcgggtggacgcgggcgaaggcgcccaggaactagcgctactgcactccaaatacgggcttcatgtgagcccggcttacgagggccgcgtggagcagccgccgcccccacgcaaccccctggacggctcagtgctcctgcgcaacgcagtgcaggcggatgagggcgagtacgagtgccgggtcagcaccttccccgccggcagcttccaggcgcggctgcggctccgagtgctggtgcctcccctgccctcactgaatcctggtccagcactagaagagggccagggcctgaccctggcagcctcctgcacagctgagggcagcccagcccccagcgtgacctgggacacggaggtcaaaggcacaacgtccagccgttccttcaagcactcccgctctgctgccgtcacctcagagttccacttggtgcctagccgcagcatgaatgggcagccactgacttgtgtggtgtcccatcctggcctgctccaggaccaaaggatcacccacatcctccacgtgtccttccttgctgaggcctctgtgaggggccttgaagaccaaaatctgtggcacattggcagagaaggagctatgctcaagtgcctgagtgaagggcagccccctccctcatacaactggacacggctggatgggcctctgcccagtggggtacgagtggatggggacactttgggctttcccccactgaccactgagcacagcggcatctacgtctgccatgtcagcaatgagttctcctcaagggattctcaggtcactgtggatgttcttgacccccaggaagactctgggaagcaggtggacctagtgtcagcctcggtggtggtggtgggtgtgatcgccgcactcttgttctgccttctggtggtggtggtggtgctcatgtcccgataccatcggcgcaaggcccagcagatgacccagaaatatgaggaggagctgaccctgaccagggagaactccatccggaggctgcattcccatcacacggaccccaggagccagccggaggagagtgtagggctgagagccgagggccaccctgatagtctcaaggacaacagtagctgctctgtgatgagtgaagagcccgagggccgcagttactccacgctgaccacggtgagggagatagaaacacagactgaactgctgtctccaggctctgggcgggccgaggaggaggaagatcaggatgaaggcatcaaacaggccatgaaccattttgttcaggagaatgggaccctacgggccaagcccacgggcaatggcatctacatcaatgggcggggacacctggtctgacccaggcctgcctcccttccctaggcctggctccttctgttgacatgggagattttagctcatcttgggggcctccttaaacacccccatttcttgcggaagatgctccccatcccactgactgcttgacctttacctccaacccttctgttcatcgggagggctccaccaattgagtctctcccaccatgcatgcaggtcactgtgtgtgtgcatgtgtgcctgtgtgagtgttgactgactgtgtgtgtgtggaggggtgactgtccgtggaggggtgactgtgtccgtggtgtgtattatgctgtcatatcagagtcaagtgaactgtggtgtatgtgccacgggatttgagtggttgcgtgggcaacactgtcagggtttggcgtgtgtgtcatgtggctgtgtgtgacctctgcctgaaaaagcaggtattttctcagaccccagagcagtattaatgatgcagaggttggaggagagaggtggagactgtggctcagacccaggtgtgcgggcatagctggagctggaatctgcctccggtgtgagggaacctgtctcctaccacttcggagccatgggggcaagtgtgaagcagccagtccctgggtcagccagaggcttgaactgttacagaagccctctgccctctggtggcctctgggcctgctgcatgtacatattttctgtaaatatacatgcgccgggagcttcttgcaggaatactgctccgaatcacttttaatttttttcttttttttttcttgccctttccattagttgtattttttatttatttttatttttatttttttttagagatggagtctcactatgttgctcaggctggccttgaactcctgggctcaagcaatcctcctgcctcagcctccctagtagctgggactttaagtgtacaccactgtgcctgctttgaatcctttacgaagagaaaaaaaaaa

SEQ ID NO: 164 - DNA, 6708 bp, Homo sapiens
ttttttttttttgtgtttaagagtttattaggataggcacataacagaaagctcaaaggacaacaaagctgcaccttcctaaaggctgaccctcaaagcaccattttgttagaactcagaggagaagctcgatctctgagccttccctcctcacagtttgggaaacatgcacaggatgaaggtaaatcctgcatagaaatcttgtaattccagaattagtcaaacaaatttgaaatacacacatttaaaaatacttacattctcatttagcgttcatgaagtgattactgacatttacaattacatctgacatcacagagcaagcctttgcagggatctaattcaagcttaagccaaatctatgcaaagaacttcagctcagaggaatagtgggcaaaatctgctgaaaagaactgcttgccaccttgcagataagagcaacagcacaataaagggattccagagcttctacctaaaatagaagggcattatctacaagaacagaccaaaacacaatttatttttaaacaagcccttcagtgagtatttgtctcaggaatctagtatgaaaatagtgtctttgattagtgaatatatggagaattcggattatcatctctatttttagttgagaaaatgcacaaaccatatagatttaaaccatgggttttgcagccgaagtagagacagatgttttctgggatcatatctcagattcccaagctaaagctattgttcaaggtgatggaaatatgtagggggcattaaaccattttgcagctgctagaaagctgtgttttcctgttttcctgatttagacaatggagaagctaagaagagaaataataggaaaggctttcctatgttagttttaaaaagactgtgttatttttaattcaatttttttttgtcaaatctcatctctgttctcctagttttcacagaaatatttacaggaataaaggttgaaacaaaagtacctaatgatcatctccatccatcgaaagattgctcagggataagacactcaaacaagggcttgtgatgaggatggaaaagacaaagcaacttgaagagaaaaaaaaattcttttaaactcagttcatcctgcaaaatggacataacacatgcatataaaggtttgactttttaattccacttttttgcctgatcgcagggaagatggcatgtggctggcccttcctgaagccttgctcctccaccactggctaacagacaggcctccaggtggccttgcaaggccgacagtgaccgcagcccacttccccacatccttaatcagagcctcatgcagttcatccccacattacccaaacataacgtcgtagtgctacacgtagatgtgttgcatcatgatgctatggcaatgacgatgacgcttaggtgtgtgggccaccgaaggcagagaccagatgtggttggtcttgcctggaagccaagctgttgagcaggggtggagtccctctacagaggatgctcaccaagttctaatgcattgtcgataactgtcctgccctggtttttctgcattcctcagattatctgtgggaattgtcctcctgcatcctttctcaaatgacaaagaagaaagaaagagcagtgatggcacctgaaattcaggaatgagtaggcatggcgagctgggtgtgtgagatgttctctctttacattgtctgctttgagatgtgggatgaggggagggagagagttggtcctgaatatattcagttttttccaagagtctcccagaattattgacctatttggacaacaaatcttcattgtcttggtgtccatctccaagtgaaaacttcccccgtccccatggccctggcttgttctgctgctgaacaggtcacctgggcagaaacactgtgtctagcgagaagttagcaggtggcagggtgcacctctccccatactgtgacccttggattccccactgtgccacgcccgagcaagctggggcccctcaggacaaggacgatttgttaatggcctcttggccggtgggcatttgtttacccactactgtagccccaagatcccccaaacaagaatttccatgcttcaaagtaacagcaaaaataaacaggagaataaagcacgtgtttgagcccagtggtttccatcagatgcacaacctgagctgtctggttgggttgctggctctccccccgtggtgggagtggtgtgcaagagaaagcaccacccagcaggagagggacccagcctgccagggaaggttttgaggaactggattctttatcacccatttctccccttgtgggttccacagaggggttccatgacctccctgttgttgagaacagggctgcattcagagaacagacgatgggcctgggctgtgagagcaatcagaacactgtgaaaataggagggctcgttggatcccaggaatcatacacagactgcgttggggctgtgggaagccaaggacagaaatgtctccttcaccccaaatgataagggcaaggattttcaaggcccagagggagaaatgttgcatttgcatttatttaagtgctgatgttggtcagcagcgcatccagccatgtctttagaatcctctgaatggccagacagatggctgctctccacaccacagactgcccagcttcacacatcacctagagtctcgtggccaaggaagttttgccaaatggacacagcctttgtctcccttaagtgttaaacaccagagttccaactgaaaactggagaccatgagatgactttaaaaagaagttccaaatgccccatcgagccgcacaaaacctccatctttcctttcacttcccctgcccctttagttttctattaaaaacaatctgaaccatagcatctatatttcaaaactggcaagagtattaaccctgcaccttgtggcccttcaaccgctccagagtgtcacctcagagaccgatgcattgctaaggcaaaaccagaaacaccctttctctgaggctttggggccttggagggagacacatttcctctgtctgttctcctgcacagtggtggtaaaaagcccacaggagacatgaggcctcccagagatactcaggtaacttctagtgactctgaccatcggtgacccccaggaatgtgttccagtgccccaggcagaatggtgccgtgtctctgtgtgtgtgtgtgtgtgtgtgtgtgtgtgtgtgagagagagagagagagagaaagagtgcacactatcgactgcattatcatagggagaaatatttgcaaatgtaacttttaaaatgaggatataatttaaatggctttgagcagtttttgctgtaaaaatgattttagttagtcatctctttccctcttccttccctccttacccccaattttaaggaaaagagacagagaacaaaagttccttaagcaaactgcctgactagctccctacttggtgtgtgcgccacccacacttcaggatttaaaatctcaggatgctgcatcaactgtggactatgaactgtgctaaaatgctttaaaatgacaactttcaaaacacagtgcatcatctcccgttcacacatcctttaggaaacagcctgatggaactttctgcagggcttcctctgtctgagctcggagcactggcattccgggcaggatgaagtggaggcggggccacaggcagggtgtctgaggcctgccctggctcaaagacaggttgtccttgaatttgtttccttgttagtgttgatcacatccgtagtcaagtgtgtggtaacctcagtacatttggatgaattaattcaagtatctgtgaacaaatccctggcctctctcgccctagccccgtagattatgtgacttcacaaacacctgtaatgcacttcaagcaacttttctcatatttttcaagcttcctttgcaaataaacccaaggctattagaaatgtaagaactaaagaggcacttcctgcctccttgccacctaagaggttaattgcacttctggccattctggaggatgtcaacagtatcacatttagcaagacttgtgctggcgaaatggaggaatgcaaatgtaaagaaatgtttccagtccgaacatgttccctttgaccaaaaaaccagatcttcttacctaattgaataattaattgatttagttttcatcctaggaagagaaacaaatcatttcaatcctaatcagcatgagcaactcaccttttcctcttagatggtggaagtgagcagagaagatattcaggggagccccttagccccagcctcctcacaccctgatccggaattggtcacattggaatttgaaaagggagggggagtaacaatcattatagagtcacgaaatccccaccgtggcacgccaacacacagcttccacttcaggaacatcaaacacccgtagaaaatacctgcatgttccaaggggcctttaaggaggagacttacaattgtttgctaagattccagtccagtctttcaaaaaaatgtgggtgcccctttggaatggggagttcaaagctctgaggatggtggctggtgactctagtgtctctagggccacctcactttcagcagtctgtcccaggtgtcggactgtactggttctccatggccctgctctcagctcgctctggaacccaggagtaactgtctgccgcattctggggcttcttctccttcttctcctccctcttcgctctccgcttgcgatagaccagtagccccagagccagggccagcaggagtaggatggccaccacggtgcctaggatgtagaataaaagcagcttttgcccgtcagtgccatcgttgttttgtgtggccacggaggagtccccacctgcaggctcctgggggccagaggcagctgtggcgtgatggatgctgggctccctccagacgcctgaggacccactgggggccagcatcttgagtggggcagatgtgatgggggcgtcagatgacagcgaaggtctacttgtggtgggtgtagccttgggggtgccctcggggccccttgtgggactggctgttgcagcgcggggcacggtgctcccttctttctctcctttgtcctcctcatcggggggcccagatggtggtcccagagacacaggccccatggtgcaagagaccccatttggggccagcacccagcctggcaggcagccacagtggaaggacccttgtgtgttgaagcacaagctgtcgcagagggggccccccgggcccacacactcatccacgtcctggcactgagtcccgtcctccccggccaggacgtagccctcctcacaggagcagtgaaatgagccatctgtgttggtgcagccctgggcgcaaggcgagcgacccagagcacactcatccacatcctgacaggccccctctccaggaccgcccggctcatagccaacccagcattcgcagcggaagcccccaggggtgttgacacactcctgggcacagggggagtcctggcattcatccacgtccacacagtccagctgactcgagtccagctggtacccttgggggcagcggcacgtgtagtttttcccatggggtcccaggacgcacgtggcccccccacgacatgggctggagctgcaagggtttcgagaggcacaggtcaccaggtcatccagcagccggaatcctggtcggcagccgcagaggaaggagccatcccccccttcaaagcagtcctggtggcagcccccattgttgaagttgcagccatacttggggctgacacagagggggcccgagctgccccagtcgaacacatcgggggccttctccttgcacaggaaataatgactctgagtctcgtccttgtcaccttccccacaggctacattggccgcagaggcaaagggcacagcctccaaggaggaactggtggtctggaagggggtggtgtaggtcacctgacctgggccccccagggccagaggccggcacatgcctttgaagctgaacttgcacacgaagccctcaatgttacttccgggggagcctgggctcccacaggggccctcagaccacttgggcaggcggttgggaaggagcggctgggacaggtccagcagcagagacacacagcgcttggagatgcacgagttccggagctccttgtgccagttagagtaaggcgtgtcctcccccccgcccacccagctgaagcccttcagcggcagactagggtccaggcacttgcccttctctcgctggagcccaatccagaacttgctcatcctcgccgtcagggctgcctcccgcctcaggagctgggccagtactcgctggacgtgctgggcctcctccttgctcttcacagtggccaggttgcccccgttctggttgcagtggttctgggcctcggcagcgctcagcttgcccgagtgggccgtgtagcaggcggtccccacgcagaccaccgcctccgtgtcagctcccgtccccgccccgggctgggtcaggagcagcagcagcagcagcagcaggcccatggaggtggccatcccggtctctgtgtggccctctgcgggaggcgagaagcccagcggcgacaggagcttctatctcggctcccagctgggccccaaggggagctgaggggtgagctgcagccactccggcgcagagaaggacacaaaggctgagggcttt

SEQ ID NO: 165 - DNA, 2815 bp, Homo sapiens
ttttttttttttggtttcatggtctgatttattggtggtgaatacacaggggcaggcccaggacaagcagcttggctactccccctctgctggctgcccgaccggcagagggggctccatgtggcaggagctaggctcccaacgcccactgttcttgccaccctctgggctcccaggctgggctccgctaggctcctgtctcccctgccagttagttaggcaagttcaggtgtggaggccgcagggatagatccaggtggctctgggctgggccctcttctcttcccagcggggaggtgctgttggcctggctgggctggcctgaatctgtttcaagttctcccttcctgcccagctcagttcaccagtgctggatccaggttcaaatgacagggacttgggtttttacaacagcgtggcaagtggtctgtctcctgggcagccatatcccagacccactgggttgaaggttctgtggggtggagggaccccaaggtgttccaagccagtggctgcactggcagcaggcctctgagagggaggcgggaagggtaggcgcggagagcaggctccattctgggtcgagtggaggactggctcccagggtgagttcacaccagtgctcccagctggcggctgctcagtctctcctgctgggcgagcgcggggggccggggctatgccatgctgctggtggagcagggggtgctctgggtgctcccgatgctgtggttggtgctgctgctctccgaggaggccggggcagccaccgccaccacgggctcccgcttgctgggggaacgcgtgtgcgagtagatgtaccagagtgcagcagtgagcagggccccgatgaggaaggcaccaaaggtgatgcccagcacggcgggcaggacgaggcctttgcttgtgcaaccagacaggtcagggctgatgatgttcaagcgcatgaagacagtcctatggacttcctggtcttgagacccggtcttgggacgcagggctaccgtgcagctgagggtgccggttttgggtatgggtactgtgtagaagtggaggaggaagctgaagcgcgggtcaccctcggggcttggggacagcaggctcacacagttgcccttggccgcccggccctggatgagttccacggtgcctccctcaggccccaagtccaggtggcagctgtctaactggagcaggaactcggagacggatggggacactctgacctgcacaaagctctgctgccccggctcgatggtgttggaggcctggaggaagtgtgggctgaggtagaggcccagctggaaagagaggctgtccatgttgaggcagtgcacctttttccgctgtggtgatgagctcgacaggatattgaccaccgcctcattgctgatcatacttgctgacacctgcatgccacagctggagtaagcactgcgcaagacaaacttgtcacccctgtcctctgcctcacagctggggtcccagaaggtcaggcccgtgatggtgcacttcaaatgcgcaacaagctctttctttagtaccagggtcatggcgtcgtcggcacactttgtctggatcaaggacatgagcagctccgggctacaagtgtccttgggaggagtggtctggatcggtgcgggtgaggtctgcagcctaccaccgcagctggaggcatgaagtgagacaatgctggccagcggtagctccacgaaggatgccacaatgctggcattgagcatccgggcctcccccaggaggccttgaggtgtgtctgggagcttgaagccacgaatgtttttctctggaaagatcttgaaggagtattctccagtggtccagatctgcatgttgtggttggcgtcgatgagccaggacacgtaggggggaccctgcaggatgaggacggcatcgagatccccgggtgcgcagctcagttccaccttcaccgtcaccgtccggggcccggccgagtggcccggcaggaccctcaggatgtgcgcctccttgtggccggccacgccttccaagtggcagccccggaccaaggctggagtacgcggccgccactcgagcgtgcggcccatgtcctggctggcttccagcatgcagaaggacagtgacccctgggcttggcccagtcggaggaggatgctctgggggtcattcagctcagcagcagaggtgatggggcccctctcagctgcccactcaaggatctgggtcttggggaaggatggcagctctgtggtgttgacccccgggggctcttggaaggtgaccaggctggaattgtaggccaagtgcagtgggattcccagggcctggagatgcaggaagacactgctgtttacactgaggaccagaagcacctctcggggccaggtgccattttgcttggatgcctggagagtcagctccagctgtgacgggcccgttgggaactccaggaagaggacatggacttcaaggatggcattgggggcctgagccacgcagcccttcgagacctggctagtggtatatgtcacctcgtccctctcggggcccacaggctgaaggtcacaatggactgtttctgcaagacttgtggggctgaggctgcagctggccagcagcagggcaacagccagagggagcgtgccgcggtccatgctgtccacgtgggggcctgtgcgctgggccttatcctgtgtccagtggcagggctgcgggcgggcaccggggccggcgtgggctcgcacggggacccgaggggagcaggcggccggagcgacggcgtccctgctccagccttctggggtggcctcgtgcc

SEQ ID NO: 166 - DNA, 2360 bp, Homo sapiens
gcgggagacagaagaaaagatgaggcgagcaaaactagccaaggagaaggcagagaaggagcggctagagaagcagcagaagagagagcaactcatagacatgaatgcagagggcgatgagacaggtgtgatggacagtcttctagaagccctgcagtcaggggcagcattccgacggaagagagggccccgtcaagacaacctcttgtgcccctgggaagtagaggaggaggaggagacctttaaattgccaacaggaaggccgggtgtgcagtcacatctctgctagcttcggagctgaccaaggatgatgccatggctgctgttcctgccaaggtgtccaagaacagtgagacattccccacaatccttgaggaagccaaggagttggttggccgtgcaagctaatgtgggtcctgtgaccgcggcagctcctcagcggagccgcagactgtcctgccctgcagcatgtgcctaaaggctcaaggggatattcctctggggtggccactcccaccaccctgaccctgtctttctctctggcctgctgctctctcaacatcacatacagcttcagctgcctggaggccagaaggaaagggcagtgcaggggaggcctgagcccgacttagccagccctggctgttgtattaccaaagcagggtccatgtttgctgccttaaccctgtctcctctctgttactcagagggcctcatctcagacaaggcccagcctgctttttctcagccctgactttctaatgggctttcccccctaggtcagtcttgctggatttgtgcttttcttttgtggtttctctggccctgagaatagcatggggcttgtaaacctttgggctagatccctcctttcattgctgttgtctctgctcttccctctcctggctgtggttatttattattagtggtgtggcactgggagctgctcctaaggaagcagggagcaaatcccacctttaccccaccttcctgggaaaggcctccaaagcaaaggatctggaccagtttccctgctgtgctgtggcccaggccagagcctgtgggcaggcaggcagggcatagcgacagtgtgggacctgcccccagcttctgccacgctttatgcccttgcctctctggacgctctgcaccaaccccaggctactgagccaccttccctcctcatgccttccctgagctttggtgcatctcatctggactatgggttgtactgtgaccatcccaacacctcaccctctgtctacaaggaaatgggaggtggagcctcctggctgagaaattgttttgcaaatggatctatttttgtatgaaaaaaaaaatttttttaaagaaaactgttccttccccctttcccctccataatgtaagaagctttggtggcaggttacagagttctgggatttcttctcacaggcccaatcctgaatgtgcccctggaccttctggacccttgagtccaaggcagatcctctctcccagggaatccgacacaggaggaaccccttctctggttgagctgggccaggcctaagagtagcaggaactctaagaccacagagttttttataaatgtataaatgtatcaagccaaatgtgcagatgctaactggacattctggggaactgggcaccaggagtgccttcatacactgtaccccagctctcttctaaaagagaagtgggtgggcacactgaactgtttggtggccccaaccacaggaagctgcaattctctggcttagggtgatacttttgccctccttgtgcccctctcagctttccatccccagctaggaagaaagaatggcactcttgggcttggcccagaattagagttattagagcaagagagagcttaggaagcatgagggcaactatagtgaggccttattgccaggagggagggttttggttgctggcgcttgtgtataaaggggcaagagcagctcctttggactattcctgggaggactctgatgcagggcgtctgttgctcccctgggtcacctcctccctgctcgctgacatctggggctttgaccctttcttttttaatctacttttgctaagatgcatttaataaaaaaaaagagagagagagagaggtgtgagggacaaaatgcaaacctatttcccttgcctcataggcttctgggatgtcatcacctccagtttgttggttttgtttccaactgttaataaagcattgaaaccagctaacataaaatatatctccaccccccctccccacacacccaacaaaccctactaacacacatccatccatccaccccatatctacaacccccctaaatcaccctcactccccccccaccctt

SEQ ID NO: 167 - DNA, 3280 bp, Homo sapiens
ggccgcgggcaccagagtgccgagcccaggacgcccccggcccaggcccttggggtggacaagtccttcacttctcgccggagtgtgtggaggagcgatgggcagaaccagcacttccctcaggcactagacctgtcacgagtgaacttagttccctcctatactccttcactctaccctaagaacacagatctatttgagatgattgagaagatgcagggaagcaggatggatgaacaacgctgctccttcccgccgcccctcaaaacagaggaggactacattccatacccgagcgtgcacgaggtcttggggcgagaaggacccttccccctcatcctgctgccccagtttgggggctactggattgagggcaccaaccacgaaatcaccagcatccccgagacagagccactgcagtcgcccacaaccaaggtgaagctcgagtgcaaccccacagcccgcatctaccggaagcactttctcggcaaggagcatttcaattactactcactggacactgccctcggccaccttgtcttctcactcaagtacgatgtcatcggggaccaagagcacctgcggctgctgctcaggaccaagtgccggacataccatgatgtcatccccatctcctgcctcaccgagttccctaatgttgtccagatggcaaagttggtgtgtgaagacgtcaatgtggatcggttctatcctgtgctctaccccaaggcttcccggctcatcgtcacctttgacgagcatgtcatcagcaataacttcaagtttggcgtcatttatcagaagcttgggcagacctccgaggaagaactcttcagcaccaatgaggaaagtcccgctttcgtggagttccttgaatttcttggccagaaggtcaaactgcaggactttaaggggttccgaggaggcctggacgtgacccacgggcagacggggaccgaatctgtgtactgcaacttccgcaacaaggagatcatgtttcacgtgtccaccaagctgccatacacggaaggggacgcccagcagttgcagcggaagcggcacatcgggaacgacatcgtggctgtggtcttccaggatgaaaacactcctttcgtgcccgacatgatcgcgtccaacttcctgcatgcctacgtcgtggtgcaggctgagggcgggggccctgatggccccctctacaaggtctctgtcactgcaagagatgatgtgcccttctttggaccccccctcccggaccccgctgtgttcaggaaggggcctgagttccaggaatttttgctgacaaagctgatcaatgctgaatatgcctgctacaaggcagagaagtttgccaaactggaggagcggacgcgggccgccctcctggagacgctctatgaggaactacacatccacagccagtccatgatgggcttgggcggcgacgaggacaagatggagaatggcagtgggggcggcggcttctttgagtctttcaagcgggtcatccggagccgcagccagtccatggatgccatggggctgagcaacaagaagcccaacaccgtgtccaccagccacagcgggagcttcgcgcccaacaaccccgacctggccaaggcggctggaatatcactgattgtccctgggaagagccccacgaggaagaagtcgggcccgttcggctcccgccgcagcagcgccattggcatcgagaacatacaggaggtgcaggagaagagggagagccctccggctggtcagaagaccccagacagcgggcacgtctcacaggagcccaagtcggagaactcatccactcagagctccccagagatgcccacgaccaagaacagagcggagaccgcagcgcagagagcagaggcgctcaaggacttctcccgctcctcgtccagtgccagcagcttcgccagcgtggtggaggagacggagggtgtggacggagaggacacaggcctggagagcgtgtcatcctcaggaacaccccacaagcgggactccttcatctatagcacgtggctggaggacagtgtcagcaccactagtgggggcagctccccaggcccctctcgatcaccccacccagacgccggcaagttgggggaccctgcgtgtcccgagatcaagatccagctggaagcatctgagcagcacatgccccagctgggctgttagccgggccaccccctctgaaggtgaaactgagcagatgaggccacagaagcacaaggggaaggtgccgtgtcaagcccaggcagacgagacctctgccctgaagaccaacaccagcccgtgggctgccccctgcctccccaccctccctatggcccacccatctgggctgtctctgcagggcagagccgtccagacctgggatcagggaagctgctggcatcgtccccacccccagcctgggggtctgggctggggcagggattgctcagtggaagcaggactgggggtctggcttgccccctccctgggcctccatcacccctgagcatccctctggactcagagggaacaaggtgggagagagagtttgagacagctccgtgtggagagcttagcccctggaggcagcacaaggaggatgtgatatgtgggggagtgagcactgggttgggagccgggtcctggtttccaatttgggttctgctgtgtgactctgggcaagtcactctccctctctgggcatgtctgctacaaatggacaagattatttcagaggtcactgaagactgtgattacatgcacctgccttagaaggtaggattttcttcccagggacctcctatcaccctaccctgcttcttgaggtccctggagccccaggtgggctgaggggcagggagccggctgtgcccagtatgcctcctggaccctccagttctgccacaggtctgccgatgccctgtccactgcctacacatgacagacaagtaaccccctcatgggggatggggacctacctggctcctcagccagcacccagcttaacccctgccatcccatgctgggccctccaggccaagagtctcagctggccgagagtccaggccttgcctcccccgaccgccatggagggggcagcccggcacagctgctgggagcccttgtgtgtctggtcacactttttaggcgtcacgccaaaggccagcctcctggccccaatacccattttggaagcccctgtggccgtgtggatgtcggtaacagttgtataaaataaattctatttatcgctattgtaaaaaaaaaa

SEQ ID NO: 168 - DNA, 2292 bp, Homo sapiens
ttttttttttttatagaaaaaatatacactttattttcaactagaaaggtgcaaacatgtaacttttggtcacactctcaacaaataaactgtccgaaaaacagtcatatcaaagtagaaacaaatgcttccaggtgaaaaaactgatcagctatatagagtcactcagtttttaataaaggccatttgttcattaaaagtgaggctaccacatttcctacctagaaatcagcctgccaaggacactgatgcctcccctttgcaaacaatctgttttgacggactgtcattctatctgagcagaatttccatataagtatccatttcatgctttgaacgatcagacaagctttacattctacctatggtgttcagaaattgaggctaacattgaaatatcaaagcattaaaaacaaaaataaaaaggcacaaacaactttaaattaacttagataactgtacatatatatatatatacacacacacacacacacacaatatttacaatataaattttaaaaaatctggcttgttacaggcaaattcacttgccacaagctgtccagtctaatcgacaggattccgattcctgaacagtgtcattcgaatcagaatgtcagagctgagtctgctgttctgacttaaggaacaacttgactcagtctcttgatggctggagaatgcacatcctagctgtcactggggctacaggcaggtcagtgagcacgctaaaattttccttctcaattacacttcaaatagcaggcatattactcgtataagatgctatctgatgatactaacctttctgctggtaccctcccactgctcctaaagccacaccttaatatacattctggtgctgtgtactaatgtagttccactgtcaagtcttaacattcttcaaaccagtgtctggggttgatagactatttgtttgacatggcacaatgttttgaattgggtgggaatcttttcccccagttagaaaaacagatttaaataacttgtgctactgaaatcatttttacggaaaaatgagatgtgaatcagttcaagttccagtctaatgagttaatgtctctcactctctggcttcatgccatgtctccgtacatcttcctgtagtacagcgattcaaagatgtcattgtctccgggacagttgtaatggcaggcacaggtcttgatgaacatcatgttcttcttcatgacctcgccgtcagggcacttgaactccaccggcagggtggtggttctgtggggggtgcagcatcggccgtcggtacatactccacagaatttagctcggtatgtcttcatgctggtgcagccagaaagctcaaacttgataggcttggagattttgggagtacggatgcactttttgcccttcttaatgttctcttccaggtcagcttcgcaaggcctgaccatgcacaggcggctctgcttctctagcctgcaggaggcgttgtcattggtaacccgggtggagatgcccatcccacaggtcttggaacaggcgctccactctgtggtctggaccaggcagttggctctaatcatagttgggtctgggccaaacgtgtcttccagtcggtaagccgcgagggcaggcccaaccacggtttggtccttgggctcgtcacacacccactcctcgcagcatttcccgggcagcttgaccctcctcgggaaggggcagtcagggctgggcagacgaacgtccatgctgcacaggggcatgcagcccaccgccccgtccaggcacgtgcactggtacttgcagctgctctggaaggactctccgctgcggtacaccgtaccaccgaagatgcagggagcaccatctttggcggtgcacacgccgatcttgcggttggccggggagccgaagtcacagaagaggcccttgtgcgggtcgcaggggtcgcgctcggtgcacagctcgcccagctgcttggcgcagacgcggcagcagccgcagccgtccagcacgaggctcacgcccgccgggcagcgcggcgccggctcgtccgggcaccggcacggcccgctgcagttctggccgacggccggccggctgcagagggcgaggaggaccacgaaggcgacgcggacggggcccatactggcggcggtcatggttggcactgcgggcggagcggagggcgcggtggcggcgagcggggagcgcggggcctggagcgctggcggtggtcggaggtggggaccgggacgcgccgggctgtcgtctcggggctgtcggccgggcggctccgtcactgga

SEQ ID NO: 169 - DNA, 1877 bp, Homo sapiens
ttttttttttttagttttataatattttattatcaataacaaacagctgctctaatgtgtctgtccagcagctgttaaagagtggaggacacccttgaccctaacaaggaaaacaaattaagcctttatgtacaagcaaatttagagctcttttaagtgtccaaagctattaattagtttaattaaggcattaaactaattctgaattaacatttttataaccaagaactaaaatgttcaaatttttttctagtacaaaaaaattaaatttgctttagttataaaagagctctgtcaatatacacaaactatatacttcagacattcacaaaaatgtgagcagaaggcttatcaaaagacatttaatacaattagttttcaacaaccccttggtggtccacatctacaaagatatccagcccaacccaaccccccttccaaatcccacccccacagaaaagcacatacttaccagaatttttagcaagtatggtttgggaatttttgtggtttttgttttttaaaaaaaggcccccagggcaagttatttacagtttaattgccactgtcaactgatctggaccttgatcgggaccgggacctctggcgatccacagatgctggagacttagatctacttgaagaaccacgtttctggctcttctcaggcacgggagacctactaacagaacgggacttgctccggctccggctcctgctcctgcttcttgaccggctgtaagayttgcgactacgggaacgggatcggctacgagacctagaggaacttctggtccgggatcgagacctgcttcttgacctactgtgccttttgctgccttcaattaatttwatttttctcccatttatttcctttccagaaagtttttcaatagcattctttaagtcaccataagaggcaaactcaaccaccccttcatttaatttaggtcggtgtgcatccgcaaacgttacttccccagcttgtctcatgaaatctttgagatcctgccagctgactcttgaggataaattctcaactataagacgattttctgttcttacaggtggagcatttctgaggaagaaaattcgtattcacaatggaagaaatgcaatgacagcacttgtgttcaactgtgggcaagttcaagccatcagatatcacaagccattctaatgacttccgtcaatagatttgtgttctatgactcatatagattcatcaagaacaattggctaacgtgggaatagaagaacagattatacggcaggtcccaaaatcatcactgctaatgactcctgaatcttaaatgctacccctacaataattgttcaatgcagccatccacccttcacataccgtctatcatttcgaggtctgcgactactaaaacggtcagagtatcgtcctctacctcttccacctcgtgaccgagccctagcatgttcaatagtaaccctttcactacagagttcttttccatcaagctcatacacagcatcatctgcatcccttggatcctcaaattccacaaaaccaaagcctcttttcagatcaatatctcttatccgtccatatcccttgaagaatctttccacgtccttctccctggccgctggatttagtctcccgatgaatacccgacagccactcatgatgtccggctagtacttcctcgaatcaactgcgctcattagacgccatcctccgcaaagagagcagccccggccgctcacgatctgagcggccatgaagaagcctcgatccgagaaggcttgccctcaaagtgagccactcacctaccggacggggtctttggcggctgagacccagacaggtccgtagtctgcgacggagtcgtcgacctccacgc

SEQ ID NO: 170 - DNA, 4081 bp, Homo sapiens
gagtccagccgctggtgcgcggagcggttcaccgtcttcggagcggttcggcccagcctttcgcccaggcgcccaggcccgctgcgcgcgtgcgtgagcgcgcctgcgccgccagggccgctgcaaggggaggagagcggccgcctcaggaggatcccttttcccccagaaattactcaatgctgaaacctctcaaagtggtattagagacgctgaaagcaccatggacgggttttatgatcagcaagtcccttttatggtcccagggaaatctcgatctgaggaatgcagagggcggcctgtgattgacagaaagaggaagtttttggacacagatctggctcacgattctgaagagctatttcaggatctcagtcaacttcaagaggcttggttagctgaagcacaagttcctgatgatgaacagtttgtcccagattttcagtctgataacctggtgcttcatgccccacctccaaccaagatcaaacgggagctgcacagcccctcctctgagctgtcgtcttgtagccatgagcaggctcttggtgctaactatggagaaaagtgcctctacaactattgtgcctatgataggaagcctccctctgggttcaagccattaacccctcctacaacccccctctcacccacccatcagaatcccctatttcccccacctcaggcaactctgcccacctcagggcatgcccctgcagctggcccagttcaaggtgtgggccccgcccccgccccccattcgcttccagagcctggaccacagcagcaaacatttgcggtcccccgaccaccacatcagcccctgcagatgccaaagatgatgcctgaaaaccagtatccatcagaacagagatttcagagacaactgtctgaaccctgccaccccttccctcctcagccaggagttcctggagataatcgccccagttaccatcggcaaatgtcagaacctattgtccctgcagctcccccgccccctcagggattcaaacaagaataccatgacccactctatgaacatggggtcccgggcatgccagggcccccagcacacgggttccagtcaccaatgggaatcaagcaggagcctcgggattactgcgtcgattcagaagtgcctaactgccagtcatcctacatgagagggggttatttctccagcagccatgaaggtttttcatatgaaaaagatccccgattatactttgacgacacttgtgttgtgcctgagagactggaaggcaaagtcaaacaggagcctaccatgtatcgagaggggcccccttaccagaggcgaggttcccttcagctgtggcagttcctggtcacccttcttgatgacccagccaatgcccacttcattgcctggacaggtcgaggcatggagttcaagctgatagaaccggaagaggttgctcggcgctggggcatccagaagaaccggccagccatgaactatgacaagctgagccgctctctccgctattactatgaaaagggcatcatgcagaaggtggctggagagcgatacgtctacaaatttgtctgtgacccagatgccctcttctccatggctttcccggataaccagcgtccgttcctgaaggcagagtccgagtgccacctcagcgaggaggacaccctgccgctgacccactttgaagacagccccgcttacctcctggacatggaccgctgcagcagcctcccctatgccgaaggctttgcttactaagtttctgagtggcggagtggccaaaccctagagctagcagttcccattcaggcaaacaagggcagtggttttgtttgtgtttttggttgttcctaaagcttgccctttgagtattatctggagaacccaagctgtctctggattggcacccttaaagacagatacattggctggggagtgggaacagggaggggcagaaaaccaccaaaaggccagtgcctcaactcttgattctgatgaggtttctgggaagagatcaaaatggagtctccttaccatggacaatacatgcaaagcaatatcttgttcaggttagtacccgcaaaacgggacatgatgtgacaatctcgatcgatcatggactactaaatggcctttacatagaagggctctgatttgcacaatttgttgaaaaatcacaaacccatagaaaagtgagtaggctaagttggggaggctcaaaccattaagggttaaaaatacatcttaaacattggaaagctcttctagctgaatctgaaatattaccccttgtctagaaaaaggggggcagtcagaacagctgttccccactccgtgttctcaaaatcataaaccatggctactcttgggaaccacccggccatgtggtcgccaagtagagcaagccccctttctcttcccaatcacgtggctgagtgtggatgacttttattttaggagaagggcgattaacacttttgacagtattttgttttgccctgatttgggggattgttttgttttggtggttgttttggaaaaacagtttataaactgatttttgtagttttggtatttaaagcaaaaaaacgaaaaacaaaaaacaaaaacaaaccttttggtaatgtgcactgtgtctttagccagggccgtgcaacttatgaagacactgcagcttgagaggggctttgctgaggcttccccttggccatgtgaaagcccgccttgttgcctgctttgtgctttctgcaccagacaacctgatggaacatttgcacctgagttgtacatttttgaagtgtgcagggcagcctggacacaagcttagattctctatgtatagttccccgtgttcactaacatgccctctctggaaagcatatgtatataacatgtgtcatgtcctttggaaacctggtcacctggtgaaaacccttgggattcttccctgggcatgactgatgacaatttccatttcatcagtttgttttgttttcctttttctttaaatcttggactttaaaccctacctgtgtgattcagtagggtttgagacttacgtgtgatactgacaggtaagcaacagtgctagcattctagattcctgcctttttttaaaaagaaattattctcattgctgtattatattggaaaagttttaaacaaccaagctaaagctatgtgaaagttgagctcaaagtagaggaaaagttactggtggtaccttgctgcctgctctgctggtagaattctgtgctccccgtgacacttagtacattaagaatgactacactgttcctcgtatgtgaaggaggcagtgctgactccgtgagtgtgagacacgtgctttgaactgcttttctattcatggagcactccatagtctcaaactgtcccccttatgaccaacagcacatttgtgaagaggttcgcagggataaggggtgcactttatagctatggaaacatgagattctcctctattggaagctaattagcccacaaaggtggtaaacctgtagattgggccttaattagcattgtactctaatcaaaggactctttctaaaccatatttatagctttcttaacctacacatagtctatacatagatgcatattttacccccagctggctagagatttatttgttgtaaatgctgtatagatttggttttcctttctttacttaccctggtttggatttttttttttttttttttgaatggatttatgctgtcttagcaatatgacaataatcctctgtagcttgagctacccctcccctgctgtaacttacgtgacctgtgctgtcactgggcataggacagcggcatcacggttgcattcccattggactcatgcacctcccggatggtttttgtttttttcgggggttctttggggtttgtttgtttgcttcttttccagagtgtggaaagtctacagtgcagaaaggcttgaacctgccagctgatttgaaatactttcccctgcgcagggccgtatgcatcctgccaagctgcgttatattctgtactgtgtacaataaagaagtttgcttttcgtttaccaaaaaaaaaa

SEQ ID NO: 171 - DNA, 1229 bp, Homo sapiens
ttttttttttttgactggaaagatgttttattactgaaacgtttacaagagaaagttgtttcaaagagcttacagatttagtcttacccacccaagagaatggcattctctttggctcagaccacaacaaaaacaattgagtgacttctgtctgctttttcaaacaaaacgttttctcacaggtctacattctctttaaaacaccactataaacacctggaaacggaaactaaacgtagacaaaacgaataacattgtgttgctgctgcacgtgaatacactttgtgcatgctaagtaaggggtataggctctctccctctctccctctatgtttcaagctatataaaaataaacaaatggcataagagcagcgctatggtacagaatactgtatttttttaaattttttttgtgctaaatgcagattctttttggccaaacgcaccgttttatttcccaataatctccatgagtttcctgttgctgtgagcttgctgtgctaactgctcggccctggccatttccaagacttcccggaggaggtggaaggtgagatccagggagatgggaggctcctcggaccgcctttctctctccggtgcctcctggtggccgccgagggcattcctagcgccgcgctccgcgatagccgcggggctgtcgagcgagcgccgaggcagcagcagctgctgcagcaacacgcggaaaaagttggcggtcgcctgttccggcgaagggcggctgccgctgcctccggcgaggagcgaggaggcgggcgaaaggggagcggccgggctcttgttgaggttccccaggcggaggaagtactcctctcccatgcggagcaggaccggccgagcctgcggctgctggggctgctcggactgcggcggcggctggaagaaatccaagggctgagggtgctgcggcgcctgccgagctcccgggaccggcccgcggctcaggagcgccctgcatggcgggcagggcaggagagccaccagcaggactcccgcggacacaagcagcggcagccgcatgttaggggcactcgcttcccaggcgcttcgcaggtgagccgggtgctgccgcctctctgcagagagacgtctccgggggctttctctggaggtagtcttcctttctctttactgttcccactctctttttctttctctcctctctttcccctcagtctctcaatggacttggtctctgagtttctccc

SEQ ID NO: 172 - DNA, 1105 bp, Homo sapiens
ttttttttttttgcatttcaatagaactagctttatttacttatttatttatttaaacaaaagaaatggtttaaaagcaaatgcatatatgtaccaagggatggacatgacctggtacttacaaaggagctgctgtgtcataatggaaacagcatattaggagaaaaatagtatttcgtgtgctgtctgcttgagtaatcaatctggagatgcaagttaaccgaaggtgctctgccaagccatcagcgtgagaaaaaaaaaccaccagaagttgcctccagataacgatgtagtggcagcatgataactggcatcaactcacggtcttctcattttccccattttctataattttcctcttcttttcatctatttttttcttgaagatgttatttcggtaaaactgaagctctttgatgctttcactaatgtcatcaagtgccctatgagaagcagccttctttggtgcaaattcatattcttctggataccagcgtctgcacagttctttaacagtgctcacatcaattattctataatgaagatgtttcatgaactggggcatgtatttgtcaagaaacttcttatcttcatgaactgaatttcctgcaagtggacagagccctggaggagtctgctgtcgtacaaaggacagaaattcatactctgcctgctgcaatgtaattgtactctccttcactgccttggtaaggccagacttcccgtgatgctccttacaccaatctgacatgctgtccagcaactcatctggttgttttataatcaggttaggaccttcagccaaaatgttgagatcagagtcagttatcagacaggccatctcaataatctggtccttctcaatgtccaatcctgtcatctccaggtccacccagaccatccgctgagccatgctctcccctgccgcccatggctgcgccaccttcgcggacacctcgggccccgaaccgtccgtgactcccacctacaccccgcaacagcctggagcccagggagccgcctagcatcacccgggaccagcagccacggccccagtctcgcagccggcgctggcgcaggcgcaatagtcgctaaacgtcgcccc

SEQ ID NO: 173 - DNA, 1983 bp, Homo sapiens
ttttttttttttgtggaaattaagaggattttattgacttttctatgttctttgagaaaatcattcacatgtaaaagtttgacatttgatatgagatttattcacactttacacatacattcttgattgtggggcagacaattgttcatttcaacaggactttcacatggtaacagtcacaaaattggcatactatattaaaaaatgaaatcaaacagctagacaaaaagtatgcagctttatgccaatttaaatctcaacatgcaccacccctcacccatgatctcagaattatctgctgtgagcttattaaaatattagccagagagtgtctgaggtcacaaatgatcgtttacaaaataaaacctcttttcctagagctacttgttttgttatagaaaaataccacaaataaaaattagtgctattcaaggtgttcatttcaaaatcacatatgatacacaagtttcaagccattgtttttgtgtctcacattgaaacatcacaatacatgatgtgaaactgatttactgattaaatgtaccttgcccagcttggaaaacccattgtctactatgtggactgcttacaaatgagagtgagttaaaacattttcagttattgggtacacttgtaatttgttcctcctcagaaacactgcttgagaaacatgacaaaatttgtatttcttcctgatacaagaaatttgtctaaaaatctgtgattataaaacagatttgttttttggttttttttagtaaagaaatggctaaattttttttgtggttggaatcttattttcaagatgattcagaattcaacgtggaccccttctggagggtggggagaagtggctaagtgttataaggtatactggacaacacggggtgtttcaaagaggacgacaaggcactgtcacaatcagtccaactgtaattctttcctttcttgtgattatgtaaattttaaagaaaagaggtttctcacaagctatatacagcagcttaaaacctcagtgtttctttttcacttgatacacaattaaaattaatttacgacaaatacttgtcacagaaatgtatgtaggcacatagaaactctacagctttactggaggggcgaggtcttcagtgggatcatgattctggattccatttcctgaataagtggaactgtgtaatataccaattcctcccagccatgtttgtgccatgctgcattccgtatgtcttccctggtctgaagatccctgtaagcccaaagatggtgcaccatgtacagctgcccaatctgagagaagaatcctccgacggcttcgttaccatcctgtctgaagcggattgcacgagcccagtaattgccccattcaatcatggttcctggtcggagttggtaagacctgagttcatatatattaggtccggatcttggcacaggctcattccagaaactgaactccaacaggagctgattcttcctggagagaagcatgtcacttcttgccttacgaaattccaaaaattccttattttctctgagtttattcatgacttctgtgagggctggatagcctccttcatacctccagaggtggacagcttggtcctgctcgccataccacgtgttccaagtccccaccaaagtacaagggtagtgtttatcttcgtgaatctttggcaacacctcttgacaaattttgttgtatgcttctaggcattccggtttaacattgtgaaactgtaatttgtatagattgcttgtttcctttttggctaggagattggagtgggcatcttttcttggatcaactttccggacaaataaggattttagccagctgtcttctcgagatctgttgctggaagatgtccatgtccggagcctgggcaggaggctgcagggggccgcccgctgcaggaggccgccggcccaggccgctccgcgggcgcgcagcactcgcgccgccatcttgctcctcgtgcc

SEQ ID NO: 174 - DNA, 2117 bp, Homo sapiens
ggcacgagggaggggcgaaaggacatttttttttttcttgctcccgcctctgttcttcccccacctgccacgtacagagcccaagttctcgctaggcttgttgggtcagcgcgattggccggggcccgcgcgagcctgcgagcgaggtgcggcggtcgcgaagggcaaccgagggggccgtgaccaccgcctccccgcgacgccccagtccagtggcctcgcgtccgcccattcagcggagacctgcggagaggcggcggccgcggcctccgcaagccgtctttctctagagttgtatatatagaacatcctggagtccaccatgaacggacagttggatctaagtgggaagctaatcatcaaagctcaacttggggaggatattcggcgaattcctattcataatgaagatattacttatgatgaattagtgctaatgatgcaacgagttttcagaggaaaacttctgagtaatgatgaagtaacaataaagtataaagatgaagatggagatcttataacaatttttgatagttctgacctttcctttgcaattcagtgcagtaggatactgaaactgacattatttgttaatggccagccaagaccccttgaatcaagtcaggtgaaatatctccgtcgagaactgatagaacttcgaaataaagtgaatcgtttattggatagcttggaaccacctggagaaccaggaccttccaccaatattcctgaaaatgatactgtggatggtagggaagaaaagtctgcttctgattcttctggaaaacagtctactcaggttatggcagcaagtatgtctgcttttgatcctttaaaaaaccaagatgaaatcaataaaaatgttatgtcagcgtttggcttaacagatgatcaggtttcagggccacccagtgctcctgcagaagatcgttcaggaacacccgacagcattgcttcctcctcctcagcagctcacccaccaggcgttcagccacagcagccaccatatacaggagctcagactcaagcaggtcagattgaaggtcagatgtaccaacagtaccagcaacaggccggctatggtgcacagcagccgcaggctccacctcagcagcctcaacagtatggtattcagtattcagcaagctatagtcagcagactggacctcaacaacctcagcagttccagggatatggccagcaaccaacttcccaggcaccagctcctgccttttctggtcagcctcaacaactgcctgctcagccgccacagcagtaccaggcgagcaattatcctgcacaaacttacactgcccaaacttctcagcctactaattatactgtggctcctgcctctcaacctggaatggctccaagccaacctggggcctatcaaccaagaccaggttttacttcacttcctggaagtaccatgacccctcctccaagtgggcctaatccttatgcgcgtaaccgtcctccctttggtcagggctatacccaacctggacctggttatcgataaggaggctcctctacaccaattaatgtagctgctagctattggcctcccaaaagactccagtactattttaatttgtattgaagaagttcagaaatttaaaagcagagcattttttatgatatcattgttggtgttaattgaaagtataatttgctggaacacaaagaccaaaatgaaagttttttcctccctgcttaaaaatgtagcagcttcttagttactttggaacactactcttacatgtataaagtgattgacttgactttctagcttcccttgtccggaggatattaaaatgctagggtgaggtttagccatcttacttggctttttactattaacatgatgtactaaagtagagccctttgagaatacaagatattatgtataaaatgtaacactgatgataggttaataaagatgattgaatccaaaaaaaaaaggggggggttaaaaaatccggaggggcaagttgggtcccgttttgtaagggccaaggggggaaaaaaagggcggggggtaaaggggggaaagctgggttggggacctgggggtgggcaaaaagcgggaaaggaggtgaggggggggtaaa

SEQ ID NO: 175 - DNA, 3158 bp, Homo sapiens
ttttttttttttctaggtccaatggtagtttttattccccaggaacaaagataatgtggagaagaaactccaaaaggaaacagagcacggatgacagaaatgacaccacggcagcctggctcaggagtcaggtagatagatggctgctccacagtggacctggtcatggccctggtttcttggatccacatttgccccgtctcttaagtgtccatctcagaggtggaggatggagacagtgaggtggaaaacgtgcttgctctacacaaagacaaatggatcttctattcccagaggaccagggacaccaaaacctccctcttcagaatggaggtagacagataaaaatgagaggggcttgagtgtcacagacaatctgaaagtaataataggggctcactgtggctggcagaactggtactgaaatggggactacaggggaagcagcttccagttttatggtggagagtcagtcctgaatcaggccctggggcaattataaccagagtgctgtttctagccacttacttcaaaggactatggctatgttgaatcagaagccattatctttttcccagaggatgcacttccatccctatttctggcatgatcctgctccctacgagcctgatcctttaaaaaacagattggcaagcgacgagaaaaacggtgcctcacatgcttgagatgtgacagcttctcctgcaggcaagaacctctcagaacaaggtcctttggtatgagctagatcatccaggcctgtccctgcagaacacaccaagactcatccctgtactacagggtggcctctggctatggcctggcacagtgaggacagaggcggggtcctgagtcaacatcacagggaggtctcctggaggatgcaggtggagctgctcccctgataggctgtgccatccagggccatggcctccttgtctctgctgtcccccagcacaccattcctcggcttctcaggaaacaggccagtgtcgaggtggtcctggccgtagctcctgcagtggagccgcttctgacaggacaacggaaggagggacaggagctttggcaacactgggtaaatggttgcagggttcagggaccggcctcgcattctcccagtgagtagactgacaatcaggcccaccacaatcactgtggtggagttgtgagcactgtaccataagtaagacaaggaatagaaccgctgcagccctgtgggcttggagaaggtagtcaagggcatcagtgtggtcacagtggcaacggttagattggtgggcagggagaagctggacccattagagggagagggtggcatgctggagcccatgctggtcacgatgctcccgatgccaatccagaaggccatgacgagcccagccaacaggcccacaacagcaccaggagggttagcacatggaaagaacattccaaggcagaagagtcccagcagcggtcccccaaccatgccaaagatgctgattgctgcctgcagcacaggtcccatctgggaggaaatataggccattcctagacaaagcagcccatagccaaaggcaaggcctctggaaagcatgatggcccgggcttcagagaactcagggaaccaaggtcgaatcaggtcttccatcgtaacagttgccaatgaattaaaagcagaggatatagtgctgagagagccgctgaagaggcaggcaatgaagagccctggcaggcctggcaggcccttcaggagatccatcacaaagtacaggacgaactggtctggggctgcctgagcctgctgaatgctcatgggatactcctggtaatacgcgaacatgaccaggccaatgaggcagcccacgcagagggacacctgctggaaggggaacactgcataacaggagagcacagcagccttctccgtgcgggaactgaggtaccgctgcacctgagcctggttcaccccgtataaggagagcatcatgaagacacccccgaaggccaaggtccagaaggtgtgccgcacaaaggggtctggatccagctcaaacccagagatgcggccgtgctgggaagccacggcccacacacgccccaagccgcccaccttggctgaccccacgatgataactgccagctgcccgaggaacatgaccagtgtctggaacacatctgtccagatgacggccttcagcccacccagagctgtatagacggtacagacaatgcccagggccagcacggacagccacagatcaaagccagtcactgcattgagagccaatgacggagcatagagcacaactcccatgtagatcaccatctgaaagatgaaggtcacagttccacacactcgcacagttttattgaatcgaagctccaggtactcataggcactggtgagatgcaggcggtagaaaacggggatgaagatgtgtgcaggtatcagcagccccagaaagtagcagcagcccaggaaccaatattgggtcccaaatcggtagatctctgacggcacacccaggatggccacggctgactggaaggtggccagcagggacagtgccaccggaaggcagcccattttgcggtccgccatcagcagctcaccaacagtatgccggccccagccacgacaagcatggtagagcccaatggcaagagagagaaccagcagcaggacgaacaccacatagtccatgatggagaaggtagacatgcccacgcttgtgcccgaggttggggaaagaggggctgaggtgctcacccctacactcatatcctcactgtgtctgtgatctgcagccagttgctgctccagggctctggggtagggcaggggcggatgtgtggctacaatctggcttccagccacagtctcacagtcttcctccacggagtgatactgtccagggtgagctccgtggttcagtcagagctaggaaggtccctttgtgcttcctgagatcaacatcgctcccttttctgagggcggatggaggggcccgagtttctgcgaagccgcgacctcggcgtccggacgcggggaacaccgggctgagggagtctgcagtcggctccgggaagccgcgcggcgacgggggaggccttcactaaaggggaaaaggaagagggggtcggccagtatccccgaaagagggctagggcgc

SEQ ID NO: 176 - DNA, 654 bp, Homo sapiens
atggctcgctgcagcctccacctcccaggctcaagcgatcctcccacctcagctccctgagaagctgggaccacaggcctggctaaattttgactttttgtagagacaaggttttgccatgttgcccagtcagatctcaagcgaggggctgttacatctgatcagggcaaaaggggctgtgctccttggacactttgcacagccccagtgggcttctttctcctctgttagtgtggttaatgttcatctgcctgcatccctgagtcacccaagtgtaacctcagccataacacgtactgcagccggaacggtgtccgcagctcagcgtccctctcccatgcactttctgaactttggtcttttaaccaggtttaccagccgctttctgcctctttgtgcttttgagggttttttggtttgtttgttctgttttgtttttaaataaagatgattatttggcccaggctgagggtgcaaacagaactcttcacgtgtccacgacaagaaaaatagtttttacaaacttctagttgtggcatcaaaagtgtgagtttttgcacctgcaaaattgtaatgcaagccctgactgggtggaagctgaagtcttgctgttttaaattaaataaataaattatttttttaataaaaaaaaaa

SEQ ID NO: 177 - DNA, 1162 bp, Homo sapiens
ttttttttttttccggttgcggcgccgcgcggtgaggttgtctagtccacgctcggagccatgccgtccaagggcccgctgcagtctgtgcaggtcttcggacgcaagaagacagcgacagctgtggcgcactgcaaacgcggcaatggtctcatcaaggtgaacgggcggcccctggagatgattgagccgcgcacgctacagtacaagctgctggagccagttctgcttctcggcaaggagcgatttgctggtgtagacatccgtgtccgtgtaaagggtggtggtcacgtggcccagatttatgctatccgtcagtccatctccaaagccctggtggcctattaccagaaatatgtggatgaggcttccaagaaggagatcaaagacatcctcatccagtatgaccggaccctgctggtagctgaccctcgtcgctgcgagtccaaaaagtttggaggccctggtgcccgcgctcgctaccagaaatcctaccgataagcccatcgtgactcaaaactcacttgtataataaacagtttttgagggattttaaagtttcaaaaaaaaacaaaaaaaacaaaaacactcgcgagacctaggtcccctcctctccctatcacacgaggaaggccccggagaaacgacagcccagacgtggagagacaccatatagccaccggggtgccaaaattggagcacacaccgcaacacaaagcagcggcacaaaataacacgggagggattacacccaagtgaacgccacaaaggcacacaaggcaccaggacgcaaggcacacctgcacgactcacaacaggcccggaaacacctgcacgagaccgcgccggcgaaccacggcccacaaggggagcaaaggcatgaaccgggatacaccagcaacgcaaaccgacctcccggaggcaaccagaaacatcctgcacacgggacccaacaggccagaaccgccccccggcgaaggcccacagggcgagcagacccaccaacgggccatacaagccggaaaagccgagcacagcccacgtgaaccagggcggcacaaacgaggcggaccgcagacctacagagagcgcacaaccctcacgagacgacacacagcaacagagagaccaggtcgccagtgaagcagcgcgctccgtgcgc

SEQ ID NO: 178 - DNA, 573 bp, Homo sapiens
acggccgacttcgtcttcatgtttctcttcgggggcgtccttatgaccctgctgggactcctgggcagcctgttcttcctgggccaggccctcatggccatgctggtgtacgtgtggagccgccgcagccctcgggtgagggtcaacttcttcggcctgctcactttccaggcaccgttcctgccttgggcgctcatgggcttctcgctgctgctgggcaactccatcctcgtggacctgctggggattgcggtgggccatatctactacttcctggaggacgtcttccccaaccagcctggaggcaagaggctcctgcagacccctggcttcctaaagctgctcctggatgcccctgcagaagaccccaattacctgcccctccctgaggaacagccaggaccccatctgccacccccgcagcagtgacccccacccagggccaggcctaagaggcttctggcagcttccatcctacccatgacccctacttggggcagaaaaaacccatcctaaaggctgggcccatgcaagggcccacctgaataaacagaatgagctgcaaaaaaaaaa

SEQ ID NO: 179 - DNA, 2532 bp, Homo sapiens
atgtcgctgaataaatcctctcggggctgactttacctctgttcgtctggtggtgctcgccctccgtggcccccacctctctcctgttgatttgcccgcacatggctcttgcttctctgtcctgtaaatttttctcttcggctgtcaccatcctgtcaagtcctttactggatgtttttgctgcgttccatgtctgtatacaccgtggttcgccccccgcgtgtggttacaatgtggggctccctctgtggtatttgcgctggcgtagataaacttctgctgcggtataatgcgtgtctagtcttttgtggtgttttaatcaagagcaaagcgtggtgttgtagacgcgcacgagtggttgctcaccttttgccactcgtggcagttttcacctttccccctggtaagaagtcctcggggtgcactacccttttcctctcttgggcccacgccctagtgttgtagaacgctgttcagggcttcggcgttaagggtttccaggggtatccaccataatatttgggtccatttttccctaccgtctgaaaattgcccgttaggccccatataataataaataaaaaaaaacggcggccgcccctttttttttttttggttacggcagcacttttatttttccttacacaatgacgtgttgctggggcctaatgttctcacataacagtagaaaaccaaaatttgttgtcatctcttcaaagaatcgagaattgcgtacaaaaaaaaccttacataaattaagaatgaatacatttacaggcgtaaatgcaaaccgcttccaactcaaagcaagtaacagcccacggtgttctggccaaagacatcagctaagaaaggaaactgggtcctacggcttggactttccaaccctgacagacccgcaagacaaaacaactggttcttgccagcctctagagaaatcccagaacactcagccctgacacgttaataccctgcacagatcagaggctgctggccacacagactcaccaagccacagacttgtcttccacaagcacgttcttaccttagccacgaagtgaccaagccacacgtactaaaggttgaactcaaagatatgtacagggtattaaacaaataccaaggggaacagttaacttcaatacaaggtcaaaatcagcaacaagttctacaatccagtgctgatatcagatacaagcttcaaggacaatttcttttcgaaggcttattccagtttcgtgaggctagcatgaggtgtgtgcatttgccaggggcaaatttctattctcaattaacccatgcagcaaatgctacgcatctgctgagtccgtttagaagcatttgcggtggacgatggaggggcccgactcgtcgtactcctgcttgctaatccacatctgctggaaggtggacagtgaggccaggatggagccaccgatccacaccgagtacttgcgctctgggggtgcgatgatcttgatcttcatggtgctgggcgccagggcggtgatctccttctgcatcctgtcggcaatgcccgggtacatggtggtgccgcccgacagcaccgtgttggcgtacaggtctttgcggatgtccacgtcacacttcatgatggagttgaaggtggtctcgtggatgccgcaagattccatacccaggaaggaaggctggaacagcgcctccggacaccggaaccgctcattgccaatggtgatgacctggccatcgggcagctcgtagctcttctccagagaagaggaggatgcggcggtggccatctcctgctcgaagtccagggcgacgtagcacagcttctccttgatgtcgcgcacgatttcccgctcggccgtggtggtgaagctgtagcctcgctcagtgaggatcttcatgaggtagtcggtcaggtcccggccagccaggtccagacgcaggatggcgtgggggagggcgtagccctcgtagatgggcaccgtgtgggtgaccccgtctccagagtccatgacaatgccagtggtgcgcccagaggcgtagagggacagcacggcctggatggccacgtacatggccggggtgttgaaggtctcaaacataatctgagtcatcttctctctgttggccttggggttcaggggggcctcggtcagcagcactgggtgctcctccggggccacgcgcagctcgttgtagaaggtgtggtgccagatcttctccatgtcgtcccagttggtgacgatgccatgctcaatggggtacttcagggtcaggatgccacgcttgctctgggcctcgtcgcccacgtaggagtccttctggcccatgcccaccatgacgccctggtgtctggggcgcccgacgatggaaggaaacacggctcggggagcgtcgtccccagcaaaaccagctttgcacatgccggagccattgtcaatgaccagcgcggcgatctcttcttccattgcgaccggcagagaaacgcgacggcggagcggcggaagaacagagtgcgagagctggcagcggcgactgaga

SEQ ID NO: 180 - DNA, 3446 bp, Homo sapiens
gcggagcgtgtgagcagtactgcggcctcctctcctctcctaacctcgctctcgcggcctacctttacccgcccgcctgctcggcgaccagcggggatcctcccccagccgcaagtccacgaagaaagcaacgaatgaaaattatgaagacaacgagaagtcagactcctccgggtcgcgctccagctgcttcggcttcgtcgcctactctgtgaactccggggagagatctcgagtcaagattaagaccttaacccaccaacctgcctgttcggacaccccccgggccggccgctgtctgtccccttctccatcgccctctcccagaaagctccggtgcttggaccagctagagtctgagaaagaggagaggcgcgaacgccactccaaaaagagaagggttaaagagggcaaccctaacgatacgcttgactttctgtggctgggaacaccttccaccatgaccacctcagcaagttcccacttaaataaaggcatcaagcaggtgtacatgtccctgcctcagggtgagaaagtccaggccatgtatatctggatcgatggtactggagaaggactgcgctgcaagacccggaccctggacagtgagcccaagtgtgtggaagagttgcctgagtggaatttcgatggctccagtactttacagtctgagggttccaacagtgacatgtatctcgtgcctgctgccatgtttcgggaccccttccgtaaggaccctaacaagctggtgttatgtgaagttttcaagtacaatcgaaggcctgcagagaccaatttgaggcacacctgtaaacggataatggacatggtgagcaaccagcacccctggtttggcatggagcaggagtataccctcatggggacagatgggcacccctttggttggccttccaacggcttcccagggccccagggtccatattactgtggtgtgggagcagacagagcctatggcagggacatcgtggaggcccattaccgggcctgcttgtatgctggagtcaagattgcggggactaatgccgaggtcatgcctgcccagtgggaatttcagattggaccttgtgaaggaatcagcatgggagatcatctctgggtggcccgtttcatcttgcatcgtgtgtgtgaagactttggagtgatagcaacctttgatcctaagcccattcctgggaactggaatggtgcaggctgccataccaacttcagcaccaaggccatgcgggaggagaatggtctgaagtacatcgaggaggccattgagaaactaagcaagcggcaccagtaccacatccgtgcctatgatcccaagggaggcctggacaatgcccgacgtctaactggattccatgaaacctccaacatcaacgacttttctgctggtgtagccaatcgtagcgccagcatacgcattccccggactgttggccaggagaagaagggttactttgaagatcgtcgcccctctgccaactgcgaccccttttcggtgacagaagccctcatccgcacgtgtcttctcaatgaaaccggcgatgagcccttccagtacaaaaattaagtggactagacctccagctgttgagcccctcctagttcttcatcccactccaactcttccccctctcccagttgtcccgattgtaactcaaagggtggaatatcaaggtcgtttttttcattccatgtgcccagttaatcttgctttctttgtttggctgggatagaggggtcaagttattaatttcttcacacctaccctcctttttttccctatcactgaagctttttagtgcattagtggggaggagggtggggagacataaccactgcttccatttaatggggtgcacctgtccaataggcgtagctatccggacagagcacgtttgcagaagggggtctcttcttccaggtagctgaaaggggaagacctgacgtactctggttaggttaggacttgccctcgtggtggaaacttttcttaaaaagttataaccaacttttctattaaaagtgggaattaggagagaaggtaggggttgggaatcagagagaatggctttggtctcttgcttgtgggactagcctggcttgggactaaatgccctgctctgaacacgaagcttagtataaactgatggatatccctaccttgaaagaagaaaaggttcttactgcttggtccttgatttatcacacaaagcagaatagtatttttatatttaaatgtaaagacaaaaaaactatatgtatggttttgtggattatgtgtgttttgctaaaggaaaaaaccatccaggtcacggggcaccaaatttgagacaaatagtcggattagaaataaagcatctcattttgagtagagagcaagggaagtggttcttagatggtgatctgggattaggccctcaagacccttttgggtttctgccctgcccaccctctggagaaggtgggcactggattagttaacagacaacacgttactagcagtcacttgatctccgtggctttggtttaaaagacacacttgtccacataggtttagagataagagttggctggtcaacttgagcatgttactgacagagggggtattggggttattttctggtaggaatagcatgtcactaaagcaggccttttgatattaaattttttaaaaagcaaaattatagaagtttagattttaatcaaatttgtagggtttctaggtaatttttacagaattgcttgtttgcttcaactgtctcctacctctgctcttggaggagatggggacagggctggagtcaaaacacttgtaattttgtatcttgatgtctttgttaagactgctgaagaattattttttttcttttataataaggaataaaccccacctttattccttcatttcatctaccattttctggttcttgtgttggctgtggcaggccagctgtggttttcttttgccatgacaacttctaattgccatgtacagtatgttcaaagtcaaataactcctcattgtaaacaaactgtgtaactgcccaaagcagcacttataaatcagcctacataagaaaaaaaaaagggggggcgtaaaagtatccgaggggcgagttaggggaccaggttctggtcacaggggcccaaaagaggcgggataaaagaaaaggaggggggcgcggttaaacaccccgtagtcgggaccaggctgcccggggatctggtagaggaacccaccactgcggcgcgggacactggggaacgacccccagagattaaggtgcggaataagacaggctcaggggacaacgcatatcctgcgaatgccgttacgaacatgatacaatgtcgctcgacgaagctagcaatgtcgagccgtgacgtgatcgtacatatgcgtgcacgaacgtctcgtcgctcatctactg

SEQ ID NO: 181 - DNA, 1141 bp, Homo sapiens
ggcacgaggatcagaccatcagaaggatttgtataaagagtgactctcctatgaaggtaaaggccacccctcttcagttccagtgactgagatacatttttccaatcctgggggcaaatacagacacagcaagttccttcttccctttggaaatttggcagctgccttcaccagtgagcacaaagccacatttcaaaggaaactgacaaattatccccagctgccagaagaagaaatcctcactggacggcttcctgtttcctgtggttcattatctgattggctgcagggatgaaagtttttaagttcataggactgatgatcctcctcacctctgcgttttcagccggttcaggacaaagtccaatgactgtgctgtgctccatagactggttcatggtcacagtgcaccccttcatgctaaacaacgatgtgtgtgtacactttcatgaactacacttgggcctgggttgccccccaaaccatgttcagccacacgcctaccagttcacctaccgtgttactgaatgtggcatcagggccaaagctgtctctcaggacatggttatctacagcactgagatacactactcttctaagggcacgccatctaagtttgtgatcccagtgtcatgtgctgccccccaaaagtccccatggctcaccaagccctgctccatgagagtagccagcaagagcagggccacagcccagaaggatgagaaatgctacgaggtgttcagcttgtcacagtccagtcaaaggcccaactgcgattgtccaccttgtgtcttcagtgaagaagagcatacccaggtcccttgtcaccaagcaggggctcaggaggctcaacctctgcagccatctcactttcttgatatttctgaggattggtctcttcacacagatgatatgattgggtccatgtgatcctcaggtttggggtctcctgaagatgctatttctagaattagtatatagtgtacaaatgtctgacaaataagtgctcttgtgaccctcatgtgagcacttttgagaaagagaaacctatagcaacttcatgaattaagcctttttctatatttttatattcatgtgtaaacaaaaaataaaataaaattctgatcgcacaaaaaaaaaa

SEQ ID NO: 182 - DNA, 2501 bp, Homo sapiens
ttttttttttttgtcgcagctgttttaattcaatcccacgcccctgtccagcaggaaaccccttatagaaaacccaaatcctcatcttggagtttctccttcagccagggcagcacttgaaagaggttgatgtgaaagtctcgggcgtgagcaggtacctgcttttgccgcttctggtttttgcagacatccactactccccagctgattacaccaacttgaatgaaacgacttctcttgtgaactatcaaggggccgccagaatcacctctgcaagtattggggtcagcatagggactcactcctccagtacaaaggaaccgaggggtgaccacctctgagatgtccttgactttgtcatagcctggggcatattgagcatctctctcacagctgcctttcttatccccattcttgatgtagacctccttccgagtcagctttttctcctcctcagacacaaacagagctttgatatcctgtgcagggagcagctcttccttttgttgctggcaagtggtagttggaggaagcctcaaagctcgagttgttccctcggtgcaggggagacaaatgggcctgatagtctggccatatttcagcttattcttgagcttgatcagggcaacgtcatagtcataaaattcaggaattcctgcttcttttttcccattaatgttgtagttggggtgaaataggactacttctatctccaggtcccgcttctcccctcctacgctgaccttgattgagtgttccttgtcatccacagtgaaacaatgtgctgctgtcagcacaaagtactcagacaccacagcccccatacagctctcgtgtccctttgaagggcgaatgactgagatcttggcctgccatggttgcttgtggtaatcggtacccttcctgtgttcccaaaccatgccacagagactcagagactggctttcatcgatcatttggtagaaaacatcttccaggttttccatatccttgactttgaacacatgttgctcattgtctttcttggaagccaaagcattgatgttcacttggttcaccaaaggcccgaccccaaacacatagacatccagataatcctcccttgggtttttgcgatccttgccaatgtatagcaagtcccggatctcatcaatgacagtaattgggtccccgcccatgttgtgcaatccatcagtcatgaggatgatgacatggcgggtgcggttccagccttcaggagggacgtcatctggccagctcatcatgctgtacactgcctggagggccttcttggtgttagtccctgacttcaacttgtggtcttcataattgatttcattgagctgcttcgtgacccagtctgcattactgctgtctgcttcagacactttgacccaaattttggggtatgtggcatatgtcactagaccatatcttggcttcacaccataacttgccaccttctcaattaagttgactagacactttttggctcctgtgaagttgctggccccaatgctgtctgatccatctagcaccaggtagatgttcatggagcctgaagggtccaggacgatcttccgcttctgttgttcccctgggccgtgcccatcctcagcatcgactccttctatggtctctgtcagggaagacaggaaagcttcggccacctcttgaggggtgtcgtacatgaaggagtcttggcaggaaggctccgtcccgctccaagagccaccttcctgacacgttcgccgctgggagccacgcagggtaagcccccggctgcagtggtaggtgacgctgtcttcaaggcggtactggctgcccaccttccttgtgccaatggggatgcccgggttggagcagtaccccgctccgttgtcacagatcgctgtctgcccactccaccggccattcacttggcaggtgcgattggcagagccccggagagtgtaaccgtcatagcagtggaaagagatctcatcactcacattgtagtagggagaccggggccagtattccccgttctcgaagtcgtgtggtcttggacagtggattgctctgcactctgccttcctgacagtcttttggtcttgagtcttcagggtgctccaggaccccgtagatctgcaggtacgtgtctgcacagggtacgggtagaagccagaaggacacacgtactccagtgcctggccctcttggagaagtcggaaggagccgcctttgatctctaccccctccagagagcaggatccctggggccaggccaaagaccatggagtggtggtcacacctccagacaagaggcccaagataaagggcatcaggcagagttgggggctgagattgctccccatggcgttggaaggcaggagagaagctgggcctggggcaggatggtgtgtcctggcttgctttgcttgtctgcttggctcagtgtccaagctgaaactccagacctagacctggtcacattcccttcccctgctccccctcgtgcc

SEQ ID NO: 183 - DNA, 641 bp, Homo sapiens
ttttttttttttaagtacaaatgcttttatattcagcccctgtaaagccatcagatgtttgaaagtttttaaacacgaaccaaagggtttaattttaagaacttagctaggaatgggtgaaatcctacccaattaatagagttctgcaaattagtaacaaagtgtaaaatgaaaggaagggtcccttggagatgtgaaattcttctattgagagtcctgtcttctttattcaagaagtttgtagccattttcagaattcactcaagaaccaacttcttaatttagatatcagcgaacaagtcatggcaaaaaatacacaaagagaaacaccaccacatcgaaaaggatgaaaagccagaggtccaaccagtaggagtgtttgggaagcccatttgccccagactgaggcctcacatcgaagttctgcctccctccctcgctaaagcctcgccgctcccggagaccatctcgaccatcaacacccggtgcgtccacctccatctcgctcctgcagcttcgtaacaaccctagaaaccgaaaatgcttaagttcccggactttggtgttcgccgcaccggaaactgagcggagtccggccgcctgcgcagtgcgccgcgccccgggttccggaatgcactctc

SEQ ID NO: 184 - DNA, 2450 bp, Homo sapiens
ttttttttttttggcagcggggagagggaaagaggaggaaatggggtgtgatgggtcaaaggcaggaaaggtaagccatggtcctcaaaccaaagagccctctctgtaggtcctctgatctttgagtgtgagctcaagctctccagtggacacagaaaaaggcctggtagtaagtggtttgcattgtgaggtatgaggatccctggtaaattcagcagcatgtggtttttggaaatcagcccacaagataagaacactgcaaccaaactcataactaatactgctaatttaactattgtccaaaagagaaagggaagaagaaaaaaatccccactctactgggaggttctaggctttcctataagttatccaaatagtctttttttaatctcagggtttcttaagagaattcccattcagtgaccatttctttcgttaaaggcactttcaatgacatgattggaaaggagtgaattttaattgtagtgaaaccaagattaattccttggcacacctgggaagaagaggaaccggatgggggcatttacagtgatttcaaaaggcaaataattaagtcttgagcatttcaacagatgcacacccagaaaaaaaatgtatgccccgaaaacatttgtatttttcctttagttttccagctgtttctatctatagctctgcaaagagatcacattcactacttgattgattttcaagacactggccctaactcttcccaccacagctgtgcttgacaaaattagccaacagtcagtcctacagggggaaaaagaagaaaatcaatttgggccaagctttcctagagcaaagggatctttccttgcccaggtaatggcaggttcagttgctggacctatagcaactgaatgtaatatgtggcccctactacctatgaaatgttggactttttgacaggcaagactaagtgttctctctctaaatataaattgtggagcatatatattttttctttcctctctcctgaacatttcttattgatctcaggcttacaaaattagtgaagtgagaattattaaaatcatataaggggttgagaaagagtaaagagctaatgtttgtctacatgtgtgagtggaggatcttgatccttcatatcatactcccaaccagagaaaaatacaaaaataaacacgccatgttaatacataatacaaagtgtaaatctacaaacacaagtgtactaattagagttgttcctcagaagcacggcttccctccagtccctcagagaggaggaggaatggggacgggatggttttcattacgccttttcatgtcttaaaaagtttgtagtaacagtctcagtagcgcaaacaatttcatgtgaaaccagaagctgtaaaaataaattacttttgaggaaatgagggttcctccgcagctcagaactcatcatgccgtactaaggcctccccaaaatctgtggcctggctgccaacaaataagtcatacttgtcaacgatctcctccttggtaagcttgccatccttgttttggtctgattcatagaccaggtgcctggcttctgcctctgcatgatcatagtctgagggaaggatccagtctttggtctcttccttgtccatcttcccatcacggttcttatcccgaaactcaacaaactgctctcgctctgtctttacccattctggctcatcagtattcccatcatggctgtacatgtcaccaatatactcttctagatcaatgaaaccatcagcattcttatctatatcttccattgtttcctgtactactatatctttcatgtagtcatactcctcagggtgcaggaaagctgtgaactcctccttggtggcaatgaggtctccatccttgtctgccattttaaacctccgctcatctctaaccatcatctgtttatagttaaatccatcatcaggatctggatcatctaaaacgtagccgtaggtggcatttttatactcctcccaggaaacgaggccgtcctcattgaggtcatgccccttccactgtcgctctacatcctcgtaaatccagcgcttttgtgcaaatttaatccagtctttgagctcatccacagtgacaaacccgtccttgtcgccatctattttacttacaatctttccaagcctttccttgctctcttctggtgtcagctgatcaaaggtctttgcttcttcagcacccaagaaggcatcatggtcataatcaaaactctgagcatcattgtgaaccttgtcactgagctgaggctcatgatgtacacggtccttcttttctgtgggtttgctcaaggcaaaggctgtgcacagggacaggcacataagaaactgtcgcaggtccatgataattagatctttcctcgtagcccccacagcacaggatgccgtggccgccgctcacccaccggctcagctcacgcgcgc

SEQ ID NO: 185 - DNA, 1474 bp, Homo sapiens
tggaacactttatgttgaactgtggtagaggaaacaagacagttctgtctgcagaagcccattatggctgtaactggagatgacacagatgaggaaactgaacttgccccaagtcacatggctgctgccactggtgacatgccaacttaccagatccgagctcctactgctgctttgccacagggagtggtgatggctgcatcgcccggaagtttgcgcagtccccagcagctggcagaagaagcaacacgcaaacgagagctgaggctaatgaaaaacagggaagctgcccgggagtgtcgcaggaagaagaaagaatatgtcaaatgtcttgaaaatcgtgtggctgtgcttgaaaaccaaaacaagactctcattgaggaactcaaggccctcaaagatctttattgccataaagtagagtaactgtctttgacttggaccttgtttactctaactaaggcaggagatgcagcagtcctacttattgccatgtggacttgtgggaaggacacgtgtracccttaagaatccagtttggattagtgtttgaaattgaattgggaatgttgttccaggatgtggaatgcagccgtgatcacacttaccgagcttactttgatctgtttgtcaatagcatgcaaaaaatgctttgtttgccctttgcttctgctttttttcagggaagctgccaaagaatgtcgacgtcgaaagaaagaatatgtaaaatgtctggagagccgagttgcagtgctggaagtccagaacaagaagcttatagaggaacttgaaaccttgaaagacatttgttctcccaaaacagattactagaaatatttaactatgaactgaaggcagcatgtatagttgcttttgaaggaatacaatatatagctggcaagaatggtggcttcttttctttgtatcattcatcttcttctttaatcattcatcttcttctttaatcacttaacattcctaaaatgcttcactgtacgtagttaagtcgtagctataacttcaaattttttaaaagagacaaactgtaaaaaatgtgtgtattcttaaaatgcaatatttgtaaggcttgttccaatgccacatacttgcagctcccattctatgtgtcatcaatagtgtcctatgcaataaaattatttgcaggtctttaaatcattttaggaaaggatgatcaaaaataatgcatccagcagtacaataaaagtaaaccacaaaaaaatacctcaggaaagaatagaaagaaagtctatctaatgacatgcctatatgagaagaatagcctagatatgaatatatggcatttgcagatttttatattagttgctttgttaaaaaaaaaaagattgtattgctgtccttgaatgccatagtcaaagagagtttttaatagaaccatgttggttgcactttgtagtgtttggtgctcatttaaatatctgaacatttactacag

SEQ ID NO: 186 - DNA, 1313 bp, Homo sapiens
atgcacgtcttggttcgggccgggcataaaaggcttcgcggcccagggctcacttggcgctgagaacgcgggtccacgcgtgtgatcgtccgtgcgtctagcctttgcccacgcagctttcagtcatggcctccggtaacgcgcgcatcggaaagccagcccctgacttcaaggccacagcggtggttgatggcgccttcaaagaggtgaagctgtcggactacaaagggaagtacgtggtcctctttttctaccctctggacttcacttttgtgtgccccaccgagatcatcgcgttcagcaaccgtgcagaggacttccgcaagctgggctgtgaagtgctgggcgtctcggtggactctcagttcacccacctggcttggatcaacaccccccggaaagagggaggcttgggccccctgaacatccccctgcttgctgacgtgaccagacgcttgtctgaggattacggcgtgctgaaaacagatgagggcattgcctacaggggcctctttatcatcgatggcaagggtgtccttcgccagatcactgttaatgatttgcctgtgggacgctccgtggatgaggctctgcggctggtccaggccttccagtacacagacgagcatggggaagtttgtcccgctggctggaagcctggcagtgacacgattaagcccaacgtggatgacagcaaggaatatttctccaaacacaattaggctggctaacggatagtgagcttgtgcccctgcctaggtgcctgtgctgggtgtccacctgtgcccccacctgggtgccctatgctgacccaggaaaggccagacctgcccctccaaactccacagtatgggaccctggagggctaggccaaggccttctcatgcctccacctagaagctgaatagtgacgccctcccccaagcccacccagccgcacacaggcctagaggtaaccaataaagtattagggaaaggtaaaaaaaaaaaacaacacaacacaagccgacgaaggaagccagtcgccatcggggactacacaaaatggggcgggtgtggagcacagaagcgaaaaaaggcacgagaacgcgagagaaccacaaacaccagcatacgaacggcgcagaaaaacaccatccccgtggtcacgagaacaaacatcttacaatgaacacccggcagagtgggacccgcgagagaaagacagaaagccccaatggacgcacgggagcatacagcgaaacctgatagcgcaacgtgacacgacaccacacaaaagacacgaaggagacgaaaacaacaggaagcacaca

SEQ ID NO: 187 - DNA, 5174 bp, Homo sapiens
ggcacgaggtgagccgcaggcttcgggaggcgagggggcggggggagcagcgccgaggccgccgcctccgcctccgccgcctaggactagggggtgggggacggacaagccccgatgccgggggagacggaagagccgagacccccggagcagcaggaccaggaagggggagaggcggccaaggcggctccggaggagccccaacaacggccccctgaggcggtcgcggcggcgcctgcagggaccactagcagccgcgtgctgaggggaggtcgggaccgaggccgggccgctgcggccgccgccgccgcagctgtgtcccgccggaggaaggccgagtatccccgccggcggaggagcagccccagcgccaggcctcccgacgtccccgggcagcagccccaggccgcgaagtccccgtctccagttcagggcaagaagagtccgcgactcctatgcatagaaaaagtaacaactgataaagatcccaaggaagaaaaagaggaagaagacgattctgccctccctcaggaagtttccattgctgcatctagacctagccggggctggcgtagtagtaggacatctgtttctcgccatcgtgatacagagaacacccgaagctctcggtccaagaccggttcattgcagctcatttgcaagtcagaaccaaatacagaccaacttgattatgatgttggagaagagcatcagtctccaggtggcattagtagtgaagaggaagaggaggaggaagaagagatgttaatcagtgaagaggagataccattcaaagatgatccaagagatgagacctacaaaccccacttagaaagggaaaccccaaagccacggagaaaatcagggaaggtaaaagaagagaaggagaagaaggaaattaaagtggaagtagaggtggaggtgaaagaagaggagaatgaaattagagaggatgaggaacctccaaggaagagaggaagaagacgaaaagatgacaaaagtccacgtttacccaaaaggagaaaaaagcctccaatccagtatgtccgttgtgagatggaaggatgtggaactgtccttgcccatcctcgctatttgcagcaccacattaaataccagcatttgctgaagaagaaatatgtatgtccccatccctcctgtggacgactcttcaggcttcagaagcaacttctgcgacatgccaaacatcatacagatcaaagggattatatctgtgaatattgtgctcgggccttcaagagttcccacaatctggcagtgcaccggatgattcacactggcgagaagccattacaatgtgagatctgtggatttacttgtcgacaaaaggcatctcttaattggcacatgaagaaacatgatgcagactccttctaccagttttcttgcaatatctgtggcaaaaaatttgagaagaaggacagcgtagtggcacacaaggcaaaaagccaccctgaggtgctgattgcagaagctctggctgccaatgcaggcgccctcatcaccagcacagatatcttgggcactaacccagagtccctgacgcagccttcagatggtcagggtcttcctcttcttcctgagcccttgggaaactcaacctctggagagtgcctactgttagaagctgaagggatgtcaaagtcatactgcagtgggacggaacgggtgagcctgatggctgatgggaagatctttgtgggaagcggcagcagtggaggcactgaagggctggttatgaactcagatatactcggtgctaccacagaggttctgattgaagattcagactctgccggaccttagtggacaggaagacttggggcatgggacagctcagactttgtatttaaaagttaaaaaggacaaaaaaaaaatctaaagcatttaaaatctagtgaaataactgaagggcctgctctttccattgtggatcacagcacacacatacatacaccctccacctccccatcccctgttctccctctgttgctccccttataaaattgatgttgtctttaccagaaaggtagacaaaaaagaagcagcagcagctcttaaagtgagggttattctcatactcggttccagccatcagcagacttcctgctcatcggcagatccccctttccaacctgtaactctgatgtgctctggatcagcttttaacttttaatcatatattactgtcttctaaatcccttctcctcctctactgctgccctatggttctggctcctaccccctgcggcacacttatcttcaaataccatagaattctaatctctggaggctggcagcttgacttggcactttagggccccttagcagggtgagctgttaaaacagcacacatctctcatcccctcttcctttattcccccctgggtttcagaaaggaaggatatatggggaccacctcccccttctttgatcccagcatctcagtccccctcccaaccctccatatggctctcaatggtgctcacttgcttggaagcaggctcccaatagggagggggctgccctctacagtctctttgactgtaagacagggctctgtatcagtgagacgatgagaaaagtcccaggctaatggcagaaatttgcactttgaacatgtgtgtttttgtgttgtggaacctgagattccttatttattaacaggaagtctgattttttttttttggagtctttgttgctatattttgtggggctgggagagagagattagattattttgacatgggatcccttccataacaggtactttgaaggcaagacatagggttgaagaagcacagccagcctctgaaatcatagctctccagtggcttttaaagaaagctggtcctcagcactaacaaaatcactacaatagcctagtgcttttttggaagcctttttagggaagaatgttaggttcatggtaactagtatgctctttgagatttttacagtgttgaaacttaagaattttgagagggtgaggagggttgttcagaatctaaattacagatagatgattgtttcttgtgaatttgtttcttttcctttttttttgtccctaccatttccttacatttcccttggggcccatctctggctccttgctttttgtttcttgctttgctttatcagttcattccagctccctgttagtgaaggacactgctgttagtgaaggaacaaagtctatgagtcctaaaattttaagtcaaagaaaactgctctgtttcccctttagtaacacttctgaagaggaaaaacttcaatgagccaaagttaataatcctatataataattgctttggctttcacctaaaattctgggcatcacaatttccttgggatagaggttgtgttggggaatagattgcttattgctgttcactggagagaaaaggtagtgtttttgtacaaggtcataccgccagaagccccaaatcctattttggctcatcttcaggtaaagagtaattcctatcctgtgtgcctcagaagctagaatcgaaggcttaccctattcattgtttattgtcagaaatgcatgatggctcttggaaagaatgacgttttgctggaaaaaaaaaaaagaacagtttgtgtttcacaaacatggcttatcaattttttcaaagaattcttttttcccaaaaagaggagtaacaaaatgtcatttctgaaagaggcttactttataccaactagtgtcagcatttgggatgccagggaacagagagtgagacacctacaatcaccagtctcaaatgcgctattgtttcttttcagagtgttgcagatttgccatttctccataatatggggatagaaaatggaataaagatagaagggatgtagaatatgctttcctgccaacatggtttggagtcgactttggtatattgactagatttgaaaatacaagattgattagatgaatctacaaaaaagttgtcctcctctcaggtcccttttacactttttgactaactagcatctatattccacacttagcttttttgtcacacttatcctttgtctccgtaaatttcatttgcagtggttagtcatcagatattttagccacctacacaaaagcaaactgcatttttaaaaatctttctgagatgggagaaaatgtattctcctttcctataccgctctcccaacaaaaaaacaactagttagttctactaattagaaacttgctgtactttttcttttcttttaggggtcaaggaccctctttatagctaccatttgcctacaataaattattgcagcagtttgcaatactaaaatattttttatagactttatatttttccttttgataaagggatgctgcatagtagagttggtgtaattaaactatctcagccgtttccctgctttcccttctgctccatatgcctcattgtccttccagggagctcttttaatcttaaagttctacatttcatgctcttagtcaaattctgttacctttttaataactcttcccactgcatatttccatcttgaattggtggttctaaattctgaaactgtagttgagatacagctatttaatatttctgggagatgtgcatccctcttctttgtggttgcccaaggttgttttgcgtaactgagactccttgatatgcttcagagaatttaggcaaaacactggccatggcccgtgggagtactgggagtaaaataaaaatatcgaggtatagactagcatccacatagagcacttgaacctcctttgtacctgtttggggaaaaagtataatgagtgtactaccaatctaactaagattattatagtctggttgtttgaaataccatttttttctccttttgtgtttttcccactttccaatgtactcaagaaaattgaacaaatgtaatggatcaatttaaaatattttatttcttaaaagccttttttgcctgttgtaatgtgcaggacccttctcctttcatgggagagacaggtagttacctgaatataggttgaaaaggttatgtaaaaagaaattataataaaagggatactttgcttttcaaatctttgttttctcttattctaggtaaggcatattaaaaataaatatgtaaagaagaaaaataaaagttgtcttcatggaaaaaaaaaa

SEQ ID NO: 188 - DNA, 5629 bp, Homo sapiens
cactaacgctcttcctagtccccgggccaactcggacagtttgctcatttattgcaacggtcaaggctggcttgtgccagaacggcgcgcgcgcgacgcacgcacacacacggggggaaacttttttaaaaatgaaaggctagaagagctcagcggcggcgcgggccgtgcgcgagggctccggagctgactcgccgaggcaggaaatccctccggtcgcgacgcccggccccgctcggcgcccgcgtgggatggtgcagcgctcgccgccgggcccgagagctgctgcactgaaggccggcgacgatggcagcgcgcccgctgcccgtgtcccccgcccgcgccctcctgctcgccctggccggtgctctgctcgcgccctgcgaggcccgaggggtgagcttatggaaccaaggaagagctgatgaagttgtcagtgcctctgttcggagtggggacctctggatcccagtgaagagcttcgactccaagaatcatccagaagtgctgaatattcgactacaacgggaaagcaaagaactgatcataaatctggaaagaaatgaaggtctcattgccagcagtttcacggaaacccactatctgcaagacggtactgatgtctccctcgctcgaaattacacggtaattctgggtcactgttactaccatggacatgtacggggatattctgattcagcagtcagtctcagcacgtgttctggtctcaggggacttattgtgtttgaaaatgaaagctatgtcttagaaccaatgaaaagtgcaaccaacagatacaaactcttcccagcgaagaagctgaaaagcgtccggggatcatgtggatcacatcacaacacaccaaacctcgctgcaaagaatgtgtttccaccaccctctcagacatgggcaagaaggcataaaagagagaccctcaaggcaactaagtatgtggagctggtgatcgtggcagacaaccgagagtttcagaggcaaggaaaagatctggaaaaagttaagcagcgattaatagagattgctaatcacgttgacaagttttacagaccactgaacattcggatcgtgttggtaggcgtggaagtgtggaatgacatggacaaatgctctgtaagtcaggacccattcaccagcctccatgaatttctggactggaggaagatgaagcttctacctcgcaaatcccatgacaatgcgcagcttgtcagtggggtttatttccaagggaccaccatcggcatggccccaatcatgagcatgtgcacggcagaccagtctgggggaattgtcatggaccattcagacaatccccttggtgcagccgtgaccctggcacatgagctgggccacaatttcgggatgaatcatgacacactggacaggggctgtagctgtcaaatggcggttgagaaaggaggctgcatcatgaacgcttccaccgggtacccatttcccatggtgttcagcagttgcagcaggaaggacttggagaccagcctggagaaaggaatgggggtgtgcctgtttaacctgccggaagtcagggagtctttcgggggccagaagtgtgggaacagatttgtggaagaaggagaggagtgtgactgtggggagccagaggaatgtatgaatcgctgctgcaatgccaccacctgtaccctgaagccggacgctgtgtgcgcacatgggctgtgctgtgaagactgccagctgaagcctgcaggaacagcgtgcagggactccagcaactcctgtgacctcccagagttctgcacaggggccagccctcactgcccagccaacgtgtacctgcacgatgggcactcatgtcaggatgtggacggctactgctacaatggcatctgccagactcacgagcagcagtgtgtcacactctggggaccaggtgctaaacctgcccctgggatctgctttgagagagtcaattctgcaggtgatccttatggcaactgtggcaaagtctcgaagagttcctttgccaaatgcgagatgagagatgctaaatgtggaaaaatccagtgtcaaggaggtgccagccggccagtcattggtaccaatgccgtttccatagaaacaaacatccccctgcagcaaggaggccggattctgtgccgggggacccacgtgtacttgggcgatgacatgccggacccagggcttgtgcttgcaggcacaaagtgtgcagatggaaaaatctgcctgaatcgtcaatgtcaaaatattagtgtctttggggttcacgagtgtgcaatgcagtgccacggcagaggggtgtgcaacaacaggaagaactgccactgcgaggcccactgggcacctcccttctgtgacaagtttggctttggaggaagcacagacagcggccccatccggcaagcagataaccaaggtttaaccataggaattctggtgaccatcctgtgtcttcttgctgccggatttgtggtttatctcaaaaggaagaccttgatacgactgctgtttacaaataagaagaccaccattgaaaaactaaggtgtgtgcgcccttcccggccaccccgtggcttccaaccctgtcaggctcacctcggccaccttggaaaaggcctgatgaggaagccgccagattcctacccaccgaaggacaatcccaggagattgctgcagtgtcagaatgttgacatcagcagacccctcaacggcctgaatgtccctcagccccagtcaactcagcgagtgcttcctcccctccaccgggccccacgtgcacctagcgtccctgccagacccctgccagccaagcctgcacttaggcaggcccaggggacctgtaagccaaacccccctcagaagcctctgcctgcagatcctctggccagaacaactcggctcactcatgccttggccaggaccccaggacaatgggagactgggctccgcctggcacccctcagacctgctccacaatatccacaccaagtgcccagatccacccacaccgcctatattaagtgagaagccgacaccttttttcaacagtgaagacagaagtttgcactatctttcagctccagttggagttttttgtaccaacttttaggattttttttaatgtttaaaacatcattactataagaactttgagctactgccgtcagtgctgtgctgtgctatggtgctctgtctacttgcacaggtacttgtaaattattaatttatgcagaatgttgattacagtgcagtgcgctgtagtaggcatttttaccatcactgagttttccatggcaggaaggcttgttgtgcttttagtattttagtgaacttgaaatatcctgcttgatgggattctggacaggatgtgtttgctttctgatcaaggccttattggaaagcagtcccccaactacccccagctgtgcttatggtaccagatgcagctcaagagatcccaagtagaatctcagttgattttctggattccccatctcaggccagagccaaggggcttcaggtccaggctgtgtttggctttcagggaggccctgtgccccttgacaactggcaggcaggctcccagggacacctgggagaaatctggcttctggccaggaagctttggtgagaacctgggttgcagacaggaatcttaaggtgtagccacaccaggatagagactggaacactagacaagccagaacttgaccctgagctgaccagccgtgagcatgtttggaaggggtctgtagtgtcactcaaggcggtgcttgatagaaatgccaagcacttctttttctcgctgtcctttctagagcactgccaccagtaggttatttagcttgggaaaggtggtgtttctgtaagaaacctactgcccaggcactgcaaaccgccacctccctatactgcttggagctgagcaaatcaccacaaactgtaatacaatgatcctgtattcagacagatgaggactttccatgggaccacaactattttcagatgtgaaccattaaccagatctagtcaatcaagtctgtttactgcaaggttcaacttattaacaattaggcagactctttatgcttgcaaaaactacaaccaatggaatgtgatgttcatgggtatagttcatgtctgctatcattattcgtagatattggacaaagaaccttctctatggggcatcctctttttccaacttggctgcaggaatctttaaaagatgcttttaacaagagtctgaacctatttcttaaacacttgcaacctacctgttgagcatcacagaatgtgataaggaaatcaacttgcttatcaacttcctaaatattatgagatgctggcttgggcagcatccccttgaactcttcactcttcaaatgcctgactagggagccatgtttcacaaggtctttaaagtgactaatggcatgagaaatacaaaaatactcagataaggtaaaatgccatgatgcctctgtcttctggactggttttcacattagaagacaattgacaacagttacataattcactctgagtgttttatgagaaagccttcttttgggggtcaacagttttcctatgctttgaaacagaaaaatatgtaccaagaatcttggtttgccttccagaaaacaaaactgcatttcactttcccggtgttccccactgtatctaggcaacatagtattcatgactatggataaactaaacacgtgacacaaacacacacaaaagggaacccagctctaatacattccaactcgtatagcatgcatctgtttattctatagttattaagttctttaaaatgtaaagccatgctggaaaataatactgctgagatacatacagaattactgtaactgattacacttggtaattgtactaaagccaaacatatatatactattaaaaaggtttacagaattttatggtgcattacgtgggcattgtctttttagatgcccaaatccttagatctggcatgttagcccttcctccaattataagaggatatgaactgagtttttcttttgttgtttgttcttagctgtaattcctatgcttctatttcagagagccaggagagtttgatattaaaggaggttaaaactgtgatcttatgccatgtcatcaatggccacttaggggccatggctgatgacacattcttatctctacagtactaatgtgttattatagagccatgcattttatttctgaataagaacatatttaaactaattattctctttacaattatggaccaggtacttactccttcccaagatggcggtatttcatcaagtgaagcataatttaagcaggcaaattccattttagcataactttaggaaccataacccaggggtatggggggtggagcggaaagcccgggcgagggaggaaatccatttaaaaatccccccaaaaaaaaaaaaacaacagaaaacacatattgtggggcgcactgagcatcgaagaaggtcagagaccacccgtatgggcacgcgaccacagcagaagaaaacggccacagcagtcacagagacacacgggaagaataggaggaatccaccaaaaaaccgggaaaaaggttgaaaag

SEQ ID NO: 189 - DNA, 4057 bp, Homo sapiens
agtcccgggccggcccgtaccgccaggcgatcgcgctgatggcggcgctggcagcagcggccaagaaggtgtggagcgcgcggcggctgctggtgctgctgttcacgccgctcgcgctgctgccggtggtcttcgccctcccgcccaaggaaggccgctgcttgtttgtcatcctgctcatggcggtgtactggtgcacggaggccctgccgctctcagtgacggcgctgctgcccatcgtcctcttccccttcatgggcatcttgccctccaacaaggtctgcccccagtacttcctcgacaccaacttcctcttcctcagtgggctgatcatggccagcgccattgaggagtggaacctgcaccggcgaatcgccctcaagatcctgatgcttgttggagtccagccggccaggctcatcctggggatgatggtgaccacctcgttcttgtccatgtggctgagcaacaccgcctccactgccatgatgcttcccattgccaatgccatcctgaaaagtctctttggccagaaggaggttcgaaaggaccccagccaggagagtgaagagaacacagctgctgtgcggagaaacggcctacacactgtgcccacggagatgcagtttctcgccaagcacagaagccaaagaccaccctggggagacagaggttccactggatctgccggctgactccaggaaggaggatgaatatcgtcggaacatctggaagggcttcctcatctccatcccctactcagccagtattgggggcacagccacactcacgggcacagcccctaacctcatcctgcttggccagctcaagagtttctttccgcagtgtgacgtggtgaatttcggctcctggttcattttcgccttccctcttatgctgttgttcctgttggcaggctggctctggatctccttcctgtacgggggactgagcttcaggggctggaggaagaataaatctgagataagaaccaatgcagaagatagggctcgagctgtaattcgggaagaataccagaacctggggcccatcaagtttgccgaacaggctgttttcatccttttctgcatgtttgccatcctcctcttcacccgggacccgaagttcatccctggctgggccagcctcttcaatcctgggtttctttctgatgctgtcaccggcgtggctattgtcaccatcttgttcttcttcccgtcccaaaggccctctctcaagtggtggtttgacttcaaagctcccaacacagagacagagcccttgctgacctggaagaaggcccaggagacagtgccctggaacatcatccttctcctgggagggggcttcgccatggccaaaggctgtgaggaatcggggctgtctgtatggattggtgggcagctgcaccccctggagaatgtgccccccgccctggctgtgctgctcatcactgtggtcatcgccttcttcactgagtttgccagcaacacggcgaccatcatcatcttcctgccggtcctggcagagctggccatccgcctgagagtgcaccccctgtatctgatgattccgggcacagtcggctgctcctttgccttcatgctcccggtctcaacgccccccaactccatcgccttcgcctctggacacttgctggtcaaagacatggtgcggacaggcctcctgatgaacctgatgggtgtcctgctgctcagtttggctatgaatacctgggcacagaccatcttccagctgggcaccttcccggactgggctgatatgtactcggtcaatgtcacagcattgccacccaccttggccaatgacacatttcggaccctctgagtccccctggaggactcccttgaggctgaaccctctcaaagggctgtcaccatcacctgctgctaggacactacaaaacaatcaaataattcttttctgtaatccaatatgcagcaagcaagggtgacctccagtggcccactcaagtccatgagccattatctaggatactttctctctctttcatgcagttcaaagcccaggtatctctcagatctgctgcctgagaaataagctcctttatcagttagctgttttatcattaggatacaagacagcccagtgtcatcaacagtgagcaaatctggcatggtgtttgtctcgtacagttgggataggaggccattcattcccatgggcacagctaacattatcccccagtgattactttcgattacactgaagagaccaccttgtctttaaagatcactttcctgggctgcaatgttccaacccagttgttccagctgttcacaaccagtgtgtgattttgcttagttggtgcccattctgcaccagttgttttacccctgccgataaccagcagtcagagattcttttttaatccttggagacagggaaagggacagatagctttccaaggacatgagactgtgcaaagcctctttgctgtttctctgggctcctgagcataccaggggaagttctagaaaccgcagctgacatctcgacccaagagatttaggattctcctgtttcatctgggtcagtttggccataattctggggtcaggccaggcctgggtcctgccctcccatggggtgactcatgacccctccagccaggactctcctacatgtggcccccataggcctctgtggctgcaaggcggtcagttgctgcttgtcccagcaggtggccttgatctctccatgccccaccttaagtggtaagcatgtttaattatcaaaggccccatttgtcaggggtgagagaaaagtcaaaagataaattggggccttgtaaaaggccagggtaaaatgtctcaggcaagcaaaagattgtccccttctgcatatgggtaaaactgagacgtccccgtgagcccgaggctggaagtggtgtctgccttcaagggttaatccctctttgttccaagcagaagcattctggcatcccagtgaagagctcagtccctcaggaagtgtctgctgaatggaatggcccagcattagcccagtattggaaaagacaccagcccaggggccctgactcgtcacacttccctttcctaagcctctgagggtggagattcccctaggagcgcttggccagctgggaaggcagcgcccagctgcacttgttgttgatacagcataagtgaatcatgggcatttccctgagagcagtgggagaggccctctgagttggaagttgagctccacctcctttccaagcgagcactcagtgttgaatcacagttacaacccactggggctggtgggagatgcgttgtatgggactggaagcaagaggttcattcaaagagaaactcatgggatttgtaaccagatgaatcatgatttctaagacttctgatcaaaaatactgtgaaataaagaatgttaatcaactttggacctggagatgatttgcctttctgaacattaaaagagcttaaaagccccaaaattcctgggcttggggattccacagagttgacctctctgattttctactgctcttccctcccctctccagctacatactctgcctcagggccttcgcatgtgctgttccctctgcctagaacactctctcccaagtatatgtctggttccccgactcactttattcaagtccctgctcaggtgtcaccttccctgagaggcttccctgacctcctgtctaaaatgtcaccctcattactctccacccccttactctgctatattttctccttaatagttaggacactgtataacttattttcttattatcttcttctccctctagaatataaatttatgaaaatacaaatgttattttttttactgctgtaactccagttcctagaacaatttccagcacatagcaagtgttcagtaaatatttgctgcttgaatctgctccagaattaacaagaaagccatctcttcctctgatctggggtctgttttgttcattactttgttcactccttcttccatttattcattcaataaacatttattgggaaaaaaaaaa

SEQ ID NO: 190 - DNA, 2644 bp, Homo sapiens
atacttacctggcaggggagataccatgatcacgaaggtggttttcccagggcgaggcttatccattgcactccggatgtgctgacccctgcgatttccccaaatgtgggaaactcgactgcataatttgtggtagtgggggactgcgttcgcgctttcccctgccgagagatctgagcccgacagccccctgtccagctgcggccacagccagcctccttgcctccatttcccgaattgcccaggaccccagctctgtgtccccaggaggcactgggggccagaagctggcccagctcccagaacttgcttctgccgagatgagtctccatgtcatctacctgcaccagcttcaccagcagcagcagcagcaggagccgtggggtgaggctgcagcctccatcctgtccaggccctgctccagcccctcacagccaccctcgcctgatgaggagaagccatcctggtcaagtgacggctccagtcctgcctctagccccagacaacagtggggaacccagaaggcccggaatctgttccccggagggtttcaggtgaccacagacacccagaaggagcctgaccgggcctcttgcactgactgagacgactcctcagggccccactcctggcagctgagtgctgcacctgccttctcgatcacgagcctgagaactgcacgggggagcagcccagactggctggaaaccatgttttcagagtgcagggtcaagtggcgtcctctgggcagatgtgagaaggcaccacctcaagaggggaggagcggggctgatcctggtcgggcggacctgagtcgggcagccgctctcccggaactggaagggaaagccaggcggctctcaggggctgttggtgtctgagccgggagggtcgaacgcccagggcactgcgccccgcaactgacgctcctgcaaggaaaagctctggcacgccgatgacgtcgccggcctcgtccagctccatgtcgccctccgtcgccaggatgcgctgcacggtctgcaggacgttggttgccatggtaacatcgccgcagacaaacatgtggccccgctcgaggcacagcacgcggtgcacctccgcagccagctccgtcctcaggatgtcctgcacgttaccattgcgccctcagggtctcacaccttggggttgtcaggttcccgggagaaggcggtgaggactcggccaaacaccccgcgctgctgggcgttctgcacctcgtcgcggtagagatggtcaagttgggagcatcggcagccgaacaccaaagtcatgggagtgggctgcagccctgcaagcaaccccgcgcttgggaaggctcttctccggggcacagtgctagtggggcctccccacaggccaccgtcgcccagcctggcagcccagcgttttgggctgaaaccaccattactttggctgtttcatctctaagagagtgtagaatgctttcacagagaccctgcacagccctgatttacagagggaagggaagcgcgggtgaggtggtggcccctggtggagctgcgctagaatgcgcggcttcggactcagaattccatgccctttgcattgtgtgacatcgcagtccccttccccgctcccacttcatattctcccatacttataactctcctcccagtcacagccctcttcttttgattgacagaccaccctgggcaccccatgctcaatatgaacaccttgtagcatccttaggtcttggacagacctcggtcagctctggcacagtcaagaatccaccttgggcagttcttctttgagtcttagccctaatccctttgaaaattctattttcctttgtcctcaatccagtcaacacctactatgtaccaggcaccaggaagccagaagctcagggcccagcccttgcctttggtacctgccctccccttggtctcatgagcgtcttttcagctttgtggactttgtttcctgccaaccaccattactttggctgtttcatctctaagagagtgtagaatgctttcacagagaccctgcacagccctgatttacagagggaagggaagcgcgggtgaggtggtggcccctggtggagctgcgctagaatgcgcggcttcggactcagaattccatgccctttgcattgtgtgacatcgcagtccccttccccgctcccacttcatattctcccatacttataactctcctcccagtcacagccctcttcttttgattgacagaccaccctgggcaccccatgctcaatatgaacaccttgtagcatccttaggtcttggacagacctcggtcagctctggcacagtcaagaatccaccttgggcagttcttctttgagtcttagccctaatccctttgaaaattctattttcctttgtcctcaatccagtcaacacctactatgtaccaggcaccaggaagccagaagctcagggcccagcccttgcctttggtacctgccctccccttggtctcatgagcgtcttttcagctttgtggactttgtttcctgccctctctttcctatttcctgccttccagccccacccctctgtccctagattgtgtgactcccttcaggcagtcctttagtcaccagcctcacctttgctctcaatgtcat

SEQ ID NO: 191 - DNA, 1802 bp, Homo sapiens
ttttttttttttgtgctcaaacattttaatcatttctgccctgttactcccaccccagatccaagcgccagcccagttccggtgggggctcagtcctccggagtccaggagtcagggctcgggggcgctcagcggccagtgggcaagattggggcctttcctgtcctcgaagctgcacaaaggtggccccagcccagaacacagggagagggcagagagatgtgctcatcagtctgggcaggcgggccgggagcagtcttccagaaacaggtgggagccagggctcattttcatagccaagggtcccaggagctccccaggagctcggccaatgggctggtccatggtgggtgaggggccagaggctctggccattgctacaggcagtaaaactcctgactctcagtgatggtcccaaaaagcacacccagaagaatgggctcaaagatcaagatggggccccagcctcccgcagagtcctgaaggaaggagtggctcaagtcaggccctgggtccaaaggccatcagggaaggaccaggctcctgtccttgagtgtgatgcatccatcctggaagtagggccagctcagtgctcgctgagccatggggagaggaggcccagagccaggcccagaggcaggaaaaggatgggcctcagcaagccctgggctggggcagagctgaaggccaggtggctgccacagaggttgctgtcgggctgggactcctgggtttggggcaccacacgaggctggagttctgtcaccttgctttggatccaggaggcatagctggaggccagagtgtacacaccaggcctgttgcgggccccacaggcatctccccagctcacaatgcccgtcaggtaccagagaccctccacagggcaggagagtgggcccccagagtcaccctggcaggcgtccttgcccccctccacatagccagcacacaccatgtcctcttggacaaagtgcggctcctcaggcttggcgtcgatgttgtacaggcagttacacgtctcacgactgatcagaggcacctcgagttgctgcagtggcttgggcgtcaggaggctcactgagggggccacatgaccccagccagtgacagtgcagtggaggccgttggggaaggaggcgttggctgcagggaggcagatgggccggatgtagcgggagaaggtgatgggtctgctgagttggaggagtgcaatgtcgccctgggagccctcctggaggtagctggggtgggggatgatgtccttcagggtgctgaccttggcgtcctcggagtaggagtctagctggtgggcccccagcttgacctcataggcttccttgtggtgctcgctggggaagcagtgagcagctgacagcacccactgctcagacacgagagagccaccacacacatggacgccttcataggtgatgctgacctgccagggccactgaccggcgactgcactgctgccacctgtgatgcgtgcttggggggccacaccgcagggagcttctgccccttccgctcctgtccccgaccggagtaatccaagatagagcagaatggccacagcccccagctgcccaggccccaggacccccttctgggccatggcccaggacaagggcccctggggcagactccaggcacgcaaggtaggaagccttggggtggtgtcgaaggcaggacccagatgttggctcagagggaaggatcccagaatccgggctggaaaggggcagcaagtgtccaaggctggcctctaaggcagggagcggccgcaacggcctcgtgcc

SEQ ID NO: 192 - DNA, 605 bp, Homo sapiens
gcacgagctggtcaggaactctagtgctttgcatagccctggtttagaaacatgttatagcagttcttggtatagagcaaactagaagaaccagcaatcattccactgtcctgccaaggtacacctcagtactccccttcccaactgaagtggtatgaggctagctctttccaaaagcattcaagtttggcttctgatgtgactcagaatttaggaaccagatgctagatcaaataagctctgaaaatctgaggaacattgtaggaaaggtttgttaagcatctcttaagtgccatgatgagcataacagccggccgtggtggctcacgcctgtaagcccagcactttgggaggccaaggtgggaggatgacaaggtcaggagttcaggaccagcctggccaacatgctgaaacctcacctctactaaaaatacaaaaattagctgggcatggtggcacatgcctgtaatcccagctacttgggaggctgaggcaggagaatcgcttgaacccgggaggcggaggttgcagtgagccaagacagtgccagtgcactccagcctcggtgacagcgcaaggctccgtctcaataattaaaaaaaaaa

SEQ ID NO: 193 - DNA, 5099 bp, Homo sapiens
ttttttttttttctacaaaaatggtgatttatttaacatacaatggtagatatattggggatcatcaaatttttaaaaatttttgttgggcttactttacatattacaatactaacgtaagcttataaactcttccatttcagtgaaggaaagggatccaattaacacctgctagcagcttggctaagaacggacattaaaatcagacaaaacactgaaaatataaagtacttttctccaaatgtgtatacaaagttttggaacaaaatcactgcctgctccacaggacagacaatttgaatttcaaaaatgctccaggccgggaattgcataaccctgtgtaacaatacttataatacagcttaacaatattgtatcgaagactttttcatttgagatttttaaaaaactgaagtaaaagaaaaacagtagccaaggaactgcacaaccaaaaaatgaaaattatataaaatatttccaccactatttaaatgccaaatttaatcaagcaatagtaaaaaaacaaaacaacataataatacaaccttctgtttaaaataacagcactgttccacctctcttccattgaattttacatatgaacagactatatatactggttttttagagaaatgtccatttggtctgccacacctatcgggctcatcctaaatcctctcattgtcttcagaggacttgcaactccatgctgtttctgtatttccagccttccggggtaggtgcaatgtctcaagtataatacatttctcccttttcctttacacagtgcagagtatatgggcttaggttatgtagattctgtttcactccaggtcactgtctttctctaaattcaaggcggtattcaacggagtgcagtagtttggcttgtcagaaggcacgtagcctggcagacacaaacacttgtaggaaccatcggtgttaatgcacttggcattcttgcagagagacatccggttgttcaactcatcgcattcatttacatcgaaacaggtcatcttggcagtatccaagtgatacccatccaagcaatcgcaggtgtaaccttcctggaccctcacacagcgaccattttcacatccattgaggatgccgcattcctcagcctgtaactcctcaaagctatttagaaaacggtcttggatgaagtagggatcggcttctggagtatactgttcactgaagtcaaccaaggcgtcccgtccatatggctgccggcgtcccgtcacggggatgttacacagctgagcatagtcatctgaatccttcagggggcagagggcacactgcatgccccaggcctctccatacagacagcagcactcagtgtacgttgtctgcttgcccacaagaggccggctacacacgtattcatcactcagatgttcccagcacaaatcttggtagacatcagtttcttctatttgttcgtttgactcagccggtcgtatacatcttttttctgacgcatccaggaccatggggtgagtacagaagcagttgtaagagccctctgtattaacacactggccatcaatacaactactggggtcttgacattcatccatatcaaagcactgcagtttcacaggatcatagtacgtcccttgcttacagtagcattcatacccaggccgagtgttcaaacagaaaccatttttgcagatttcttgtccaaaaagtaggcattcatctgcatctttatagttctcaccaccagcttcagaagatgattctccagcaggcacaaaacctttccctttgggacacatttcagtgaactcagcagttcccaagaccgggcaggggaagatttcgcagttatctccccatcccgcgcctgatgtacagcagcattcttgtttcgtgacattgggggccaacacattatcacagagactggcgtcattgagattatagtagcattctttcttttcttctttgggttgatctacatctacatctaaatctgtggaggtccgggagcggcactgcccagtcatggggctgtactcttggttttcatcagcacacacgcacaggaaggacccttccacgttttcacagaaggcttcaccacacaccccactgagcagttcacattcattcacatccacacacccttgcccatcctgtggggcttgaaagccctgataacagaggcagcggaaggagccagctgtattgtcacaaaacccgtgactgtcacaaacagtgttgtttacacattcatcaatatcttcacacgtacggccatctgcagagattgagaaaccctgctggcagacacaatggaaagaaccctctgtgtttaggcactccccttgcggaccacagagccctggatgttcacattcattaatatcttgacatgttttattgtcatctagctgaaatccatccggacaagtacaatcataggaccctgcagtattaatgcagtctcctctctggcaaacactcttgtcctccaagcattcattgatatcttcacagtggtctccaagcccagatgctctgtaaccctggtcacacacacattgaaaagagccctcagtgttcctgcactgcccatgagcacagagatgacggtgctggcattcatcaatgtcttcacactggtctttagctgccgacagctggtacccctgtccacaggtgcacctgaaggagccctcggtatttttgcactgcccgtttacacatagattcccttgctgacattcatcaatatctctacagtgcttgtggtccggagtccgggtatagcctttgtggcatgaacacatgtaggagccttcaaggttggaacaatcaccatttgcgcagacgtttggttccaggcactcgtccacatcaaggcactgtccattccagcctcggaatccttctgtgcagggaacgcactggtaagatccaggagaattcacacactgctcatctggacaagtgcttggattcaaacattcatcaatatcctcacaacggcctctctgagtcatgcggtacccgctgtcacagtattcacaccggaaggcccccacagtattgacacagtgcccctccccacagacgtccggcctcaggcattcgtcaacatctatgcagttagtaccctcctcactggccataaatcctgctgggcaaatgcacaagaaacttccctcggtgttttcacagcggccctgggagcagaggtgttggacctgagtacactcatcaatatccacacatttcctctgttgttcactgaacctgtagccctcgtagcatatacaggtatatctcactggtaggttaatgcagtgtcctgctccacagatatcagggttcacagtacattcattgatttctgtcacttgagtaggagcaatcacttggctggcactagacgtagaagcttcaggagctacttcaacaggcacaggaggtgatgttttttcaatcactactggaaactgtggatgcagatgaatagcggaaatgcctggagacagctggggttgaccaggctcaagtttggttttctcttgatccaatgaaggtatttccttttcagggggtgcagttgccacttctggctccgcactcctggccccgtgttcccgggagaaggtcagggcctccactggctcttccttggctgggagaggtggaggatgagtacttttagcaacaggttgagtgttctttggcttgacaaatacaggtcctttacctacatggtgatggattggcctgcgtctatgaacgccagaaaccgtataacccattccaccaggacagatttccttaaaagcagctgtgcctggaaggggacatttctcacagtgtggcccagccttgcccacactacaacagcagagctgcttggtgaggtgaacagacagagggtacatacactgtcttccagaactgacaagtcggtaacagggccctttctcttccgagatcacagggggatcaggaacacaacttgaaaaggtaggatccggcccaaatcctattttgcaggtacatcgatagctgcccatggtattcaaacactcaccattagggcatacaccttgtagctgacattcattaatatcttggcaaaaggtgttgttaacccgcttataacccggtaggcattccatcatttggttgtatccatgataagatggtttcttggggcatttctggcatttgttaaagccccaggaggtacccacagttccacagcagtcctcttgctttgaaaggccagggagcgctttgccacactgtgacccaatggtttcctggaagcaccggccaagctgtgtcttagcagccacggggtagacgtgaggaatgacctgctggtgggagtatgtggaatgtatggtctgggtcttctggacaggaagcccttggtacgagacttgggattggcctggttgagcttcttttgtcttctggcctgttgggccatcaattcttgaaacctgatgtatctggacggaagcttcaggaggatgtttcacatggatattgactatgttaggaggaaatttcactttgactccttgctggctagtcacggtcagaggcaaggtatgtgttgaatggatgacatgcgtccccaacgccttgcctggctgctgggaatgctgataaagtttaggcacgctggcaccatggactgggatctgacaaagttttcctgtgaaatttggagggcactgacatttgtcccttgaactgcactggccaccattcatacatggaagatggcaaattaccactcggaagttcgtggccgtcagggtgtcggcagcatgaccattctcactaatgagagtggtggtgttccccttctcacagctgttctgacagctgcccttggtgcaggtcactttacagatgctcggagtaaagaccaccttgatgcggccagtgtggttactcactaggagcggaggcagggagaaaaagaacaacaaacacatcagcttagtatccatgaacttgccttggaaggtttaaaaaaacagaaaaaaagaaaagaaaggagcaagaggggaaaagagagagcccacctcgtgccgaattca

SEQ ID NO: 194 - DNA, 1396 bp, Homo sapiens
atatcgtcgacccacgcgtccgccctctgcaggaacccggcgatatggctgccgctgtgccccgcgccgcatttctctccccgctgcttccccttctcctgggcttcctgctcctctccgctccgcatggcggcagcggcctgcacaccaagggcgcccttcccctggatacggtcactttctacaaggtcattcccaaaagcaagttcgtcttggtgaagttcgacacccagtacccctacggtgagaagcaggatgagttcaagcgtcttgctgaaaactcggcttccagcgatgatctcttggtggcagaggtggggatctcagattatggtgacaagctgaacatggagctgagtgagaaatacaagctggacaaagagagctacccagtcttctacctcttccgggatggggactttgagaacccagtcccatacactggggcagttaaggttggagccatccagcgctggctgaaggggcaaggggtctacctaggtatgcctggttgcctgcctgtatacgacgccctggccggggagttcatcagggcctctggtgtggaggcccgccaggccctcttgaagcaggggcaagataacctctcaagtgtgaaggagactcagaagaagtgggccgagcaatacctgaagatcatggggaagatcttagaccaaggggaggacttcccagcatcagagatgacacggatcgccaggctgattgagaagaacaagatgagtgacgggaagaaggaggagctccagaagagcttaaacatcctgactgccttccagaagaagggggccgagaaagaggagctgtaaaaaggctgtctgtgattttccagggtttggtgggggtagggaggggagagttaacctgctggctgtgagtcccttgtggaatataagggggtagtgggaaaagtggtactaacccacgattctgagccctgagtatgcctggacattgatgctaacatgaccatgcttgggatgtctctagctggtctggggatagctggagcacttactcaggtggctggtgaaatgacacctcagaaggaatgagtgctatagagaggagagaggagtgtactgcccaggtctttgacagatgtaattctcattcaattaaagtttcagtgttttggttaagtggacctgaagccattcttttttcttttcaaattatactttcgtctatgacctgctttcctctttgaatctaagctggtatagactccactttcccagggtaacaaactatcctcataacactgtggaaactggcatacctttgttattttccagtgatattcagactgacatggattgactgtcaatggtaaagtttgtctattttccagtccttaaaactcaatagcacg

SEQ ID NO: 195 - DNA, 1309 bp, Homo sapiens
ttttttttttttgatttttatttgggtttattaaaaattttttcaaagtaatacatgcacaaggtaaaaaattaaatagtacagaaggacttaaaatgaaaaacacagtttcccatcccaccctttttaaatctaaatcccattccctagaggtaatgcttttaacaatatttattttagatcgtctggtaactttctaactttaaataatatgtttgagcaataatttcttgacttactgactttacaacatctttaataattccccattacaaaagataaggatttaacttacactatcgccactttcctttgtccatctctctccaaatgtctgatagttacatcactttttaatacatctattggtttgattttatagctttgaacaatacactaatcctctagttcttgttccattaactgaagatcttttcatccccactttgaatatataagtatctctacctttgattccacttctcttcctctaattctcaatctctttctgctttctttccctttgtcagcattaattactttcaacttcagttctgaataaaaaatgaaacctttcacactttgttaataggctgatctgaacattgaatactaataaatgatatccacattattttggctatttaaatacttcttactgggagcctagtataagctaggatattttcttccctacacacccaatatcatcatgcctgtgccatagaaaaggaaatgtacctatcaagcctcttcttattcttcatgaataactcaaaatcatgcctcattttattttgctctataattggacctgaattttttgacatattgttgatttgtctttcttttttcttgactaaataatcttctcaagcatcccagctcttcaatgatactatctatggcactgaatgcacattcttcccagaaagcccgagacagtatgctctcatctgaaattagtctgctggatagctgtcactctagggtgagatacccttttggctgtcactctagaatgagacatcctaagtaaggtccactgttttatggatcccatttcttcttctttcctggttttcatcctcattttgctggagaatttcctcaagatacttcctcagtaagggtgcaaaggagactttctgaaaatttgcctgacagaaaatgtcttcactttgatgttcttcttgacagtctgccttactatgaaattctaggtacaaaaattttccttaagctctgaagatgttgatccattgacttctggcattcagtgttgctgatgacaatctgtacaccgagg

SEQ ID NO: 196 - DNA, 4185 bp, Homo sapiens
  misc_feature (1)...(4185): n = a,t,c or g
gcttatggcggcgctggagagggggcgctgagctgttgggtatgaagtgtaacagaacagactttaccacctgaaactgctgcttcaagttcagatcaggcaaggaacaaacctcgtaacaactaacaagaccaaagaagagtacacttaagttgaagacacaacacttgatctgaaacaagaagtttgtgcctactcaacagctttgaaagagcacttcccaacgctgctagtagtctttgttttcttcagtgctgtactgtgagattgcccggtacagcagcagttgtattctttattagcttggtagatcattttctctcgctcttttttttaatactagcaactttcatcctttgaaacgtgtgctgaaaaagaagaatcagcaaatactactgaaagtgcaatatttgagtatcactgcgagatgagctttgatccaaaccttctccacaacaatggacataatgggtaccctaatggtacttcagcagcactgcgtgaaactggggttattgaaaaactgttaacctcttacggatttattcagtgttcagaacgtcaagctagacttttcttccactgttcacagtataatggcaacctgcaagacttaaaagtaggagatgatgttgaatttgaagtatcatcggaccgacggactgggaaacccattgctgttaaactggtgaagataaaacaagaaatcctccctgaagaacgaatgaatggacaagttgtgtgcgctgttcctcacaacttagagagtaaatctccagctgccccgggtcagagtccaacagggagtgtatgctacgaacgtaatggggaagtgttttatctgacttacacccctgaagatgtcgaagggaacgttcagctggaaactggagataaaataaactttgtaattgataacaataaacatactggtgctgtaagtgctcgcaacattatgctgttgaaaaagaaacaagcccgctgtcagggagtagtttgtgccatgaaggaggcatttggctttattgaaagaggtgatgttgtaaaagagatattctttcactatagtgaatttaagggtgacttagaaaccttacagcctggcgatgatgtggaattcacaatcaaggacagaaatggtaaagaagttgcaacagatgtcagactattgcctcaaggaacagtcatttttgaagatatcagcattgaacattttgaaggaactgtaaccaaagttatcccaaaagtacccagtaaaaaccagaatgacccattgccaggacgcatcaaagttgactttgtgatccctaaagaacttccctttggagacaaagatacgaaatccaaggtgaccctgctggaaggtgaccatgttaggtttaatatttcaacagaccgacgtgacaaattagagcgagcaaccaatatagaagttctgtcaaatacatttcagttcactaatgaagcccgagaaatgggtgtgattgctgccatgagagatggttttggtttcatcaagtgtgtggatcgtgatgttcgtatgttcttccacttcagtgaaattctggatgggaaccagctccatattgcagatgaagtagagtttactgtggttcctgatatgctctctgctcaaagaaatcatgctattaggattaaaaaacttcccaagggcacggtttcatttcattcccattcagatcaccgttttctgggcacggtagaaaaagaagccactttttccaatcctaaaaccactagcccaaataaaggcaaagagaaggaggctgaggatggcattattgcttatgatgactgtggggtgaaactgactattgcttttcaagccaaggatgtggaaggatctacttctcctcaaataggagataaggttgaatttagtattagtgacaaacagaggcctggacagcaggttgcaacttgtgtgcgacttttaggtcgtaattctaactccaagaggctcttgggttatgtggcaactctgaaggataattttggatttattgaaacagccaatcatgataaggaaatctttttccattacagtgagttctctggtgatgttgatagcctggaactgggggacatggtcgagtatagcttgtccaaaggcaaaggcaacaaagtcagtgcagaaaaagtgaacaaaacacactcagtgaatggcattactgaggaagctgatcccaccatttactctggcaaagtaattcgccccctgaggagtgttgatccaacacagactgagtaccaaggaatgattgagattgtggaggagggcgatatgaaaggtgaggtctatccatttggcatcgttgggatggccaacaaaggggattgcctgcagaaaggggagagcgtcaagttccaattgtgtgtcctgggccaaaatgcacaaactatggcttacaacatcacacccctgcgcagggccacagtggaatgtgtgaaagatcagtttggcttcattaactatgaagtaggagatagcaagaagctctttttccatgtgaaagaagttcaggatggcattgagctacaggcaggagatgaggtggagttctcagtgattcttaatcagcgcactggcaagtgcagcgcctgtaatgtttggcgagtctgtgagggccccaaggctgttgcagctcctcgacctgatcggttggtcaatcgcttgaagaatatcactctggatgatgccagtgctcctcgcctaatggttcttcgtcagccaaggggaccagataactcaatggggtttggtgcagaaagaaagatccgtcaagctggtgtcattgactaaccacatccacaaagcacaccattaatccactatgatcaagttggggggaatctggtgaagggttctgaatatctccctcttcatccctcccgaaatctggaatacttattctattgagctattacaccagttttaacaccttcctcgtgttatgtttaaaaaaataaataaatttaagaaaaccattttaaataatgcacagttgcagcctggaaaaacttaaggtggcgccttatagtatcaattttaggagctttatttggtgcatttaacgcaactggtaattgcagaatccactttgcctgtgtaagtgaaaaatatagactgttatcttgttggccctatgaaattctgcacttttcattatatactctaccttcattaattacttctggcaagatgttctgccttagcactcagttgcattcttttcctttttcttcctgttcattatgctttaattctgaggaccatatgagggtagaatatattatcttttaaaaattacaaaaatttgtataggcaaaccatttcttaaagttgatggccaaattttaaaatgttatttttcatatcatttataatcttgtcacaatccacttaaagaagtttggttatatttcagtgaaaattttcttccagagtaggttttttttcgtgggttggggggtaactttactacaattagtaagtatggtgcagaatttcatgcaaatgaggagtgccagcagtgtgataatttaaacatatttaaacaaaaacaaaaaaaatgaatgcacaaacttgctgctgcttagatcactgcagcttctaggacccggtttcttttactgatttaaaaacaaaacaaaaaaaaataaaaaagttgtgcctgaaatgaatcttgtttttttttataagtagccgcctggttactgtgtcctgtaaaatacagacacttgacccttggtgtagcttctgttcaactttatatcacgggaatggatgggtctgatttcttggccctcttcttgaattggccatatacagggtccctggccagtggatctgacagggtgtgttttacaaactgcaaagggggtcgcacgcctccgagcagttagcggaagggcgggagttatatttccctccctgtgtttataaggggtagatccccgggtaaaaagccggtatttgtgataaagcaaaaatttggctttcacaaccttggttnatcggcacaaagaatcaccaacgacttatcgatgttgtagaccacaactacacacatcaatctagaaaaactacgtaaaacactagtctgcacgacgtgcaacaacatccatctatgaggcagtctgacacacacgccgaagtattat

SEQ ID NO: 197 - DNA, 1156 bp, Homo sapiens
ttttttttttttgttttttagtataaagagtagtattttattgaataagatttgctcacagaaaaataagcttacatctacaatgaatgccagaccctacagcagaaagccattttctcacttttccacacacaatggttcctactaagtgaaaaaaaagccataaaatttcattcacaaatgtactactctgtctcaaaacatcgcacataatcatgcactgtactaaagccattagatcagttcttcagtcaggttaaagaagtatccctctaataactgacttttataatgctatcaatatccactcccaatcagtctgccattgttaatggtgtacagcattactgaatacaatggaattgatgacgcccatatccacggacaaaccgtgacttatgatggtttgatttacgatttttcaacgttatgatgggtttactggaatattagatgcgtttctgagttacactgggtttatgagtatgcgaccctatactccagaaacagctgtagaaggaaaaacaggtttacctaatgaaaatatgcttagtgacttgggataaaccaatagatgttcacaactgatggagagccgtgaaagagagataacggtaaattgttacaataacacaattttcctgcacctgtcgaggatttccccaaaaaaacgcagaatgtgggatgcacctaaggcataggaaagagagagggcagaaggagtaagagagaaataggaggaaggagggaaggaaagaaggaagtcaggaaggaaggaaggaaggaaggaaggaaggaaggaaggaaggaaagaaggacgtaaggaaggagaaaacaccggtgttactaaaagcccccaaaaaaatggtttccccctgtgggtaagcctacaatgtggacgaatcttgaaaatattgtgctacgtgttatgtcagtcataacagctcccctattgtgcaattccgcttataggaaatgtccacaatatggtaatctatgcatatgggattgatcgcactaggtagttgctacctagggctgagggtcagggagagggtttgagacagaatgaggagtgactaatgtctacagggtttttctctggtcgggagtgactatagtcaaagcaatttaattgtacatttttaagtaacta

SEQ ID NO: 198 - DNA, 6906 bp, Homo sapiens
gtgatctacttattgtcacgaatcccgaacgttggttgacccacgtccaccatattgtatttctctcgcatcaatctgttggttccaactatccccacgacgaagcggttctctcacaatcctacgcgacttgttgcctcggcagcgctttataaggcgccgcctgttgctctattagatgtcgctctctcttgggggcgccttttacacatagatgtgggtggcgcttaattctgtgcccctccccgggatatttttcgcccctcccttttttttttgttgttttttggtgtttagtggtggctgtttttttttcatactcagtaagtgtttaatgaagaagagacagatggaaagagatgggcgaggaaggctgatgttacaaatataaactttgtcagcactttcaaaacaatagcaaatacacttaaatacatacaaagtttattaaaaataggttgcaactgaaatacagtagaaatggaaaactacagcagttttgatgttttctcatagtaatgcagttctgaaaagcacttttacacatattcacatttgacctcactgcccaaagatggccaaatccacttgtgtatgggtttcacaaccacacatacaaatatccctgtatgtagatatttacatgtatctgcatgttctcctgtgtatttttctatatattaacagaaaagtaattcatctgcatctctttaaagaaagtgtggatttagtcaccataaggctgccagtgtcctcaagatatttgggaggtgcctgcttttcctagaacttctgctgcaagcaagcaaatccttcctaaacactcagaaccattcactctcttactcaaacaaggaaatggtaagagcacactttcaaataaaaaccctgatagaggtaaaaaaaaatatttacactcgcatttttaatgatttatcatacaacttttattaaaagtgatttcgaaggcagtaaaaagcccctatacctctctttgaaagtgtgcctattttcctaacatatgtaagagaacattctctttgaaaatgtgtctattttcctaacatacgtatgtgtaagagaacattctctttgaaagtgtgcctattttcctaacatacgtatgtgtaagagaacaatatggtacagaaaaatcatttggactccaccaagggctttgtcaaatagaaaatttgcttgtaatcacaaagtaatttatcatcttaacaccagacaatataaaacacactgaggtccgtctccccaacatcagccacatatccatagctgaagaaatgacagtggtaactaataattcaacaaattaaaattaaataactctattatagtataaaaatagcttgaacttccatatgagttattcttacaatatttaagttacagatgccctgtaactgaattccttccttgacggcatacagatgaaaatcgatttctttttcaaatttaaaatttctgagtgacagctgtgcttgaggggtccctactcatctcccattcttctgtcattcccagtcacatgaacattgctccaataaagatatcttcttttacagacgccttggagcgaagtattagtgaactttccaaggtaactgtcatctttaaatttaacagtgatttattaagtctaacaataatctggtatttataaaaataaaatcccctaagcttaaatcctcaaaattttctttcagaattaaaattaatcaaatatttagaattgatcagaagagctcaaatttgcgaggaatgagatggaacagtctcggacgtgcgtcatcacacaggaagctttggcctaagccacttcacgatgcagactagaaggatattgtgggaacagacaccatcaggggacatgggaggagcatgtcgtcatatgttccttcccgggtagaagagcgtgtggtcactactaaacagtgccaacaatagtctgaatagttcaagctattctctgcttgacagctaaaataaagtttctgaaaaaaacagaaacagaacttctttgtgctcctcggtcgatgatgaggggaagatgggagagaagacacatccattctcttctcctgcccttagttctgtcccctttgaactcaggactccaaaaaagaaaccaacaaaaaacttaccctcgtgtgagttagataattaagaaactagacagtgtttaaattacataaatggcaatctcatggtaaagtaaaataaaatttcttggaattgaaacatttctaaatcccaacaattttagaaacagaaattgtaaatcacttagaaatataacccccttcctcttttcctcttcaaactcgcacctacaaacccacaactgaaaagattttggggtaaatacaaagtgttctcctcattttctttcactttgtgttcagttcattctccagttctgttaatttacgagaagctttcactttattggatacatcttgaccttgtgaaaaaagacgctggcgttccttgaatgtcaagttttcaggggccccagaacttccaggtgaatctgcatcttggcttttagagcgcttctcttttgcatcccgacaggcgtcatgggctccaacagctgctccagtagatcctgggtaagagtttggtcctgctaggctgcagtcctcctcctcctcctcctcattgtatgcaacaaacttggcagtgaacagcgagtcgggggagaggacctgtgttttgaggtaggaggcgtttcgctgaggcgggggaggaggggcgccgggcgggggacggggacgggggctcgtagtcccggggaagcggagggcggcacagaccgggcgcctcgggctccagcaacctgcgcgccgcctcgtcgtgctgtctgcgcctctcggcttccaggcggctgtaatacccttcttcctgtcgcctcttttcttcagcgtctcgttttgttcgctcctcctcctgccgccggcgctcttcctcttgcctcgctcggtcttccgcttcccgcttgcgcatctcttctaactgctgctgccgcctccgctcctcgtcctgcaacaaatctagaacagagattgctggcatagcagtcctcgctcttcgttcagcctccaggcgctgcatgatcagcatggtgtccacatcatcgtcctcctcctcctcgtcatcttcgtccttctgcttcgactcctggagtctcttctggaactgccactccagcatgagcttgcgcagccggtcgctctcctcggcgctgcggtccggtttgctctggagctcctggatctccttgctcagcatgtccacgatgtgcatctgctgctgcttctccagcttctccttggcgtcccgcttccacgggtcggggggacagactgtccccgaggaaagctcctctttgctgactgtaatgtactgcaagtctctgcgctcgatcgtgcggggctgctgctgaggctgcagctcccgaatgactgtttcctgtggccgctggagtgtggaaggcttttcgggcttcatctgctgtgcagtcaggggagaaaacggagcagggtttaaggactgagtgcgcatctggcccaacttcctctcctgctctctccgcttcctctcccgctcctcctccaggcgggccttctccttctcataccaacgctgatgttcttctctctttctccgttcagcagcagccacctgcgcagacggcagccctatctggttggcggaagggggtggtgggagaggcaaatccatggacattccatcgaaatcaccggcatagtggactggaggtggcgggggtggcggaggcaggtctgttcggattggctgggagacggccacaggggtggccggtatggctgctggtgttttccaacggccagggccacttttggtcagtgtggaagcaggggtgaccgacttagaggaatggttcagatgctcctggctagaggtactggagtccagtgaggagctctgatttatccacatatcactatcagactttcggtccatagctgcctctattcgatgccgctcaagttggtaagctttatcttctcgaagttcttcttgggaacgtgtaacacgctgaattgcaatactggaatgattactatctgtgtgcatatgtggcttttcctcataatttggccactggttctgaggaggagccatccgatcctgggatttggaagctgggaaggtaaaatactctctggtgtacgtctgagtggggatggggtaggcttcaggtctaggcggaggcgtctgctcctcagtgcagaggtttccagtagagacagatgttatcttcgctgttgttccagaggcatatgcacttttccctccaggactaggaggctgatttgctacgttggggctggaacggtgatcagctctatttttcatcagtctgtcatcaccaggcaatttctttggttcactatattctgcccaaggcagctgaggactctcaggagacccattttgagttgaattattatagagctcaaagccttcactctttggtcggggtttacctgagccacgacgatctgaaattctctgcatcatgggggatggctgattgagaagggtggccagaccgtggtagatggcaccctgctttgctacttccagtgtcaccacagagcttgttcttgtcatgagttctgccgccctttcctgagagagtccaaccagacttcgtccatccacactgaggagctgatcacctgcagctagacgtccatccacatctgcagcacctcctttcacaaccgacttcacgtagattcctagtttatcttgaccagcaccctttgctgcaacaatgctaaggcccattccattctgcttttttagggtcacagtgattatttcaggttctttcctcagaggctgagccagctctgtgttctcacgcagaaggtgactttcataatctgcaccttcaaaatatattgtccaagtacctggtgaacgtgtgtgaggaattaacctgcaaaatcctctctggcacagagggtctaaaaattcttgtaaaccatttggaatgtttctgacaacatcacaagaataaccatcttctggcaaaagaaacggcagctgcagatcaggatcctcctccaactgcacttcccttccatcactgcgggccagctcatcggcagtgttttcagccacagtcactacattttctataagatccgttgggataaaaggctcatcaggtgcacagtgatagttctgtaataaggcttgaagttgtaatgaatttaacttaaagcaggtgctgtttatatttggaatgtcatcaggtgcatacttatccatggtaagcaaagtcgttgcctgcacgatcctgctcagatgacagtccgcagccagttccagcccctgcttctcagcccaggcttcaatatggcccaactgctgacggataatcgcaccccagtaatgggagcacagccccgaatctgggtcggtcaccaatctattgaacagccacatattgatgaagtggaagagctgagagaagagctggatggtcagggcggcattgactctgcagcgtcgtagcaaggacatggctcctgtgagcgtgtgcagcacatcatctatttttggtcgttgcagactgttctcttcagggtcatctagaaaggctggcatgtaattattaagttctgattgaagacagtgaaccaagtatttaaatgccatttgaaccaaatgtgctaaaacatcttgagcatccagtgtgatccgactaaggtctcggtcttgcttaatgaagttgagaagttcagatgcatttgccatccagaaggcaagtgcccctgcaatattcttctgtttctggatgacaccctccatcatgctcaccatcttgttgacgactgcaatgactttatgtgtgcgctctgtagggctgatgtcaggtctgtactggttggacaatacataccggcatgccatatataatacatatgtaggggacaacttaaagtggactgtagagctattagtataatttataatggcagacaaaaatgaatcttcagaactttccctgaattcaatgcttgcaggtagtatcagttcaggcccagaagcatcctgtgttctgctttcttgcctgcgataatctggctgctgttctactctgatcatcggcttcaccattccccgctcggctgtgctagaggcagacgacactctgtcgctgtccagcctagtggtgctcttgcttgtcggtaatgctgtcccactatgaatatctcctcccaaatcaaaagttgtctcctgaacaattccaggtttatgtcttgggcccttaaccatcaggcctccatccacagatctttttgcaagagcatgatcctgactggggtccacaaacttaaatacatgggacgccccaaactgcactttcatgccactctgcagcatggtggtttctgagatgcgctggccttccacgtaggtttctgcgtccatacttctgggcgtcacagtgaccactccatccatgttggtaaggtcacagtgatggggctgaattcctgggccaaacaactggatagagttgtcatccaacttttctgtcccaacttcagtaacacttaactgaaggcggtaaagctttggcttatctctagagtcagaaccatcttcgtaagtgtgatagttgtagtaggcaaagtgattccttctccctgggcttaactctactaaatagggcagcttctccggaggaagggtggagccatagccagacccgtcagctctctcctttcccttgggtgtcttgccttccaagtgtttcttggttttctttgggatgtggtctggtggcctcctcttcaactgaaagactaaaatccctttgtc

SEQ ID NO: 199 - DNA, 2341 bp, Homo sapiens
ttttttttttttccccaaaaagaaagaggctttttattacattgttacaggcaatgcattacgtgagctggtcccgtgtacaatccccaagccacggcaaaacatcaggagaacgcaccgatctcacattgtacacagcgcagaacaggatcaccccgaatgtcaacagaagaccaaaaatcactttacaaaaaaaaataaaaataacacccatttttatatttaaaaaagtgccagcccttgagctgcagacattagagacgcccaaggacgtgccgccactggaacgaggccgccagccacgtgtggcccgtcctggcctttaaagctgaactgaagcgctccagacactcatctctggagttcctctgtcttaggattttccctctctactgttgtaatgtgtgagcatgtcagcctcaccacgagtgaccttcatgcgtcctacgtgtgacggccagaggctttccctttgtaaggcttaaatctgagtgcagtaaagaatgaagaaaccaaacaccagaaccctaaactcaaatgatatggagccaatttagagcggcacccccacccctcagagacagcggcattccacccctcggagagagcagcacccccaccccctcagagagagcggcacccccaccccctcagagaaagcggcacccccaccccctcagagagagcggcacccccacccctcagagacagcggcacccccacccctcagagacagcggcacccccaccccctcagagagagcacccccaccctcaaaatcctactttggtaaatattaatgtttaaccagttagcaaaatatttaacccagttagcaaaattaacaccgtcatttcgatagttactctgttgtgcatagtaaatgctgcaagatgaacttcacattggatgaagcagatttgagaaacgtttgccagaaagtgtgcctccccttcgacaggaccctaagcccagagaaaggaacagaggcccctgcagctgctgtgcctgcgtgcaccaggctagatagtctggtagcctgcgtgactcctcttcctgccgacgaggtaggcgatgaggacgatgaggaccagccccgccagggcaccacccacagcgatggggatcagcatgctgttctcgtccagcagacactcctccacagagccaaactggccaccttccaccttgaaagcctggacccacactttgaatatattgactgaaaacgccttcgtgacacggacgtgctcctccgcgttgcacttgtaggaattgccgactgtggcctgcagcgctcgcagggagccgttggcagctttaaaggcagggtctctggcgtcaggaagaattgtattcaactggattccttgtaggaaaaaccggctagaacttgcattcatcccgaactggaagagcaggacggtggtgccctcgctgtgcagctccagagtcaccaggtgggcgccgcagctcccgctggccgaggtcttgttggggttgatgttgagaagccttgtcaccgtcgtgttgtccttcctctcataggtgaggttcagctgcagccccatgctggccagcaggcaggtcccgttggtgccgctcacgttgtacttgtccacagaggggctcttgggcacgggtgagggcgaggggctgggtggcgcagggggcgctgtggttggggaaggcctgtcttgttcacagcgtgtctctcccctgctgaagctgctgttggaaaggtacgcctggatggtggcatcatggagcgttacggtcacgttgttcatgtggacctgggtgccactaacacatctgtattttttatctatatctgccctgatgtcagttatagattccacagtcttgatttctttggagctcgcattggggaaaaggtgtgtgtctgacaagttataaacaaaactcatgagctggacgctgtaacgtgttgcatttctcgtgaaattgagagtgagtgtatgtcctcttccaaaagcaatcacgagactggggtcagaagtgttctcttttccacaggagctgcggttgagcaccactgtggcatctgatggcaggtcaaaggtcatgttcttagggccactcttggtgtcgtagttcactgagaaggcagcagagaagttggccattatgcacgcggtcccgttgccatttttcaccataaacattgctgctgacgcacaatgcatgaggccgagcagcagcaacagcagtagcagcagcaggggtcgccgggcgctgccgggggccgccatggcgcgaggcggccgggtacggtgcggagagcgggggcgcgggcggcggttgggcccctcgtgcc

SEQ ID NO: 200 - DNA, 736 bp, Homo sapiens
aaggatccttaattaaattaatccccctccccccccccgggtccggaggcggcggcgcagtgcatcctgggttggcgtagccatggcgtctcgtgtcctttcagcctatgtcagccgcctgcccgcggcctttgcgccgctgccccgggtccggatgctggccgtggcccggcctctcagcaccgctctctgctccgcggggacccagacgaggctcgggactttgcagccggccttagtgctcgcgcaggttcctggtagagttacacagttgtgccgccagtatagcgacatgcctcctttgacgttagagggcatccaggaccgtgttctttacgtattgaaactctatgacaagattgacccagagaagctttcagtaaattctcattttatgaaagacctgggcttagacagtttggaccaagtggagattatcatggccatggaagacgaatttgggtttgaaattcctgatatagatgctgaaaagttaatgtgtccacaagaaattgtagattacattgcagataagaaggatgtatatgaataaagtatcagaccctttggctttgctgagagaggactcagatgatagtgacgaatgtctggcagtgaggacacattttggcattcttgctgactctgacagagtgattctgatggacttgtatttaaattgtatgtgttttacttctttttggaaaataaatctataaaaccaacaaaaaaaaaa

SEQ ID NO: 201 - DNA, 1575 bp, Homo sapiens
cgattgaggaacccatttcctcattctgcaaattgcaaacctgagggcccaaagagggacaggggcttgccaggtctcagcaggctgtgagcaagagctaaagcctaatcctcctgcctttgggctggagccttccttgtaccccagggtcagtgtctttgttggatacaggcttagattgactgactgtaccctgagaacctaggggagtccctgttcccaattcttctcctacccccaccttggcctgatggaggaagaccctgctgtgttgagatgagcaccagagccaagaagctgaggaggatctggagaattctggaggaagaggagagtgttgctggagctgtacagaccctgcttctcaggtcccaggaaggtggcgtcacgatctgcagccgcgtcgacgttgtcggagcctccgcggaggacccaggagagccggactaggaccagggccctgggcctccccacactccccatggagaagctggcggcctctacagagccccaagggcctcggccggtcctgggccgtgagagtgtccaggtgcccgatgaccaagactttcgcagcttccggtcagagtgtgaggctgaggtgggctggaacctgacctatagcagggctggggtgtctgtctgggtgcaggctgtggagatggatcggacgctgcacaagatcaagtgccggatggagtgctgtgatgtgccagccgagacactctacgacgtcctacacgacattgagtaccgcaagaaatgggacagcaacgtcattgagacttttgacatcgcccgcttgacagtcaacgctgacgtgggctattactcctggaggtgtcccaagcccctgaagaaccgtgatgtcatcaccctccgctcctggctccccatgggcgctgattacatcattatgaactactcagtcaaacatcccaaatacccacctcggaaagacttggtccgagctgtgtccatccagacgggctacctcatccagagcacagggcccaagagctgcgtcatcacctacctggcccaggtggaccccaaaggctccttacccaagtgggtggtgaataaatcttctcagttcctggctcccaaggccatgaagaagatgtacaaggcgtgcctcaagtaccccgagtggaaaccagaagcacctgcctcacttcaagccgtgggctgcacccggagcagagcccgttgccgagcctggcggctgtcggagctgtcggtgcagcatgcggactcactggagaacatcgacgagagcgcggtggccgagaagcagagaggacgcggatggggcggcgcgggcggcgaggggcagcgacgacgacacctcgctcacctgagcgccgcaccgcttcagggacggagacaggaccacggaccgggccgaagcctgggagcggcggccggctcctgcgctttctcccatacccccaaccaggaacctgggtggccaccgggccaggccaggcaggtgctgcagcctggctggacagagcccataaacgatccacagcctcaaaaacacaccacaccaacacacaacacaaccgc

SEQ ID NO: 202 - DNA, 630 bp, Homo sapiens
gcaaaatgtccttttaccaaattgacctttttatgagttcttgggtaaatactttaaagctttttatattttaaagaatacttgtaaaagcatatcacatcttaaaccagtggtgcacatgtggatttacagctcatggactctactgttcagctttaatttataaaacatatcacacatttaatgttatacagtatttacatatagtggaacatagggataactcagttttatgtaaatttttgttaagtgttgtagcctgcccagagtgacttctattttttcttctttgtctccaggtggtgaagcagtattttccaatttgaagattcatttgaaggtggctcctgccacctgctaatagcagttcaaactaaattttttgtatcaagtccctgaatggaagtatgacgttgggtccctctgaagtttaattctgagttctcattaaaagaaatttgctttcattgttttatttcttaattgctatgcttcagaatcaatttgtgttttatgccctttcccccagtattgtagagcaagtcttgtgttaaaagcccagtgtgacagtgtcatgatgtagtagtgtcttactggttttttaataaatccttttgtataaaaaaaaaa

SEQ ID NO: 203 - DNA, 8076 bp, Homo sapiens
acatttaatgtatttattagtatttaagacaacagtcaataatctatatttaagacacagaagaaactgaaagtgtaagatttagaaacaagagaatccccaccccaaaaaattagagattaaatgatctacatgatagataacagaatactatgcatggattgcttatactctaaggattcctattcctactataaggaacttggggactaaacttgagccagttctttcctgtgtgcctcaattttaatatgtgtttcaaactgcatttggaatgtttcctacccaaataacaaaatcttaaacatgaagctaaaattatccatgtgtgtcacagtcacccttacgttgggtcagggaactctagcttggtcagttaactgctggcaacagttccttcttcaattccatgcccctgaggactcttaatggttaacattatgacaagacaggatgtatgtgaccctcagaaagaccacgacattctacagcagaatgtagatatatccaagggcaagatgccacacctgtgatggcaaaatactctgaaaagtcaaacattcaggtgttataacttgtatgagatcctgatttaatggacatctgctaaatttcctctgtccatgtcttttggagactgtccttcctgatgtaatcctcacagaggtgaccataacatgcgcctctcttgcttcccaatgctgggagacaaagaaccccatttccttggaaatacagattggattacggctggctccaaaaccaacatggctattcagtccttttggggaactgacatggacactgggaggaaaatagtctctctcctgccactgaaactacatggacaatggaagcttggagataatggccattttctgaaaaattagaccatgcttgaaaaaaagccattatggaggaaatcattatggaggaaatcaaatccaaaaattacatgcttgaattttcactcctttgaactattactccagccaataaaatccctgaccggatttctaaactcggaatgactgaattttctgtttttcatctgaacacatcatactaatgtagattgttagaatcacagcacagtggagtacacgaaagaaaccatgtcttctcacagtgacaaaagctgtcatgtgtacgaatattaaataaaacatactgatttttatatactgactcttctgtacagaaaaaaatcttgcattttttatacaatgttccggtaagtttattttaaaaattaggaaaggagaaaacagtgatgattatgtgagccaagagaattgtttagaatagtgccagatacttggtaaaaacttaatgttggctttttaaaatagatcgactcaatactaagctcaacatacaaagcataacttaacatctaattggatggcactttagaaaaatcctctgcttaagcctgaaggaaatgttaatgtttaaaaatctcaggccaggtgcagtggctcacgcctgtaatcccaacactttaggaggctgaggcaggtgaggtcacttgaggtcgagtttgagaccagcctggccaacatgttggaaccccatctctactaaaattacaaaaattagcggggtgtggtggtgggtgcctgtagtcccagccattcgggaggctgaggcaggaggttgcagtgagccaagatcatgccactgccctccacctgggcgacagactccatctccaaaacatttattaatttatatactgttttttcaaaagtgatgaggtggtttagaaacaccaaataaaaacatgggtaaaatcttggcccatcaattactacctttctaatcttgggcaagtttactagcctctctgagcccatttaaatgagtctgtatataaaagcacaaagtctctattgcatacaaagtgctcagtatttattcctattatttcaggaaaatacctttaatattacctaccagttttgtataatggttacagaaattcttaaactgtagctatcatcttgtctagcttactgatgaatacacaaaatgccaatgaagtgacttaccatgtatcactaaccggtttaattaaagacaatgacaaaactagaacccaggtttccttaaaagtactttttcctctctaccacaatgcagatttaaaacaaatcctcaggctttagttttgtcattgtaaataaaacttctgtgaatgcagggaaagatactacatgctggtatgaatatgaatgcagtataactatagtttattatatcctttaagagtaaagtgcctgtgttgttcttttcaggccaatatagattaaatgtaaaactgtactatgtgatctggtacacagtacaactgttgatactataaaaaaatcaaacattcaaatattcctaatgtttataaaggccaaattccaaaggccaaaactccaggtgtaactcaagaaaaaattcaaaaaaattatttcataaactgttttcttgagcggctctatttctatgttatagttggttaccactgggagaactggacagttaacttaaaatacagaactaatacaagagggttaaaagtccatttatgaagtaaagtagaaagcatgtacaaagtcgttcacttacagaagactaaaacaacaaatagaaaacctaaataaacgattctgtgatcagagtagactcaaaatgttatcaggtgtataaatacttaaccaaattattaacataactctgtgtatcttatgttagaaatagaagtaagcttttaatgcaacaggcctaggtcaatcatttctgctaaagcgtgcctcaaaaaaagcaaatggggttcctaaaattcctgaacaaaaagcatgcttttatgtccattattgcataataaaacaaacctgcaattggataagaaaaagatacaaaagataaccgtcaatctttaccaatttattttatacaaaacagtagcaatgtagaatatgggaatcgtcttccgctgccacgcacgcaagttgtgaacattccaagccaatgtatacaatttggaggggaaggctaaacaatagcatcaaccacgctactgaacataggaatttttcatttaaaaagattaaaaattagatagcaatgtcttcttaatattgctctcgtcattgaagactgaggaaaaataaaaagtgactttataagttttttaaaaaaagaggcaatggggaaaaaaacaagaggctgctacaacactgccatacagtcaaaccatcatacttcaatatttgcatactcgatagcagcattatttttactgaaccgtgtgcaactacatgtagaaacacatcaaagcaaaatatcatggcagttatcaatcaagatccaaaaaggaaaaaaacaaacaaaaaaataactctaggatgaacacactataagaacatttatggagaaagaatcagtatctacattcttggactgttccattctgccccaataaaagtgtcaattcaactgtcagctgtggatttttggcggatttgagtttttccagttcttatgatactgcatgcttggaacaaagggggtcataataaatccttctacacaatgaacttcataggcagacagctgaaaataaatttactacttgtaaacacacacaaaaaaaaaatacaagatttttgtatctttaaacaatcagtgcttccaaaagcccattatcttctatatcgacctctctcccctcggtctctgtctcgatcacataatcgctctctttctctttctctatcacgtcctctatctcgctctctgtctcgtctgttatctctagggcggtctcgctctcgttcccggtctctttcacggggtctacttctccggccactgacaacagcttgtgtgcgacgaaggaaatcatccaccctcatatcataatcatgtactcgtttatctctgtatcttgcttcatgtggtactggatgatgtcctgagtaagggggatgagcttgaggaggtggagcatggtgctgatagtaaggatggtgtggaggttgttccattcctgggtaagggggcattccttgccaaggtggtggtggtcccatgttatgaaattccctcacataatcattgtaggacccatttaaaaacacatctcggcgaactcctgaaaatcgtctgtccacttcctggtatcgtggatcctttaaataccctggtctctggtgaaactcagggggatagtcaatccttggtttctttctgctgttatgaatatcataatcttctggtcgacgccttcccacatcccggactggttctcgacgggatggacgtcctcgtgatcggggctgagaatgcattcttctcttgtgacgcattttatgaatgacctgatacaagtcaatactttcatcggggggaaacagaagacaaagctgggttccacattcaagttcaatttcctgtccatcacgtccgatctttactggtttatgttcattccaaggattggtgagatgagccgacttagtgaagggtaattcacgcctgcaaatccagtcaattttaaagacacctcccagcattttagcactcattcctgctggaagcacccagtgtataggagatcctccgtgatgtgattctgaagaaagtcttgcaaacccttgaaattttccactctctctgacagaaaatatcggacgcgtggggtcggaagatcctagaggtcccaaggtagctgacttgcgaagctgaggctccagccgagggctccaggcctctgaccggcccagcagtgagcgcggctgcccgacgcttcagggccgggagcagggagcgtgagtcgccatggcgacgccggcgggtctggagcgctgggttcaggacgagctgcactcggtgttggggctgagcgagcggcacgtcgcccagtttctgatcggtaccgcacagcgctgcacctctgccgaggagttcgtgcagcgcctacgagacactgataccttggatctcagtgggccggcccgggacttcgccctgagactctggaacaaggtaccacgaaaggcagtggtagaaaagccagctcgggcagcagagcgagaggcccgggccctgctggagaagaaccgatcttataggttactggaagacagtgaagagagcagtgaggagactgtgagtagggctggaagcagcctccagaagaaacgtaaaaagcggaaacacctcaggaagaagcgtgaggaagaagaggaggaagaggcttctgagaaagggaagaagaaaacaggggggagtaaacagcagacagagaagccagagtcggaagatgagtgggaacggacagagcgtgaacgccttcaggacctggaggagcgtgatgcctttgctgagcgggttcgacagcgggacaaggatcggactcgaaatgtcctggaacggtcagacaagaaggcttatgaagaggctcagaagcgcctcaagatggccgaggaagaccggaaggccatggtccctgagctgcggaagaaatctcgccgagagtacctggctaagcgggagcgagagaagcttgaggacctggaggcggagctggctgatgaggagttcctttttggggacgtggagctgagccggcacgagcggcaggagctcaaatataagcggcgagtgcgggatctcgcccgggagtaccgggcagctggggagcaggagaagctggaggccaccaatcgctaccacatgcccaaggaaacccgaggacagccagcccgagctgtggatctagtggaggaggaatcaggagcccctggggaggagcagcggcgctgggaggaggcgcggcttggggcagcgtccctgaagtttggggcccgagatgctgcctctcaggagcccaagtatcaactggtgctggaggaggaggagaccattgagtttgtccgggccactcagctccagggtgatgaggagccgtcagctccacccacttcaactcaggcccagcagaaagagtccatccaggccgtccgccgcagcctcccggtgttcccatttcgagaggagctcctggctgctattgcaaatcaccaagtcctcatcattgaaggcgagacaggctcagggaagaccacccagatcccgcagtatctctttgaggagggttatacaaacaagggtatgaagattgcctgcacccaaccccggagagtggctgccatgagtgtggccgcccgagtggcccgggagatgggtgtgaagcttgggaatgaggttggctacagcatccgctttgaggactgcacatcagagcgaactgtcctccgctacatgacagatgggatgcttctccgggagttcctctctgagcctgacctggcgagttacagcgtggtgatggtggatgaggcacacgaaaggaccctacacacagacattctctttggattgatcaaggatgttgctcgcttccgacctgagctcaaggtcctggtggcttcagccacaatggacactgcccgtttttccaccttctttgatgacgcccctgtgtttcgaatccccggacgcaggtttcctgtggacatcttctacaccaaggctccagaggctgactacttggaagcttgtgtagtatctgtgttgcagatccatgtgacccagccccctggggatatcctggtgttcctgacaggacaggaggagattgaggctgcctgtgagatgctccaggatcgctgccgccgcctgggctccaaaatccgggagctcctggtgctgcccatttatgccaatctgccctctgacatgcaggcccgtatcttccagcccacaccacctggggcacgaaaggtggttgtggcaacgaacattgctgagacatcactcaccattgagggcatcatttatgtgctggatccagggttctgtaagcagaagagctacaacccccgcacaggcatggaatcgctcactgtcacaccctgcagcaaggcctcagccaatcagcgagctggcagggcaggtcgggtggctgcagggaagtgcttccgcctgtataccgcctgggcctatcagcacgagcttgaggaaaccacagtgcctgagatccagaggaccagcttgggcaatgtcgtgttgctgctcaagagcttagggatccatgacctaatgcactttgatttcctggaccctccaccatatgagacactgctgctggctttggagcagctgtatgctctgggagccctcaaccaccttggggagctcaccacgtctggtcgaaagatggcagagctgccggtggaccccatgctgtccaaaatgatcttagcctctgagaagtacagctgttcagaggagatcctgacagtggctgccatgctctctgtcaacaactccatcttctaccgaccaaaggacaaggtcgtccatgctgacaatgcccgtgtcaacttctttctccctggcggtgaccacctggttctgctaaatgtttacacacagtgggctgagagtggttactcttcccagtggtgctatgagaactttgtacagttcagatcgatgcgccgagcccgggatgtgcgggaacagctggaagggctcttggaacgtgtggaagttggtctcagttcctgccagggggactatatccgtgtacgcaaggccatcactgctggttacttttaccacacggcacggttgactcggagtggctaccgcacagtgaaacagcagcagacagtcttcattcatcccaactcctccctctttgagcaacagccacgctggctgctctaccacgaacttgtcttgaccaccaaagagttcatgagacaggtactggagattgagagcagttggcttctggaggtggctccccattattataaggccaaggagctagaagatccccatgctaagaaaatgcccaaaaaaataggcaaaacacgagaagagctagggtaagagaaggacgtaaacagaacctgacaccagctccttttccttctatacattatttaatacctattaaataaaattatttttggaataaagcttgtgggaacatttgggatctag

SEQ ID NO: 204 - DNA, 3279 bp, Homo sapiens
aaggagagagggagggcggagggcggaggggcggcgggaggagggcggggaggagcgctcttcctggttgggccctgccctgagctgccaccgggaagccagcctcagggactgcagcgacccccaaacacccctcccccaggatgtcggaggagatcatcacgccggtgtactgcactggggtgtcagcccaagtgcagaagcagcgggccagggagctgggcctgggccgccatgagaatgccatcaagtacctgggccaggattatgagcagctgcgggtgcgatgcctgcagagtgggaccctcttccgtgatgaggccttccccccggtaccccagagcctgggttacaaggacctgggtcccaattcctccaagacctatggcatcaagtggaagcgtcccacggaactgctgtcaaacccccagttcattgtggatggagctacccgcacagacatctgccagggagcactgggggactgctggctcttggcggccatcgcctccctcactctcaacgacaccctcctgcaccgagtggttccgcacggccagagcttccagaatggctatgccggcatcttccatttccagctgtggcaatttggggagtgggtggacgtggtcgtggatgacctgctgcccatcaaggacgggaagctagtgttcgtgcactctgccgaaggcaacgagttctggagcgccctgcttgagaaggcctatgccaaggtaaatggcagctacgaggccctgtcagggggcagcacctcagagggctttgaggacttcacaggcggggttaccgagtggtacgagttgcgcaaggctcccagtgacctctaccagatcatcctcaaggcgctggagcggggctccctgctgggctgctccatagacatctccagcgttctagacatggaggccatcactttcaagaagttggtgaagggccatgcctactctgtgaccggggccaagcaggtgaactaccgaggccaggtggtgagcctgatccggatgcggaacccctggggcgaggtggagtggacgggagcctggagcgacagctcctcagagtggaacaacgtggacccatatgaacgggaccagctccgggtcaagatggaggacggggagttctggatgtcattccgagacttcatgcgggagttcacccgcctggagatctgcaacctcacacccgacgccctcaagagccggaccatccgcaaatggaacaccacactctacgaaggcacctggcggcgggggagcaccgcggggggctgccgaaactacccagccaccttctgggtgaaccctcagttcaagatccggctggatgagacggatgacccggacgactacggggaccgcgagtcaggctgcagcttcgtgctcgcccttatgcagaagcaccgtcgccgcgagcgccgcttcggccgcgacatggagactattggcttcgcggtctacgaggtccctccggagctggtgggccagccggccgtacacttgaagcgtgacttcttcctggccaatgcgtctcgggcgcgctcagagcagttcatcaacctgcgagaggtcagcacccgcttccgcctgccacccggggagtatgtggtggtgccctccaccttcgagcccaacaaggagggcgacttcgtgctgcgcttcttctcagagaagagtgctgggactgtggagctggatgaccagatccaggccaatctccccgatgagcaagtgctctcagaagaggagattgacgagaacttcaaggccctcttcaggcagctggcaggggaggacatggagatcagcgtgaaggagttgcggacaatcctcaataggatcatcagcaaacacaaagacctgcggaccaagggcttcagcctagagtcgtgccgcagcatggtgaacctcatggatcgtgatggcaatgggaagctgggcctggtggagttcaacatcctgtggaaccgcatccggaattacctgtccatcttccggaagtttgacctggacaagtcgggcagcatgagtgcctacgagatgcggatggccattgagtcggcaggcttcaagctcaacaagaagctgtacgagctcatcatcacccgctactcggagcccgacctggcggtcgactttgacaatttcgtttgctgcctggtgcggctagagaccatgttccgatttttcaaaactctggacacagatctggatggagttgtgacctttgacttgtttaagtggttgcagctgaccatgtttgcatgaggcagggactcggtcccccttgccgtgctcccctccctcctcgtctgccaagcctcgcctcctaccacaccacaccaggccaccccagctgcaagtgccttccttggagcagagaggcagcctcgtcctcctgtcccctctcctcccagccaccatcgttcatctgctccgggcagaactgtgtggcccctgcctgtgccagccatgggctcgggatggactccctgggccccacccattgccaagccaggaaggcagctttcgcttgttcctgcctcgggacagccccgggtttccccagcatcctgatgtgtcccctctccccacttcagaggccacccactcagcaccaccggcctggccttgcctgcagactataaactataaccactagctcgacacagtctgcagtccaggcgtgtggagccgcctcccggctcggggaggccccggggctgggaacgcctgtgccttcctgcgccgaagccaacgccccctctgtccttccctggccctgctgccgaccaggagctgcccagcctgtgggcggtcggccttccctccttcgctccttttttatattagtgattttaaaggggactcttcagggacttgtgtactggttatgggggtgccagaggcactaggcttggggtggggaggtcccgtgttccatatagaggaaccccaaataataaaaggccccacatctgtctgtgacgcaaacaaacacaaaccccgggctccaagcggggcgcggaaacgaggtacggactggcccatggcctagctgtccgggccagctttctgtcacaggggggaccgccgcccccatagagtcgtaaattcgaaggccgtacgtagagacaagccaggcacaccaagagcagcgagaccaccagcaccgggcagaccaagcacggagcacacacacaacacagacgcgggcacacacacgacaacacgacgcagcaagcgagaaaagcaaagt

SEQ ID NO: 205 - DNA, 1545 bp, Homo sapiens
  misc_feature (1)...(1545): n = a,t,c or g
tgtcgttgttctgaggccaaccagacgcggagaactatgggaggtggagacggctccttcacatggcaaagaggatgagaaaggctaccatcagacaaaagagccccatggcctccgagagggcaaagcccagaatggcgtaggagaagagctgttgcttcagagaagggttcctggcataaccaatgatgaggctcccaaacacagttccaatcccagccccagaaccagccaccccaccgaagcgggagcggccaaaatgaagtttaatccctttgtgacttccgaccgaagcaagaatcgcaaaaggcatttcaatgcaccttcccacattcgaaggaagattatgtcttcccctctttccaaagagctgagacagaagtacaacgtgcgatccatgcccatccgaaaggatgatgaagttcaggttgtacgtggacactataaaggtcagcaaattggcaaagtagtccaggtttacaggaagaaatatgttatctacattgaacgggtgcagcgggaaaaggctaatggcacaactgtccacgtaggcattcaccccagcaaggtggttatcactaggctaaaactggacaaagaccgcaaaaagatcctcgaacggaaagccaaatctcgccaagtaggaaaggaaaagggcaaatacaaggaagaaaccattgagaagatgcaggaataaagtaatcttatatacaagctttgattaaaacttggaaaacaaaaggaacacacaccagcccacacacaacccacacacaacacaccaccccccaccacgacaaacacacccacagccaccacacacaccaccaacaacaaacacagccacaacaacaccacaccacaacacaaacacacgagagcggcggagaggcaaagaaagcacacccacgggaggaacacaacaatatagcccaacacacaaatatgaaaaacgaggcgcccaaaagcagcgggagccataaaacagaacacgacggcagcaagtaaaaacaacaacgaggagaagaacagcacgcacacaacaagcgatccacactccggaggcgaaacgacacccaacccaccgcggcgaggggcggaacgaacctcggtggcacaccaccacccgccacgaccgaaaacacagcagcgcacccaggcaaaaacaacaacgacgaaggcaaccaggggacgcacacaccacaaccgaagacgagcctcgtggngccagccaaacacctgcgtcctggcggagtacaaagaaattagacccgggcagggcgacgcacacagaacagaagaagcacgcacgccggcccgcacgcagcgcaggcgacctaggagcacgggcaggcggcgccgagcgcatgaccggaggccgcagccgccaagagtcaggtgcgacgcaccaagacagacggcgcacgacagcaaggagaccgcgcgcatcgagcgcaagtacacgcgctcgagcatgcaagcgagagtacatcaacacgcagcaaagcacgatgctaggaacgaaacgaaggcgcgacggaggat

SEQ ID NO: 206 - DNA, 1443 bp, Homo sapiens
ttttttttttttgtcaagtcatatgcactgtgttctttattgagatagaagtggggtggggagggtagcccataggcagagaagtgaaaggagggaggagtgggagccatctatttcccaactctgcctttcctcccagctgatgatggtgggggcgtggccaccagccatgggattaagaaggaagaccccccacccttagatacaagcacagtgctgcgtgagaaggttgggcactgtctcatacttgaaagagtaacctccatccgaggtggtgcggacatgtaggggcctcatggtccctgggagagcagcacagcagggctgggcccctggcagcaaggagtagggctgggctggggtagggggagccccagggactggaagggacaggtttggtgggatgtgcagcccacaaccaccatgacagtagtggaagatgaaactgggagggtacacgatccaccgttcccagcccagctcctggaaggagatgttcagtgctactctgtggcagttggcatgggcagccggttcctccggaggcctctgcagcaggcgcagagcagagggagaccaaggccaggacatcaggggagttgagcgtcgggctctctcccctccactgggtggtctggtccgagtgtgggccaccaggaagggcgtggcctcaggccgggctgagcaggtacagaggggacagcgcagcagcagcaccaggacggggtgggtcagcagagagagagcagaggtggccaggtgcagcacggcccagtgagggggagcatggcccaaagacatgggcacagccacgggtcctcccggtgacagtgccagcaggcctagcaggggctcagagctattggaggctgctgtgccctgcctgtccagcccggtgtggaaccacagctgggctgaagtcacctggcggctgcgtgtatgctgggatggccggaacatgtatctgaagaggccctcctcagcctcctgggccagccctctggcagctgacttgtcctcacagctggcatctgtggctgggaaaaggatggcttgggagacatcctcctcttcctcgggctcagagcccctgtgtgtgaagccccccagggcatgtcttcggggcagccgcctgactccagggtccccaccttccctggtcaccgcggggggccccaaggcatccaagaacagggccctcaccttggccagaacaagttcccgggccagctccagcccctggcagctgtgcccaccctgtggggtcagcagcaagaagagcagtaggtgcagcaccatagctcacctggccctgctagtggggaactcacaccctgccccgtgccccttctgccagggtctgcccagggcctttccactctcccctccccatcccacacccaccctcttctacccttctcatccagtcttccccagtccttc

SEQ ID NO: 207 - DNA, 1630 bp, Homo sapiens
ctggacaaccaaaacttacataggctttttatcattttactgggcctatgtaactgagttttagccagtggaatgtccaagtgacatttgccacttctaggtctggcacattaacacttgatgtattacatttcagaccctcttatcattctgcagtgtgtttggcgatctgttgtttaagatctatatgcactggttactgttgcttgccttccattcctacccttactaatcagattcctattatagctacttctgtccttgattcattttgtatattagatgtgtgtgtgttcatgtgcatgcatgcaccctcacatgtaggtgtatatgggagtggtggtaaagacaggatatttcttcagttcatgggattttatttcaggagaattcaaacattcacgtattggagaagatgacacatttcttgaatgtctttggctttgagctgaatgcactaactagaagggactccagattgtcctccttcgggggaggtaagtatattcttcatatacaggtaagagtgaaatgatagaagaatgttcctcctctccttttcttcctggacaacagatcaaatatttctcagatcttttacagctgaattggagtcacatggacaggtatgatcttaaaatataaaaaattattttaaaattacatgctaaaattttataaaaataaatgctaaaactaacttaaacggaagcatttgattaaaaaatttatccaaaaaagtttgaattttatatgaaacaggatagaagatgaaaaagctaaagaaataaaatataaataaattatggctggggacagtggctcacacctgtaatcccagcactttgggaggctgaggtgggaggactgattgaggctaggagtttgagacctgttatttgaggcacatgggaaggaaagttttctttgagatattccacattttataatattcttcaagagatttacagagttccttgagtgaattgttggtttgttcttaatactgaatttcctattcaaatttatttagaagttcatttcttacagtgatctcatctcctattaagatattcttcaaggtaggttcttggccagtttctcaatgacagatttttaaaaatattgttaatctttttattaatatgagaacataattgttccagatctggaggccatcctttaagcttcttgcaacagtctgggagcaaagagtttactcgccactgggtagtgggccatggacaccccagtctccaccagaagttcgggattgcaaaatgggactctggcagcaaatttcaaactgtatgccagacctggccctttgcagagttaaaagaagccaggtgtggtggctcacacctgtaatccctggactttgggaggctgaggccagagaatcacctgaggtcaagggtttgaaaccagcgtggccaacatgacaaaaacccatctctactaaaatagaaaaattagccaggagtgatggcgggcacctgtaatcccagctacttgggaggctgatggaggagaatcacctgaacccaggaggtggaggttgcagtgggccaagattgcaccactgcactcctgtctgggcaacagagtgagactgtcaaaaaaaaaa

SEQ ID NO: 208 - DNA, 1477 bp, Homo sapiens
tttagaatgaatagcccttctgggttttctttttgacaattcttggacttgaggtaaaacaaggaggattgtggccggatttcagatcccaaagccagcctccatcttaggcctttgcctcattgtgccttttaggttttcttacccaccgtctcctgttttgtcttttttttcttttctcctacccctatcttgggacattcagaaactgcctgggtggtttgagaagagacaacccagtttgatctgcaatacaaggatccattcgtaatctctctctcactgatgttattcccccatctgccgtcttggttcatctcaccacagaagggcatttagtcctacccagccatcggctgcgtatgacagcaggatggcacttcccatttctctgtggttagtgctcgagtgaaaacctctttcagctgagtcctctgaggttctgctgttgagtcctgggtggctgatggaatgattgaggaggtctggtcaccctcaagcgccgtcatcgccttgtttccatgggcttctgtcacacaaaatgaagaacagaaatgttaggacttaagagaatgtttggaattcacacctctttgcagtcctttcaaggctgctgctctgtgctgtgtcccatgcatgtgaaagtagagctgtgatggctgctgggacgcttgcaaagatcatgtgtgagaattgagcacaagaccacaaattattactgcttgatgcgcttgttaaaactctatctgccaggaaaccaaattttcttttcttttctttttttttttgagacagggcctcgctctgttgcccaggctggagtgcagtggcgcgatctcggctcactgcggcctccacctactgggctcaagtgatcctcccacctcggcctcccgagtagccgggaccacaggcgtgtatgactggctacgcctggctaatttttgtatttttaatagagacgagtttcaccatgttgcccaggatggtctggaactcctgggctcaggtggtctgcccacttccgcctcccaaagtgttgggattatggccattagccactgtgcctggcacaatttttttttgtaccctcctttatgccaagaatcagtcctaatttctttactatgtgaagtaacttttaaaggtaatagaaaaggccaggcacagtgactcatgcctgtaatcccaggcgccgtggctcacgcctgtaatcccagcactttgagaggctgaggcgggtggatcacttaaggtcaggagttagagaccagcctgaccaacatggtgaaacactgtctctactaaaaatacaaaattagctgggtttggtggcgcacgcctgtaatcccagctacctgagaggttgaggcaggagaatcgcttgaacctgggaggcagaggttgcagtgagccgagatggtgccattgcactccgacctgggcaacagagcgaaacactgtctcaaaaaaaaaa

SEQ ID NO: 209 - DNA, 935 bp, Homo sapiens
gcacgagatttttagtagagacagggtttcaccatgttagccaggatggtctcgatctcctgacctcgtgatccacctgccgcggcctcccaaagttctaggattactggcatgagccaccgtgcctggccagcaattagaattttaacactggcagttatgaataatatgaaggagaggtagatttctgagtgattctggtttaaccagctgggtggatggtggttccacgtattcaggtggcaaacaggaaaaacatgtgttcgaagaagaatggaggtaggtggtctcttaagaatggttaagaggcttgggagtcagactgcttgggtttgcatcccagctttgccgttttctggctatcaaacttgtcagctattatttgttgagtacgtactatttgatttatgaccacaggcagctgagcctcagtgttggtgcctagtgtacaagattgttaaagaataaagttattttgcaaagtgtaacccatttttagcactgacatagcactgacagtagctgctgatctcattatgggctaaaataagacaatattcaaaggtcagagatatctagccagaatctgatggaggctggatttcagattttgttacagaattagacagaggaacacagaggggacaggctcagttagggtggaggtgtggggtagggaagcaggacttgatataaattattggaatcattgtcttttaaaccagtggtttatgtcagggtatagcgtttcaagggatttgagggtcagatggggaatgtagcccttattttgccagtgtgaagcagataccctgcttttctttaacagtagcggaggtcagtttaagaactttaaagggtcctaaactttccaaaaacattacagtgccccatcctccgccttaatgtaattcaataataccaacggatactaa

SEQ ID NO: 210 - DNA, 2142 bp, Homo sapiens
ttttttttttttggagtcaacacttttaattgttcaatattttactacaaatataagaaacaatacagaattaaataacacatgaaaatcttgctatatatatatatataaatatccaatttaacagcgaaaacaacttacactttaattcctaggccactggatagacacagacaaagcagaagatactgaaaaagcaactaattatggttattaaagattcaacatcattccactagctggaacaatatctttagaacaaagggattgtatgctcatatttgcctcctctgctattgggaaaagttaacgcatggaaaaagaagccagcagagacaaagcatatgaattggctgactgctatacaggaaatctcctaaacatctgttttcataatgtattttcattatatgaggctgaatttagaatgacgtaaaatagggctgggtcatgttataagacaaatggacagggagggcatgcttctcaaaaaatgtgagctattgtctaagactaacaatatttatctagctataaaaataagttaaatgaataagttaagattgccaatgttacttcacaataaattcagtcctatttgtgttggagtaaatctcatagaagcacatgaagaacagcagtgaaaccaaggattctagcaaggccagctattagcaaagcagtaagcaggaactggactagataccaaatgatggggaaacagactcatagacctaagaacataggaagaagagatgtaacatcaacagaaaggcaaaaggtaagctctctgtattctttcttctctctctctttcaattcttccccctttgcttattccctttttttttctggaattacattttaaattaagttttagagctatgtggtaaattatttggtccaattcctttatactttggatgaggtaaagtgactaacagaggtccccaccagtaggagcccaagtcagtctgtgagctcagtgctcctgatactaactaagtccagtgccctttcaaccacataacatggcattgctttacaaaatcaagtcctacaacagacctgagaggtaaactgacttcctcttgggattcaaacactgagtagctcagatggcagtaaaaagtcgtgggatccttaaggctttcgctcccacctcttttgctctttcaggtcctttggagaatggccccttttcctcctgcttttctcttgtgtcaaattcaagtagaccagggaatcactttcagggtgctgtgtgacttatttagggctctcggtcctgattccggtgacgtttccagtacagtaagattgagattaggacgagaagaattaccagggaaacaatgcttagcaatagcggaactgaaaaccaatagcctttgttgacggtttgcttaaagtcggtcacagtccccaggtgcagcacctggcagatcacctccttccccacctgattcttagggtctttgatatggaggatgctggtaacagacgtggtcccatttgggtgagacagagtcactgtactattttcaatccctgaccgagggaccttccagaagaccatgggggctgggcgggcagtggcagagcaagtgatatttaggtggtcttcagagaatttgtagtgaagggatactatgggctgtacatagacggtgaggcaggccgttcctgagatcttcccaaaaccaaaggtattgaagagacacatgtaacacccttcatcctccagggtgatattccagaaggtgatggttgagttttggagtcccagctgggtaatgtttatcttgtccttataggcaggctggatcaccaccccatggttctcgctgaaggtgaccatgttttctgggcttacagctttctttttctgccatgtcacaatgagggcttcctgggcattttgcagagagcattttaaggaagcaggtgtgtacagctgctctctttcatcctgggtcaccacttgcacttgtgctgtgcacagcaccactgctgccatgacccaaaccaggctgtaggtagacagatgacagaagggcatcctgatcaccagcctctccatccttgctcctggaggcgcgcgcgacgtggctgactgcggatgtgcgcctggagctctca

SEQ ID NO: 211 - DNA, 1910 bp, Homo sapiens
ggcacgaggaggcgctgagccgggccgcgcctgggcgaacggccggagcgggctgggctgggcccgggatggcggtggccctggcgccggtcccggtggcgccccgcgcgagttcctgagctggtgccaggcaggtgacacctcctgcagcccccagcatgcgggcaggcccaggccccaccgttacattggccctggtgctggcggtggcatgggccatggagctcaagcccacagcaccacccatcttcactggccggccctttgtggtagcgtgggacgtgcccacacaggactgtggcccacgcctcaaggtgccactggacctgaatgcctttgatgtgcaggcctcacctaatgagggttttgtgaaccagaatattaccatcttctaccgcgaccgtctaggcctgtatccacgcttcgattctgccggaaggtctgtgcatggtggtgtgccacagaatgtcagcctttgggcacaccggaagatgctgcagaaacgtgtggagcactacattcggacacaggagtctgcggggctggcggtcatcgactgggaggactggcgacctgtgtgggtgcgcaactggcaggacaaagatgtgtatcgccggttatcacgccagctagtggccagtcgtcaccctgactggcctccagaccgcatagtcaaacaggcacaatatgagtttgagttcgcagcacagcagttcatgctggagacactgcgttatgtcaaggcagtgcggccccggcacctctggggcttctacctctttcctgactgctacaatcatgattatgtgcagaactgggagagctacacaggccgctgccctgatgttgaggtggcccgcaatgaccagctggcctggctgtgggctgagagcacggccctcttcccgtctgtctacctggacgagacacttgcttcctcccgccatggccgcaactttgtgagcttccgtgttcaggaggcccttcgtgtggctcgcacccaccatgccaaccatgcactcccagtctacgtcttcacacgacccacctacagccgcaggctcacggggcttagtgagatggacctcatctctaccattggcgagagtgcggccctgggcgcagctggtgtcatcctctggggtgacgcggggtacaccacaagcacggagacctgccagtacctcaaagattacctgacacggctgctggtcccctacgtggtcaatgtgtcctgggccacccaatattgcagccgggcccagtgccatggccatgggcgctgtgtgcgccgcaaccccagtgccagtaccttcctgcatctcagcaccaacagtttccgcctagtgcctggccatgcacctggtgaaccccagctgcgacctgtgggggagctcagttgggccgacattgaccacctgcagacacacttccgctgccagtgctacttgggctggagtggtgagcaatgccagtgggaccataggcaggcagctggaggtgccagcgaggcctgggctgggtcccacctcaccagtctgctggctctggcagccctggcctttacctggaccttgtaggggtctcctgcctagctgcctagcaagctggcctctaccacaagggctctcttaggcatgtaggaccctgcagggggtggacaaactggagtctggagtgggcagagcccccaggaagcccaggagggcatccataccagctcgcacccccctgttctaagggggaggggaagtccctgggaggccccttctctccctgccagaggggaaggagggtacagctgggctggggaggacctgaccctactcccttgccctagatagtttattattattattattttggggtctcttttgtaaattaaacataaaacaattgcaaaaaaaaaa

SEQ ID NO: 212 - DNA, 1805 bp, Homo sapiens
gaattccggcgagtgcgcgctcctcctcgcccgccgctaggtccatcccggcccagccaccatgtccatccacttcagctccccggtattcacctcgcgctcagccgccttctcgggccgcggcgcccaggtgcgcctgagctccgctcgccccggcggccttggcagcagcagcctctacggcctcggcgcctcgcggccgcgcgtggccgtgcgctctgcctatgggggcccggtgggcgccggcatccgcgaggtcaccattaaccagagcctgctggccccgctgcggctggacgccgacccctccctccagcgggtgcgccaggaggagagcgagcagatcaagaccctcaacaacaagtttgcctccttcatcgacaaggtgcggtttctggagcagcagaacaagctgctggagaccaagtggacgctgctgcaggagcagaagtcggccaagagcagccgcctcccagacatctttgaggcccagattgctggccttcggggtcagcttgaggcactgcaggtggatgggggccgcctggaggcggagctgcggagcatgcaggatgtggtggaggacttcaagaataagtacgaagatgaaattaaccgccgcacagctgctgagaatgagtttgtggtgctgaagaaggatgtggatgctgcctacatgagcaaggtggagctggaggccaaggtggatgccctgaatgatgagatcaacttcctcaggaccctcaatgagacggagttgacagagctgcagtcccagatctccgacacatctgtggtgctgtccatggacaacagtcgctccctggacctggacggcatcatcgctgaggtcaaggcacagtatgaggagatggccaaatgcagccgggctgaggctgaagcctggtaccagaccaagtttgagaccctccaggcccaggctgggaagcatggggacgacctccggaatacccggaatgagatttcagagatgaaccgggccatccagaggctgcaggctgagatcgacaacatcaagaaccagcgtgccaagttggaggccgccattgccgaggctgaggagcgtggggagctggcgctcaaggatgctcgtgccaagcaggaggagctggaagccgccctgcagcgggccaagcaggatatggcacggcagctgcgtgagtaccaggaactcatgagcgtgaagctggccctggacatcgagatcgccacctaccgcaagctgctggagggcgaggagagccggttggctggagatggagtgggagccgtgaatatctctgtgatgaattccactggtggcagtagcagtggcggtggcattgggctgaccctcgggggaaccatgggcagcaatgccctgagcttctccagcagtgcgggtcctgggctcctgaaggcttattccatccggaccgcatccgccagtcgcaggagtgcccgcgactgagccgcctcccaccactccactcctccagccaccacccacaatcacaagaagattcccacccctgcctcccatgcctggtcccaagacagtgagacagtctggaaagtgatgtcagaatagcttccaataaagcagctcatctgaggcgagtgatccaacaaaacaaaaaaattgggcgcccggtccgagtttacactgtggggcggcccgtggatggcaggcaaaacgcgcgcagggtccaaacgcgaccggtgaacacggcgggggcacagcgcaacacggcggaaaaacgaagaaagaaagaaaggaggccgaacggccgcgcagcaccgct

SEQ ID NO: 213 - DNA, 2628 bp, Homo sapiens
ttttttttttttgtgtttcagtatcactttaattgcagtatttaaacacatcactttgtattcagaaaaaatatctacccaatactctcttctctggaaatttctatttccaaccgtcattgaaaccaggatccctgctcaacccctctggaaagaaatcaacagcaaacaaggacctgggtcacccacagaagaggcagctggtgataagggttaggagctgatctgggctatgaccatatgggggtgcagagcaaggaaggggctcagggtgagggaggcagagacagaaaagcatctgttgggggactgaggcaacagctcaacccaggagtcggcaggagggaggaggaagccatggagatcagaggataaggctaggatccagcctcagaggaagaggatttttcggaagagtacaggtgagaggctcagctccaagacctggtcccatggtcctgcctactttgatccagagggagaaaaaggagcccaaaaagagtttctgtgtggccccagagagactagaactgagctgtttgtcctaaaacttgggaggcctgttctaggctccagccagaaaactgtgcaggactctgcaaatggtagagggggcacatggagctcagtggaacttagagaacaagggaggagctggtgaccaagtccacagtgtcttggaggagagatgagggaagtggttcaaggcaacacgtttttctggctatatcattacaagagagcaggtgcaaaaggttactttggtttcctcaaagtagagaaagaaaatacagggaagaaacggtaaaaatcaaagcttcctgggagaaaattgtagcctagaaaagctcatctttcccctgggggttcctgtattgcggcagagaggagggggtaggggaagggggtcctgtgtgagtgctgcaaggccatcagttgttcctgggagcttctccagaccttggctttcccccgtcacacgtttacccaaagaagaccagagtctggctccagggagccgaatgtgtaaaggacaggagtttacctgccccctcctcaaggtgtagggccccaagaacagcctctgaggtgtgtgcagtggggaagggttgggcgtaagagatgtcacctccagcatgggggtagcacgtggtcagatgcagagaggggtgctctctcggacactgcccagccttgccccacctagccgagtcacaattcggtatcagccaccacgtgttgtcttgctgaatggccgtttctggaggtggcctggccggtcccgtttttctgagcccctcggttcacactggcctttccctgagcctcaggggaggtcccaggtcctgagctatagccctggcctccaccgttttccgtgtaataagggtcttcgcccagcctttctcctgtggggctccagctgcggcgattcatcaggaaatagccagtgatgcccaagacagccagcagggctcccgaggtgaccagtgcaatcagggtcttttgggaatagctctggtggcttgcaacatcttgctcagtgaaatctaggatccccagctttttcaggtcagattggtgctttttcataagttggagtttgctggaaatttctgttctgttggccaagaccagcagtagacactgaggcctcacctcagactgggcaaggagcagggagcatacctgggccccagcatcagcatcagcctgctcctccccacacagcactcgggccaggccctctcccctgtccttcttaaactccgcacagctggaggtcttattttgctccaggcagatgccctgagtcaatttcacttctctgatgcctgaacatttgatttctgccttgatgtcacttaggataggagaagatgatgtatagggtttagtgggagatgttgcaaggctagtgctagtggttgaaaggtctgaaacatttccaggtgacaggctaggcttcaaggttgtctctggagttgaaacgttggctggggtggtgaacactgtgctgattacagaggtctgtgactggacagaagagtttgtgtttccataaactgaggttatcacagaggtagatgtgaatttgactgtcgtttctgtgatgtttgttgtggcctcattgccatgttgagacacagggtgcaggctggtacttccaagggtactaggtgttgtagtttcttggtaggatacatttgtagaaacatttgaaaatgttccctgggtaggtaactctggggtagcagtaccgttgttgtcaagactcatgaacccagaaggcagcaaactcagcaagcaaagcgcggtccagccccgcggcatcctgggccctgcgcgcgcgcccctgcggaccagcatccttcccgcgcggctcctagagagacgcaccgagtggaagacactactcggcttggccaggacgcgctcttcccgccccctccgcccgggagaggggtgggggattcttgcttttttcctctcttctcccctccctttttagtcttggcaaggcagcgcctctccttggctgctactaacttgagctcccctggttggtcccaaaggcggagggcgttaggagggaggctgggttgccgccgtcgaggccaaaaaagg

SEQ ID NO: 214 - DNA, 2835 bp, Homo sapiens
gtctctggtcgtctgcgtcgtcctggcgttcgtggcgctcgcgcgtcggcccctcgcctgtgtgtgttcccgcgtccttggtggcttggctgctcgtggccatgtgccctggggctcaccggctgcgccgtgcgctgctgccgcgtgctctgtcggggcgtacgcgcttcgtcggtgtgcggcgctttgtcgcctcgacgtgcgtggtcgggcgtgctttctcttggctggctgtgtttttgtcgtctgctggtggccggtggatagtcttgggcgcgtgtgtgggtctggtgggcgcgtgctgttttggcgtgtctggcgtagtttgggggcgtggggtgggttgggtcggcggtggttgggcgttgtgggtgttctgtttttgtgttccgtgctggtgggtggcgtatgtctttgtgggggcgtggtggttgcgcctgtgtgtggttcgggcctgtcagcgtggtgtgtttctcgtgtgtgtcggctggtctctccgtgtgtggccggcgtgtgtccgtgctgttctgccggacggggtgtgtgtgtctgtcgcgccgcttgtctctctctcttttgtgttggcgcgccgcttcttttgggcccgcctctgtgttctctgtcgcattgtgtcgtggtgctctccgcttgtgcgtgtggcccccccttggtggtgtgtgttggctctatgtgggcgcggcccgctcttgttgtttggggtgtgtggtgcgtctgggtgtgtcgttggttgtgtgtggttttggtgtgggtgttgttgtgtttttgttgtgcgttgttttgtgttgttttttgttgtagaacggtgttataaacgtcgtttattaaacatttcaaacagctgtgcaacgaacacaccaaataaaagctctagaatagcagtccagacgtttcacaagtatggcctcacagtcccattccctagatggactgcctccagttctgttctctgcctggcccatctctctttcccctcaggcaagagagagatggatggatcagactgaaaggacaggcatgctgatctccagcaggcaggggccaggagaaagtctcgtttgccaacacttgttactgaagcgcagaaaaagcagcaagtgacagtcacaaagtcttcctgggtattcttcataacgtacagtctatatgcgcaggaacgaagaagctcctggcgggaggatgatggccactgctcccctctgtcttgtctgaaccacctcggagtccagtgtgctggtcactctgcaatccccatgctaaataaaaactgtagcggcacctaccatatatagctagctattgctaaacctcaaaatcagaccacgttcgataaagcttctttaaaaggaatatacacatgtatttgtacacacacacacacagggcacaccaaaaaatatccaaacatctatcaaggggatcaaggccgttacgaaacacacaggtactctcccactcactcagctggggactgctagaactacgtgaacacaccatacttcaatgctgcagagcatgcacgggagacacaatgaggccccctccttgggacagttgagaaaggcaggaggaagggcaaaggaagtgaggctgggcgggaaagcttgagcccagacacccaggtgaaagagcaacatctatctgttgcttcctttcttaaaaatgaagtggagaaaatactgaagatttgtggacaactaacagtcaagacatgtttctgtctagcctgctgaacaaggaaagaaggatgaaaaagcgaggctctcgggcgtcagcaatctcttcaaattcgagataagtgcaaaaatgagccctgtcttggacaggtactccccaaaaaaggaaaagggtagaagagaaataaagggaaaccagaagagggactgaggagtcagtaacattctgggaaggaaggagaccctgacaaggaggggtcacagaggtgacaatgagactggcattttatctgccccaggtcacattggggcagctgaccaggatggacccagactcctcacagtaatgaggcgagaggggtggtcatgcggccagccaggacctagatggggacagaacacacacaaccacaagaccacccacgactataggactttacaataaaagcaccggtcagtgccattattcacattgtaaggataaaacatcacaggccaaaaaggcgccgtcaggaatgtgacacccgcgaggctgcgggatttgaaactccaatgctttatgacctatgtcaatgcctcccctcccgtcttctgcttccttggaaagctaacagggcaggccgttaggtgcccacaacgccgggatcatgcgccgattctggaagcggggaatcggagcagtggtacaggaaacagtttccccagcagctatagcagataaggaacagggctgccaggaaaaccaaggcacaaattgtgcaaggcttccgttccaggaggaagctgagcaggtagaagcccatgaacatggagtggctgaaccacagggcggggttgaggggcttggggatgaggaggacgggcagcagccactggaggcaatacatgatctctgccgggcagggccttcaccaaggctgccgggcaccgctgcaggaaccgacctaatgggagccagcgggcgcaggcggctgccctccgctttcttcaaccctcactctccaggagctgagccgctgtgctctctggctgtcagcccgggatcaccaaggcagcagggatcctgcaagccctgccatggcgccgccgccactgtcgccgtctgccgcagcctgcctccacctcagctcgccctcgtgcc

SEQ ID NO: 215 - DNA, 2666 bp, Homo sapiens
cagatgccagaagaacactgttgctcttggtggacgggcccagaggaattcagagttaaaccttgagtgcctgcgtccgtgagaattcagcatggaatgtctctactatttcctgggatttctgctcctggctgcaagattgccacttgatgccgccaaacgatttcatgatgtgctgggcaatgaaagaccttctgcttacatgagggagcacaatcaattaaatggctggtcttctgatgaaaatgactggaatgaaaaactctacccagtgtggaagcggggagacatgaggtggaaaaactcctggaagggaggccgtgtgcaggcggtcctgaccagtgactcaccagccctcgtgggctcaaatataacatttgcggtgaacctgatattccctagatgccaaaaggaagatgccaatggcaacatagtctatgagaagaactgcagaaatgaggctggtttatctgctgatccatatgtttacaactggacagcatggtcagaggacagtgacggggaaaatggcaccggccaaagccatcataacgtcttccctgatgggaaaccttttcctcaccaccccggatggagaagatggaatttcatctacgtcttccacacacttggtcagtatttccagaaattgggacgatgttcagtgagagtttctgtgaacacagccaatgtgacacttgggcctcaactcatggaagtgactgtctacagaagacatggacgggcatatgttcccatcgcacaagtgaaagatgtgtacgtggtaacagatcagattcctgtgtttgtgactatgttccagaagaacgatcgaaattcatccgacgaaaccttcctcaaagatctccccattatgtttgatgtcctgattcatgatcctagccacttcctcaattattctaccattaactacaagtggagcttcggggataatactggcctgtttgtttccaccaatcatactgtgaatcacacgtatgtgctcaatggaaccttcagccttaacctcactgtgaaagctgcagcaccaggaccttgtccgccaccgccaccaccacccagaccttcaaaacccaccccttctttaggacctgctggtgacaaccccctggagctgagtaggattcctgatgaaaactgccagattaacagatatggccactttcaagccaccatcacaattgtagagggaatcttagaggttaacatcatccagatgacagacgtcctgatgccggtgccatggcctgaaagctccctaatagactttgtcgtgacctgccaagggagcattcccacggaggtctgtaccatcatttctgaccccacctgcgagatcacccagaacacagtctgcagccctgtggatgtggatgagatgtgtctgctgactgtgagacgaaccttcaatgggtctgggacgtactgtgtgaacctcaccctgggggatgacacaagcctggctctcacgagcaccctgatttctgttcctgacagagacccagcctcgcctttaaggatggcaaacagtgccctgatctccgttggctgcttggccatatttgtcactgtgatctccctcttggtgtacaaaaaacacaaggaatacaacccaatagaaaatagtcctgggaatgtggtcagaagcaaaggcctgagtgtctttctcaaccgtgcaaaagccgtgttcttcccgggaaaccaggaaaaggatccgctactcaaaaaccaagaatttaaaggagtttcttaaatttcgaccttgtttctgaagctcacttttcagtgccattgatgtgagatgtgctggagtggctattaacctttttttcctaaagattattgttaaatagatattgtggtttggggaagttgaattttttataggttaaatgtcattttagagatggggagagggattatactgcaggcagcttcagccatgttgtgaaactgataaaagcaacttagcaaggcttcttttcattattttttatgtttcacttataaagtcttaggtaactagtaggatagaaacactgtgtcccgagagtaaggagagaagctactattgattagagcctaacccaggttaactgcaagaagaggcgggatactttcagctttccatgtaactgtatgcataaagccaatgtagtccagtttctaagatcatgttccaagctaactgaatcccacttcaatacacactcatgaactcctgatggaacaataacaggcccaagcctgtggtatgatgtgcacacttgctagactcagaaaaaatactactctcataaatgggtgggagtattttggtgacaacctactttgcttggctgagtgaaggaatgatattcatatattcatttattccatggacatttagttagtgctttttatataccaggcatgatgctgagtgacactcttgtgtatatttccaaatttttgtacagtcgctgcacatatttgaaatcatatattaagactttccaaagatgaggtccctggtttttcatggcaacttgatcagtaaggatttcacctctgtttgtaactaaaaccatctactatatgttagacatgacattctttttctctccttcctgaaaaataaagtgtgggaagagacaaaaaaaaaa

SEQ ID NO: 216 - DNA, 3030 bp, Homo sapiens
ttttttttttttgacagaccaatggtttattccaaaggggaaagcccaagctggatgtctccctccccaacccctgcaagctggcccatccttccagagcccccataggcctggggctgttgagacgggagatgtccccactgtgctgctcctggttttgtctcctctccaatccttgagcaccctgatatgcaacatggggggtaatcagaaggaggaggcagcctctgatggggcaacggctgagggtgggggcagtgtgtaaggcaccttttgcggtcagcccagccacactccatcgccagagagaatgccaaagtgtagactgaatgaaattctgtaggcaaatggtaaatggtagctgggccagtagctatttgcatgggtggattatatcatgttaagggaattctttatctcagcagagggaacagaggaatatcttggctaaggtcatcctgccagtcaggagaagccaccctccagggaccacagactcaaagtggctgtggtggagacccaccgcctgggtagggtgatgtcaagacactgagaggtttccatctgcagtggccaagggctgcaggttctgccatgctgggcattgataggtaggacgagagagagcacgtagggccagtcctctgggaagcaggaggtgggccatgtgaatgggagatgggtggctgtgctgtccaggcatctgctgacaacattgggggatagggccttggagagaaacgtctataggcctggagacagcagggcgtgggcgggagaggcaggctgataccatgcgggtactcactgctagcccccagatccagcccgagaggaggaggctggcgggttagggcaggccccaacctatctcacccctgtgatgggttggcctctgagcacaggaatgatggtgaccatctgaggtcacaaggcaggaaaggagtctgaatggagtgtggccagtggggaagtcggagaggccggaactgcccccaagaggctggcagagggctgcagagggcaggtgcaggaccaggctccctcccacccagacaagcacagtagcttagaaggcaagagcagcagggtcaggaggaagagcaggggtgtggcgcctcgttccttccgccaggagctcatggggcttcgttggacccaatcccgttgcctttgttgacgtagaatggccggtagtgagacagcatagtctgcttgccagatttccaagtctggggctgggccttggggctttggctccgcatgagggagggatagcctttcagggagaaggaggagctgccttggacgacgggcaggtcattgtcagagttctgaatgctggaggagtactcccagacccgggaggtgtagttacctttggtgccatagagattgttgaaattcttctgggtggtctccttggtgaagcggccaggagacgagggctggtatgatgtccggaccccacctttgggtgtcaggtacatggagtatctcttcatggtgtccggtgcactccactcacccccgaagctgttcgtgtagttgttcacatagcgatggtcaccaccgttctccatgtggttcctctcaatgaagttacggctcaggtccgccttgcacatcttctcaacgtggcgcatgcatacattgagcaggtcgtccttgaagttgcctagtgactgtcccaggccctccccctccagcaggacatgataggtgggcaggggtggggggagagagtaattgctcatcaatgcaccaaattcctgcagaaacaacacagagtcgctgatgctatgcagctgctcccgggtctgcttgtcctcatgcagcaccttggctctctcatccagagcatccatgatcaccttcacttggtccacagcatcctgctcccgctgctccagcgcagccctcacttcctccttttgcttctccaggtcccgcaccaggtcccggaagttctgctccaggatggccttctcattggtggtgaagctcttgatgcggtccttctccttctgccacttctcagcttcatcctcaatctcaatgatcttgagctgcagctgctccttttgcagtgacagctccgtctccttctcggccttggcctcctccactgtcacggtgctatgattcttgtgctcctggaacatgcaaaggtagcagatgcaggtctggtcggtctggcagaagagctccatcgtcttgccatgcacgggacacttgcgggcctcaaagtcccggatgggctcgagcagctggtggtctcggaaggcggcgccctccaggtggggcttgagatgcagctcgcagaaggaggcctggcacaccaggcaggacttgaccgccttctgcttgttgccgatgcaggagtcgcacagcacctcctcggagccggacttggaccgtgaaaaaaggcccgtgtcggcccgggggtagctgttccgccgggtctccccgggctccatgatggacaccgtgggcttccgggactccgagaaaatggacttgcgcagctcgcccttttcggcaaaggtaacgggtggcttcttggcagcccccagctggagccctgcgtacggcgacctcttgccttccatagagtccatgctgaagtagttggagttcttgtcgtccccggactcgacaaactggatgatgggtcgccgccactcattgcccgcgaacagggcgctcctaccttcccctggcttcagggcgctgcccaggctcttgccctcagctgcctccccgccgtgcccgttggtggtcttggcatccttgccgtcagccttggtgccattctccaggctgccactggggcccgacgggctccgggcatccctggcttctgggctcgacccgttgctcctggaggcatctgcagcttccatcgcagggtgcttggctgagctgtttcaggcttgctggggttcaggataggtgacctttctggcaggcgtctcggcagggagtggggcaggcaaccacgaggactagagacacacctgtgaggag

SEQ ID NO: 217 - DNA, 1917 bp, Homo sapiens
gggagcagagtcgactgggagcgaccgagcgggccgccgccgccgccatgaaccccgaatatgactacctgtttaagctgcttttgattggcgactcaggcgtgggcaagtcatgcctgctcctgcggtttgctgatgacacgtacacagagagctacatcagcaccatcggggtggacttcaagatccgaaccatcgagctggatggcaaaactatcaaacttcagatctgggacacagcgggccaggaacggttccggaccatcacttccagctactaccggggggctcatggcatcatcgtggtgtatgacgtcactgaccaggaatcctacgccaacgtgaagcaagtggctgcagggagattgaccgctatgccagcgagaacgtcaataagctcctggtgggcaacaagagcgacctcaccaccaagaaggtggtggacaacaccacagccaaggagtttgcagactctctgggcatccccttcttggagacgagcgccaagaatgccaccaatgtcgagcaggcgttcatgaccatggctgctgaaatcaaaaagcggatggggcctggagcagcctctgggggcgagcggcccaatctcaagatcgacagcacccctgtaaagccggctggcggtggctgttgctaggaggggcacatggagtgggacaggagggggcaccttctccagatgatgtccctggagggggcaggaggtacctccctctccctctcctggggcatttgagtctgtggctttggggtgtcctgggctccccatctccttctggcccatctgcctgctgccctgagccccggttctgtcarggtccctaaaggaggacactccaggcctgtggccaggcagggcggaggcctgctgtgctgttgcctctaggtgactttccaagatgcccccctacacacctttctttggaacgagggctcttctgtcggtgtccctcccacccccatgtatgctgcactgggttctctccttcttcttcctgctgtcctgcccaagaactgagggtctccccggcctctactgccctggctgcagtcagtgcccagggcgaggaatgtggccaggggatccaggacctgggatccagggccctgggctggacctcaggacaggcatggaggccacaggggcccagcagcccaccctttcctctccccactgcctcctctcccttcctacactcccagctcgagccgtccagctgcggtgggatctgagtatatctagggcgggtgggcgggtagcagtgctgggcctgtgtcttgagcctggagggagtctgctcctgccgccctctgccctgccagagacagacccatgcgctgcctgcccaccgtgcccctttgtccccatgtcaggcggaggcggaaggcccaccgtgccagaggctgggcaccagccttaaccctcactctgctagcacctcctccctttccccaaggtagcacatctggctcactccccactccgtctctggagcccaccagggaaggccctcatcccctgccgctacttctctggggaatgtgggttccatccaggattgggggcctctctgctcacccactctgcacccaggatcctagtcccctgccctctggcacagctgcttcctgcaagaaagcaagtctttggtctccctgagaagccatgtccctcgtgctgtctcttgcctgtcccacctgtgccctgccctccagcttgtatttaagtccctgggctgcccccttggggtgccccccgctcccaggttcccctctggtgtcatgtcaggcattttgcaaggaaaagccacttggggaaagatggaaaaggacaaaaaaaattaataaatttccattggccctcgggtgagctgagggtttttgcaaggaaaaaaaaaa

SEQ ID NO: 218 - DNA, 7006 bp, Homo sapiens
ttttttttttttcatttcataaataatgtactttattttattgcatatggctattaaggagggcatccatgatcaatacagactaaatacaatgcactattctagtccagtttattctcgtctccagcagcatcacattgacccctatatacagcgtgtacagtggaagacagagcaagataagttaagtctcttgtcatatcacaatagcaagaaatatatttaacatcttgatatccagaaacaatacgtacccaaaaagaaaacactgtttaataactgttaaagtttatatagcaaaaaatattttaaatttaaggtaagtcaggcaaaatgtacaaagacccaatatacattgtgaagttttagcaaacataacatttatacattttggttccattctgtaaactaaattaaaaatgtaaatattgcatatgcctttttgtgaaatgtacaggatagaggaaaatttagcatattatcatctgtgtattttgcttgttttaagctgcagtatgaacacgaaccatctgtatagtgtcatgactactctacggatagagggcgagttaaatatgcgtcaatacactgctttcagcagggtccatattcagtccctatcgtacctggggggagttacaaagcaaataccacccattgatgcctattcccaaaactaaataaaaacttcaggatgttttatacatcttaataaagtatatcatacactgaaattgaccttccagctaacattatatggcctatgcactgctgtgatgtataatttcagaaaagtaaaaccttaaaaatgttcagggagatcactttacattcaactttgtcttgcaatacaatcctctgttctaaagttcagcacggaagcaggaagacttttgcattgccattaaatatatttttaagacattgaattttttggtcttcctctaaaaaagcctcattttattaatgcattattctatagcgatagatatctattatatatttatatatatttttctaaaaacaaaacaaaacaaaaccaacaacttacatctccaatgaattagtgtaacctctccatgactatcagagaagataggcactggggaagcccccacgggaggagaggtcgacagccctccaatcaagtgtcgagggagcagaaaacggcagaacattctgccggtcaagttcagcagttttaggtaacatctgcgagaactgccacacactggtattttcagaatactgaaaacataaaacaagggtagtcttgtccggaattttttcgacaagtaacatgtactgcgagattgcttttcttctttttctttttccatcaataacataggggctggatgcctctttttatcagtttctttctttcctttttttttttttctttttgtttttttttgttcagggcagcctcactggttgacataataacatttttattaaagataatacattttttaaaaatcaaatctgccaaacccggaccaccctggaattgctagcacgcctacagggatttttggttacagaaaggcatgcccaagattcaggagagcagagacatctgagcttgtaaatagaataaaaggcgtttgcaatgtgaagtacctacataaacatctacatcgagaagattaaacaagtctgttaaaggtaaaaagagatattcatccccttcccaaagcccttccctcccacctcccactacccaatacagttgattttcaaaagtaggttgcttcagttacatataataattattatttagtaatcgtcttcaaagtccaatcccaaatttcacttccattgagaaatgtcagtcccacactgggctcggtgtggacgtaaacatcgcaggtacctgcactggaatccaacaagcagctgtctactggaccatttaaataaggcgaggacgcgctccagacacacagcgcaggggctactacaggaggtcctgtggacccccgccacggaaatccggctttaccttgaactgaggtaggactgtggtcgttttgagtgtaagccagtaaataccagattttaccacttccataggtacgggtgcactctcctagcatgctgagggttatatctgctttgccaaaaggaaaagaagaagaaattaaaagacactggccacaatttaagaaggccaatgaaaacatccaattttcttgagaataacttcttcagctaattttgttaaaacaaaacaaaacaaaacgcaaacagcacaatgatgaatgcccatccgggaacaagggaaagaggcaggtgaccttgccttgttgtgccccatctatcagagtccacagatgtttccaaacacagtcattgctcagatccaaaagaaaactgcaagcagcttcgggctgaaacagcgctgagcgtcttcttttaatgatattctctgacatgtgacatcctggtgataaagccagacagatcttcactctttcacgatggtggcctccttcaagtggtgggacaagaagtcaatgctggcgtaggtgttggcagggggcagggcaccgggacccggccccccgcacccgccgccggtgctgccgacgcccacagcgctgatgagacccccgaggcttcgggtccggccccaggagctcttgtctcccggctgaggaagcggcggcggcggcggctgcggctggggtggcagcccgggctcctccctcacgtcgatggcgatgtagttgagaccattctggaagccggcagaggtctctctgcgcatgggcgatccaccgctcccaggacaaccgaccaagcccccgggctgacccggggtccacggccggccctgcggtgccaaagggggcgccggctgcaactgtcgtggggaggtgggcggctcgtcgccccctccagggccgacacccacgccgccctcgctgcttttcctgagagagacattttccacggaggccgagttgtggcgcttggggttgtgggcgaaggacggggacacgggggtgaccgtcgtggtggaggagaaggtctcggaactgtggcggcggcggcccccctgcgggtctgcgcggatgaccttggcgccgcggtgggggtccgggggctggctggcctgcaggaaggcctcgactcccgacacctgctccatgaggctcagcctcttcacgcccgacgtcgggctggccacgcgggcagcttctggcttcgggggggccgcgataggttgcggcggggtggcggccacaccaaaagccatctcggtgtagtcaccattgtccccggtgtccgaggacaacgatgaggcggcgcccgggccctgggcggtggcaacggccgaggcggggggcaggcggtacagctcccccggggccggcggcggtggcggcggctgcagagacgacgacggggacgcggacggacgcgggggcaacggcggatacggggaggaggcctcgggggacaggaggccgtccaaggagcccacggggtggccgctcggggcgcccggcttaggagacttgggggagctgaagtcgaggttcatgtagtcggagagcggagaccgctgccggctgtcgctgctggtgcccggggtgcctgagcccagcgacgaggccgggctgctggcggacaagagcgaggaggacgaggccgccgacgccagcaggggaggcgcgggcggcgacaggcgggccccgggctcgccaaagtcgatgttgatgtactcgccggggctcttgggctccggtggcagtgggtactcgtgcatgctgggcaggctgggcagcccctccagggacaggcgcgtgggcctcaccgcccggccgcgctggcccaagaaacctgaccggcggccgctacgccgcacgggcgaaggcactacagggtgagggggctgcgtggggccggccccgaaggcgctggccgcctggctgggccctggcgtggcctgaggctccagacgctcctcctccaggatgcgccccacgggggagctcatgagcacgtactggtcgctgtccccgccacaggtgtagggggccttgtaggagcggggcaaggagctgtagcagcagccgggaacgcccctgagcggctccccgccggggtgcagggctgcggagaagaagtcgggcggggtgcccgtggtgaccgcgtcgctgggggacacgttgaggtagtccccgttgggcagcagcttgccatctgcatgctccatggacagcttggaaccgcaccacatgcgcatgtacccactgtcctcgggggagctctcggcgggcgagctggccttgtagccgcccccgctcgccgggaatgtcctgcccgccgcagaggtgggtgctggccccgcaggccccgcagaaggcacggcggcggcggcggcggcggcggccctgggctgcaagatctgcttgggggcggacacgctggcggggctcatgggcatgtagtcgtcgctcctgcagctgccgctcccactgcccgcgaaggccgcgccgggcgtcatgggcatgtagccgtcgtctgcccccaggttgctgctggagctcctgtgggagccgatctcgatgtctccgtagtcctctgggtaggggtggtaggccaccttgggagaggacgcggggcaggacgggcagaggcggcccgcgctgcccgagaaggtggcccgcatcagggtgtattcatccagcgaggcagaggagggctggggcaccggccgctgccgggctggcgtggtcagggagtaggtcctcttgcgcagccctcggtccaggtcctgggccgcgtcccccgagacccggcggtaggagcggccacagtggctcaggggcctgtccatggtcatgtacccgtagaactcaccgccgccgccgccgtctcgggccgggggcgtctccgcgatggactcgggcgtgttgcttcggtggctgcagaaggcgcgcaggtcgcctgggctggagccgtactcgtccagggacatgaagccggggtcgctgggggagcccgaggcggaggcgctgccgctggagggccgctggccggggccgtggtgcagcggatgcggcagaggcgggtgcgggccgggcggcggcgggtaggagcccgagccgtggccgctgctggacgacagggagccggggctggtggcggcgggcggcgagtgcgccacgggcatggacatggagcggctgtgttgcagcgcgccccctgccggcagcagcgccaccttgctcccgcggccgccgcagccgccgctcagggtgtgcgagcggctcaggggcgcgcgcaccggcccggggctcagggggctcccagccaccgacaccagcctctgcgccgcggccgccgctcccgcagcccggccgccgtcgccctcgctggcggtgcgcacccggcacgagctgcacttggccgccggcggggtggcggccaggctgtcggtgcgcgagcggcgcaccaggcccgtctggctggggggcaggttgaccaggtggtggtggcggcgcgcgccggggacgctgatggggtgcgtggccgacgaccccgacgattggctcttactgcgcggccggaactcgaagagctccttgagcgccttcatggcctccaggatggtctcgtggatgttctgcgccaccaccgagtcgtccgcctgcatccacagctcgccggggcctgtgacggccgagcggcccacctcgatgaagaagaagctgtccgagtggccgcagcggcggatgttcatgagctgcagcgtcaccgacggctgctcgcagttgagcttcacgaagccgatggtgcgcgcagacaggcacagacggtacacccccgtcaggttcttgctctggcccagacccttgggcttcaggttcacctgccacacctcacggtaggcggccgtggcgggagccaccagcccgtagctgtcctcggccccggcggcgccggcagagccgcccagggcgccgggcagggaggcgctgcaggacgcggcgggcgcggcggcggggggcgcgtctccggcggccgcgcggccctcgctgaccaggtcggtgagcgcgcggtaccagccctcctgctcctgctcgttctcggcggccacggcgaagtactcgtccttggtgtagagggcgatcaggtacttgtgcttggcgtcggcgcgcttgttgatgttcaggcagcagtcgagagcgatcacccgtttcggcgcgcctgccttgctccgccactttttctcgctctcgtagtactcgagccgcggcggttgcggcgccgaccccccgcccgccgtcgcctcgtcgccgcccgcgccgggtccgcgcagcacgaagaagcgcttgtggccatgctcttcgttgcgcaggtagccgcacttgcgcacgctgtggttgttgttgttgttgttgttgttgttgaggttggggccgtctccgctcgccggcccgggcggcccgtgccgcggcgggctcgccatcgcgggcgcttcaggccgcgcggcccgggcccggcgcccaggggtttggggcgaggggcggagggggcgcgggcgggggcggctccctcccacccttgcgcccggccgcccgcccgatcacgcgtccctcgggcccaggcggtggggaaggtccggggagcccgcgggggccagcaccgctcggcggcgccgcgccctccgcgctctggggctcctgaggatgcccggcgcgggcggtggccgcccccctcccccgggctctgcggccgctgcctcctcgggctctcgggcggcgccgggggacgcgctcgctgggccgggagtcggggtccccgagccgcggggccgagcctaaggcgcgcgcggccgcaccggggctgctgccgccgcgtcgcgctccgggaagccggggtgcgcccgggcgctcggggttccgcgccgccgccggggctgctgctgctgctggtgttgctgctgctgctgccaacggcgacccgggctcgtcgcggtccccgc

SEQ ID NO: 219 - DNA, 2026 bp, Homo sapiens
tactgactttcagcaccaacttgtggtcccaggtaagtttccacgctggtactttagccctgggctcgaacctgcggacacgctgtggctgcaactccccgcccgccagacctcagtacgcagcgcggctggtgagaaacataatgcactctgacttccacgcgtggaatggggagatggactgcacggcgggcggacctgctcgggctgatggacggcaggtggactgatgtgcgcagggactggcggcagcgcggtcagagccagtcagccaaagccaggccagcacaatagactgtcccggttcccgccaggaggcggccgagcaccaactgtacggtactgcgcctgcgccgcgaccgccaacgcgcccagtctacgcttgcgcggcgcaacagggccgactgcagctggaagatggcggcgtccgtggtctgtcgggccgctaccgccggggcacaagtgctattgcgcgcccgccgctcgccggccctgctgcggacgccagccttgcggagtacggcaaccttcgctcaggcgctccagttcgtgccggagacgcaggttagcctgctggacaacggcctgcgtgtggcctccgagcagtcctctcagcccacttgcacggtgggagtgtggattgatgttggcagccgttttgagactgagaagaataatggggcaggctactttttggagcatctggctttcaagggaacaaagaatcggcctggcagtgccctggagaaggaggtggagagcatgggggcccatcttaatgcctacagcacccgggagcacacagcttactacatcaaggcgctgtccaaggatctgccgaaagctgtggagctcctgggtgacattgtgcagaactgtagtctggaagactcacagattgagaaggaacgtgatgtgatcctgcgggagatgcaggagaatgatgcatctatgcgagatgtggtctttaactacctgcatgccacagcattccagggcacacctctagcccagggctgtggaggggcccagtgagaatgtcaggaagctgtctcgtgcagacttgaccgagtacctcagcacacattacaaggcccctcgaatggtgctgggcagcagctggaggagtggaggcacccaggcaactggttagacctcggcccagaaagcacctcggttggcatcccatggggacatattgcagaggaacgctggtgccccactctttactccatggccgcttcactgggcagtgaagatccgggcaccgtgaatgatgctctaaccttttgccccacgtgggccatttgcagtagaagggtcctggcctgggccagcccgggacaatgtggcccttgccaagttggccaatgccaatcatcgggcactaatgactgcacttatggtgggtggccgttgcacctgtccaggcccactggcttcaaggtggctgtgggccaacaaagctatgccagaagttttccagaccttcaggcatctggctatgcagagacggggcttggctgggtgcacactttgtctgtgaccgaatgaaaatcgatgacatgatgttcgtcctgcaagggcaggtggatgcgcctgtgtaccagtgccacggagagtgaggtggcccggggcaaaaacatcctcagaaatgccctggtatctcatctagatggcactactcctgtgtgtgaggacatcggacgcagcctcctgacctatggccgccgcatccccctggctgaatgggaaagccggattgcggaggtggatgccagtgtggtacgtgagatctgctccaagtacatctatgaccagtgcccagcagtggctggatatggccccattgagcagctcccagactacaaccggatccgtagcggcatgttctggctgcgcttctaggcgggaagcctatgtaagcaagagggcagggccggggtttgtggtcccccccccaccacaaacacagcacttcggctcctctaacctgtgccacaggtgaccaccaataaaaaaaaaa

SEQ ID NO: 220 - DNA, 2343 bp, Homo sapiens
gcggccgcgtcgacccggcgcagaaaccgtaaaaggctggagcgggcggggtaggtgtggctctgtgtgcgtgacctgagccccggtcccagtccctgtagtctcctgcggccgcggcctctcagccatgggcgccgtctggtccgccctgctggttggagggggtctggccggagcacttttcgtttggctgctgcggggcggccctggcgacaccgggaaggacggggatgcggagcaggagaaagacgcccctcttgggggagctgcgattccgggaggccatcagagtggcagcagcggactgagccctggaccttccgggcaggagctggtcaccaaaccagagcatcttcaagaaagcaatggacatttgatttctaagaccaaagaccttggtaaactgcaagcagcatcatggagattgcagaatccttccagggaagtctgtgacaattcaagagaacatgttccttctggacagtttccagacacagaagctccagctacctctgagaccagtaactctaggagttactctgaagtttcaagaaatgaaagccttgaatctcctatgggagaatggggattccaaaaaggacaagagatatctgctaaagcagctacatgttttgcagagaagttgccttctagcaacctgctcaagaacagagctaaagaagaaatgagcctctctgatttgaacagtcaggaccgggttgaccacgaggagtgggaaatggtgcctaggcactcatcttggggggatgttggtgtgggtggcagtcttaaggctccagtgttaaacctaaaccagggaatggacaatggaagaagcactttggtggaagcaagaggtcagcaagtgcatgggaaaatggaaagggtagcagtgatgcctgcagggtctcagcaagttagtgtcaggttccaggtccattatgtcacaagcactgatgtgcaattcattgcagtaactggagaccatgagtgtcttgggagatggaacacttacatcccactccactataacaaggatgggttctggtctcattccattttcctgcctgcagatacagtggtggagtggaagtttgtgttggtagagaatgggggagttacccgctgggaagaatgcagcaatagattcctagaaactggccatgaggataaagtggttcacgcatggtgggggattcactgattcagtttgcaaagtaatggagaagctgtagaacaatgtggaagaggctgaggttgtggaacacactgaataaaataaaggcagtgtgactccaaattcagccatctgaattgtttaaatttgctagtggattttgtctactgtgcagaaatatatatgtctaatgtgcagaaatatatatgtgtgtatgtgtgtatatatatgcacacacacacagataatgcttccagtgaatgtgaacttcttttccctgtggcactgattgacagacttgtgctgatccattattactttagggcttgattctcttggggagtgacttggctaagcttcaggtgtaaactgtggtcacggagcaaaaacattaaccagctgcccagggttcaagcttgagcctttaggtgatctttaaactatggtagtaaaataagcctcactcaaacatagctgacttcctattggtacagcttgaaaagcactttttactacatacacattttatgcttaaaaagttaacatgatacgaaactgtgattagaaaatatctggtctggatgtgattagtaaggatacaagataatgttctaagactgcctaatgctttttgtttgattttcatctgccaggcgttgttatgtgctatgagggtagcaagtacgtctttgtcttaatgatctaaggctggtgtagaaacaaagggcctaatgagaaccaatcatcatggaagtcagttgcgggggcagcccataaggaaagggaaagtgagtggggttgggcataggctgagtgaggtggcctgaatgacacctcttagaggactgtgaagtacaggcacagcccgactgcagggagggatgcacccatcatttacccatgggagcatctgtaggaccatctctctcccacttcttctcccctcccccaccgcatctggccagatggactgtcctacagcaatcgtttccatctgtcaccctcttccctctcctttcataccagtcactatcttgggtaacaaatttatacaggacagtggtacagaaatacatctttgctctgagaatacagcaaatattaacttaaattattataactgaacaaataataaaacctgaattttaatatcttcaaaaaaaaaa

SEQ ID NO: 221 - DNA, 1232 bp, Homo sapiens
gtgaaacccgccatatagcgcccatcctcttagtcaccgtcaggactacaactcccacaatactcggcggcagaactacagtccccagctgctccggggctgcgccacgtcgactccgctgggtggggccggcgtcgggcggggccggcggggtcttcagggtaccgggctggttacagcagctctacccctcacgacgcaaacatggcagcgcagaaggaccagcagaaagatgccgaggcggaagggctgagcggcacgaccctgctgccgaagctgattccctccggtgcaggccgggagtggctggagcggcgccgcgcgaccatccggccctggagcaccttcgtggaccagcagcgcttctcacggccccgcaacctgggagagctgtgccagcgcctcgtacgcaacgtggagtactaccagagcaactatgtgttcgtgttcctgggcctcatcctgtactgtgtggtgacgtcccctatgttgctggtggctctggctgtctttttcggcgcctgttacattctctatctgcgcaccttggagtccaagcttgtgctctttggccgagaggtgagcccagcgcatcagtatgctctggctggaggcatctccttccccttcttctggctggctggtgcgggctcggccgtcttctgggtgctgggagccaccctggtggtcatcggctcccacgctgccttccaccagattgaggctgtggacggggaggagctgcagatggaacccgtgtgaggtgtcttctgggacctgccggcctcccgggccagctgccccacccctgcccatgcctgtcctgcacggctctgctgctcgggcccacagcgccgtcccatcacaagcccggggagggatcccgcctttgaaaataaagctgttatgggtgtcattcaggaaaaaaaaaaaaaacaagagaacgtacaagcaaatcaaacaagaaaaagacaaaaacaaagacaccaaagaaagataaaagaggaggggagcaaataagcaatcggacggcgagcgacccacgcgccgccacaggtgataagaggcgcgcaccgcagcctcacattagccgaaggcaggggaccacaagcgaggaggagaaagggacggcgatgtgcggacaaccgcggggaagctgggcgccacccgccacgcgtggcgaaaaacaggaagtagtaacaagatcggcgccgtgttaccgccgcgggccg

SEQ ID NO: 222 - DNA, 1117 bp, Homo sapiens
ggtgactaggaagagccgagactgcgaaggagaacgcagcaagcccaggcggcggtggaaaggctggaggacacacctaaacatgtggaatcccaatgccgggcagccagggccaaatccatatccccccaatattgggtgccctggaggttccaatcctgcccacccaccacctattaatccaccctttcccccaggcccctgtcctcctcccccaggagctccccatggcaatccagctttccccccaggtgggccccctcatcctgtgccacagccagggtatccaggatgccaaccgttgggtccctaccctcctccatacccaccgcctgcccctggaatccctcctgtgaatcccttggctcctggcatggttggaccagcagtgatagtagacaagaagatgcagaagaaaatgaagaaagctcataaaaagatgcacaagcaccaaaagcaccacaagtaccacaagcatggcaagcattcctcctcttcctcctcctcttccagcagtgattctgactgaatacaggccctggacccttccctcaagtctcaccagttctgctctcccatcaagcttcagatgccatgttgtactgggggaatgtagcccttgtgctccccaccccctacctccacctgagcctcaccctgctgttgagccctgagtggctaggggaaatgggaagaggattgccatggcctggccatcttgttgctgcttggttagatcatatagctaatgaattaggcaggggagctattttttgaagatgatgaactaaatgttgaagacaagtttgagatctgtaaaatgtgattttttacttccacttataatacttgtgattggggaggtttgtggaaattcaattatgatgaaaaacctatcttttttgtaatgttggcatacttggggaatttagtggcaaatacattccccagcaggccttttgttggttgcactaactgcaaggttgctgggaagtagagtccatttggttgatgagctttgactgcggttttggaaccttacctctcctccttagcccaatatgctgtcttgggtcctattcaaataaagttatttctcctggtctcaaaaaaaaaa

SEQ ID NO: 223 - DNA, 1689 bp, Homo sapiens
ggcacgaggacggcctctgcatagtgcagaacattctgctgctcttaaagaccctcatccctcccgtgggagccccctttggacactctatgaccctggaccctcgggggacctgaacttgatgcgatgggaggctgtgcaggctcgcggcggcgcttttcggattccgagggggaggagaccgtcccggagccccggctccctctgttggaccatcagggcgcgcattggaagaacgcggtgggcttctggctgctgggcctttgcaacaacttctcttatgtggtgatgctgagtgccgcccacgacatccttagccacaagaggacatcgggaaaccagagccatgtggacccaggcccaacgccgatcccccacaacagctcatcacgatttgactgcaactctgtctctacggctgctgtgctcctggcggacatcctccccacactcgtcatcaaattgttggctcctcttggccttcacctgctgccctacagcccccgggttctcgtcagtgggatttgtgctgctggaagcttcgtcctggttgccttttctcattctgtggggaccagcctgtgtggtgtggtcttcgctagcatctcatcaggccttggggaggtcaccttcctctccctcactgccttctaccccagggccgtgatctcctggtggtcctcagggactgggggagctgggctgctgggggccctgtcctacctgggcctcacccaggccggcctctcccctcagcagaccctgctgtccatgctgggtatccctgccctgctgctggccagctatttcttgttgctcacatctcctgaggcccaggaccctggaggggaagaagaagcagagagcgcagcccggcagcccctcataagaaccgaggccccggagtcgaagccaggctccagctccagcctctcccttcgggaaaggtggacagtgttcaagggtctgctgtggtacattgttcccttggtcgtagtttactttgccgagtatttcattaaccagggactttttgaactcctctttttctggaacacttccctgagtcacgctcagcaataccgctggtaccagatgctgtaccaggctggcgtctttgcctcccgctcttctctccgctgctgtcgcatccgtttcacctgggccctggccctgctgcagtgcctcaacctggtgttcctgctggcagacgtgtggttcggctttctgccaagcatctacctcgtcttcctgatcattctgtatgaggggctcctgggaggcgcagcctacgtgaacaccttccacaacatcgccctggagaccagtgatgagcaccgggagtttgcaatggcggccacctgcatctctgacacactggggatctccctgtcggggctcctggctttgcctctgcatgacttcctctgccagctctcctgatactcgggatcctcaggacgcaggtcacattcacctgtgggcagagggacaggtcagacacccaggcccaccccagagaccctccatgaactgtgctcccagccttcccggcaggtctgggagtagggaagggctgaagccttgtttcccttgcaggggggccagccattgtctcccacttggggagtttcttcctggcatcatgccttctgaataaatgccgattttatccatggaaaaaaaaaa

SEQ ID NO: 224 - DNA, 11438 bp, Homo sapiens
ttttttttttttacacagaagttactttttaatttttaaggaggaaccagtgatgattggtgacaaatctctcacaattaaaaatgggtggaagggccaaatataaaaacattttgcagtattttattctttcgtttaagaagctataacttaaaccatcttcagaaacaagatctgtcacccgtagagcttagagtccaaatagacacctatgaggcgagcacaaggggcggtgtgaggcagctgcaggggcctgaccaggggccggggttggctgtgtcctaggcggctgggcagccactggcccccactgccccgtggacctccacagagcgagtcatggcgacgggggaccggttcaccgccagcctcctcatgcagccgcagtaggcggggggccagggctgcacggccatgggctcaggcaggcccccgaggtacagaggggctggggcaccagctgcagccgccagcaaggggcccacggtgtggttgctctgcgcgtccacctccagccggagcacattcccgcttttcatcaccgctagccggtgccactggccatcacacagcactgaggggcgggtcactgacgtggagaactcccctgctccgtcatccgcccgcagcaggacttgcttctcggtcacctgcaactgcaagtaggggggcgtccgggcctggcccaagtggaagatcagtccggtgactgccaggggccgcacctccagttccaggcccacatcaggcagtgtagctcctgggaggtctaaagtgataactcccccgctgcctgggaagaacaggcccgcctccagggggcccaagatgcagggtgtgacccctgccatccgtgtgggggcccccaggggcctcccgtgcagcctcagtctcttcacacagccgctgaacccgacggtcaccggaagtttggagctgtggctgctggccgggaggccgcccacaaagagggtgtggggctgggggtgctctgccaccctggtgctgccggtgcggcccctcctggctccaggcccgggccccgtccgtcaccagcaggatccggttcttctcccagcgcacggagaccttgtgccagcggccaggccgggagcgctggcggctctgggcgcggagccgagtcccgaggccttccatctgtgcaacgaagtggccattgctcaggaagagcgccagggaggggctgccgggcctcagacgggcagtgaagaggaggaggcctcgggagcttcgcgggaggacgtgcatggagagactgggccagttcctatgtcgggccaggatgcccacaaactccaggtgactggacagggaacccccaaactggtaggagtctcgggtggtcctgaggtgtgggggcagcatgcaggcaggatgccgggcgggctgacggctgcggcgggaggccttccgggcggtggcctgcagtcctctaggccccaggcccggggtctgggcttgcagggcgggtgcacagcccgtgctcacattgacgctgcccaggttctgctgcagatcaaatacgcgctgtgggcccaggagccgctgcacgaagacgttgctgatgcagccactgaagttgtaaatggtgccagactcaggcaggcctcccaggaggagcctcgggggcccctcaggctgcggctggagctcgggggggtggtccccggtggggcttcatctgctggagctggtcatcgacatacagccagactcccgtggcattgctgtagaaggcgacgtaatggggggcaccatcggcgaagcccgcttgagttttcacttcagtcctcaggagctgtaggctcacacggccctgctgcagggacacctggcatagcccatccggggacgcccggtagtagagcagggcactgtcctgggcgctgtggaagccgaagccggagtagacgttgccagtgagcggtgccacgttcgagagcgccaggcgaaggaagccgtggccatggaaagtcatggcgcgccccaccagcaggtcggcggtgcagccggcgctcacgcctgtcgtgttcagccgcttgaggtccacatacttgcccagggccttgatgcctttgacgcagccacggactgagcctccggtggggaagagccatcgcaggctcgggggcagctggtcgggcggcacgccccccaggtagtaggcgtcggccagctccagatcattgtcctgctccacgctgtacaccgtggcccgctccacacgcaccagcacacgcttgcggctgccccccagcaggaacacctggatcgccttgctggccgaggtcaggggcggtgggggctgcagtgggacggcctttttcaggccagccccaaagtcatacaacagcacgaggctgccttcttgcacggccaagcacaggaactggctctgctgcttcaggaagaagagcaccccgctgtaggacacgagccgcagctcctgctcgaagcgcttggtggtgctgatctgactgtcgaagctgatgcgggcgaagccggtgccgtccaggtaggagccgtccgtgagccacgggtccccggtcgacttggagcgggcacaaggcctgtccacagccgtgtccagctggaaggtcctctcgaagttgtagaggctgaccacctcctcattcagcgtgtccatctcgatgcagccccggtagccggggaagcgaagcaggggagggggcgtgaaggtactggggtaccccccgacgtagaagacgaagtcgtctggccgcaggttgagcagcccctctgccccaggggccaccgtgtcacccttggtttcctggatcatctgtctctccactgtgacggacatgtggccaaactggagagtcctgtccaggctgacagctgcgaactgctccccaatgtcctcatcgatgcttaggactgcagggcccgcctcacccagctgatacacccagtgcaccttcttgtcacgcagagacacacccatgtagtccccagtggcctggcggctgcccatgtacatcacaaagcgatcctcggtaccctgcccaggctcaggctctgggccctgcaggtagaacttgagggcagtgtaggcagcaaggtcggcaagatcccgtggggtgcgcagctgcacccctgagcgcccgttgaacttcatgggcaccttgaccttactggcagccccccgggcctgggcaatgagctctcgcacgcggccaatgctggcggacagggccaggctggcgttgtgcaccccacggttctccaggatgctcagcttggccagcagctggggcagcgtcttctccagggtggacactgagtggcctgcgtcaagcactgcctggcccaggtcctggccccgcaggccctcgtactggccctgccaccgctccacattctcctgcatggcctgcagctgggactgcacacgggtggcggtgtcctgggcttcagcagccacagccttggcatgtgcgatcttcttgcttgtctcgtctgtgtccatggcaagcatggcctgcgccgcctggatgtgcgcctccagctggtccttcttggcccggacatctcggagctgggtcctggcaccctggagggcagcccacacaaggcccagcctctgctgttcctggagcatggcctcttctagtgcagtgctgttggccaggagctgctgggctcggtccaccaggccctgccgcaccaccgtcgcccacgtgtggtccgcctgctgcagggcctggccagcagcatcctcggcagcctgcacggcctgcaggatgcggctgtaggcgttggaggcctcgatggccctctgggtgaggcggtcctggttgacgtccaggatgatgctggacagattgagtgccagctggcccagctgctgtgcgtgggcctcggcggcctccactagacgcagcttgctgcccgccggggagaaggtctgcatcctctgcagcagtggggtccgagccccgtccaggctggcggcgaggcgctccagctcctccttagcctggtccaggctgtgcagcaatctgaagacgctggccagggtgtccctagccgcatgcagagtggcctgcagggtggcattgtcccgggacagctcctgcttcctttgcagggcttcctccaggcgctcctggttgcggctgttgagctcctgggcctcccgtgtggcgtccactgcccggttcaaagcctctcgcaggtccatgaggccggcctcgtgctgggccagccggtcgcgggtttgtgtggccagtgcctggttctcctcccagaggctgctcagctgctcctgcacccgggccagcaatctctgtgctgcagccaactcagcctcagctgctgcctgcggggcccccaggtcccgggcccgcatctcccagagcagccgctccacctcggccagtgtccggagcagctgctcacctgatggagccgaggcattggccagccccaggtggcccgtctgggacatgagctcgctcagggtgcggtccacagcccggatggccgccaacagcgtcttcgcatggcccagtgtggcctcggtgccggccagcaattggctcgcctggtctcgggtccccacggcctggccgcctagccgccgtgcgtcctgcccgaggcttgtgctctgctgctccagcacctccagctgctgtgccgtctcatggcgggggcccagggggctccggagctggctctgcaggtcagcgatggaggcgttcagcctgtgcagacgggcccaggccatggagctggcattgatgccacgcagttgctcgtgaatggcggggaggagggcgccggcccgttccaggtcatccaggagcaggaccacacagtggtcacacacttcacagtggatgctgtggcccacaggcccgcctggaacaggcacctgatgctgctggctgcaggtgtcgcagcgctccccgctgagccccggggggcagttgcagcggcccgtgtgagggtcacagcggcccccagggcactggcagcgcctgcagccctgctcagggagcccccagtagccaggggcacactcgcggcactggggtcccatggtccctggtcggcagtggcactgtccgctctgggggtggcactcggagccctcggcggccggtccacaagcacacgggcggcagcccccgcagccattgaaaccaaaatgtccctcctggcagcggtcacagcgccgcccagtcacgcccgccttgcacaggcagtgcccgctgtgggggtcgcaggcctctgtcccacatggggtacagtcgcaccgggtgcagttgccgggcagcagggcgttgccgtagaagccgggggcacagatctcgcagcggggcccagtggtgtggcgcaggcagccacggcaggcgcccgtcagggggtcgcagtcgctgaagagcaagttggggtcaccgttgccgctgcagtcgcatggctggcaggagctgcccagcaccagtgggttcccaaagaatccgggcgcacaccgctcgcaggaggcacctgcataaccaggtttgcagaggcactgggtgcggccgcctcgcaggacacagccctcggcgaagttgttggaaggcactgagagggggcaggggcagctgacacagggggcgctggggtcgtccctgctgctcacgaagccagcctggcagcgctcacagtgggccccttcggtgttgtgctggcagtccacacagacgccagagccagggaggcagcggtctgagtgtccatggcactgacaagggacacatcggcccaggaagagacctttgacgtcccgatagaagccgggggcacattcctggcatgagtccccccggtagctggcggggcacaggcacagctccacattgctggccagggccccctggcctgctgggctggccacctccagtgccaccctgcgcaggaagacagccgaggagatctgtgagaagagggcacggatctgcagctgctccaggctggccagcaccatcatgagctcctcgcgggacacagtgttgcgcgtctccgtatgccggaagttcccctccaccagctgcagctgcccacggtgaacgtggccaggcgtggggtatgccggctccaggaatgtgatgctcatctggttgccctgcagcaccacatccggcctgctctccatggggacaaagacatctccccgctgggtctctgagtgcagttcataacggagggtcccaccgtaggatgacacccggtcccccaggtaggagggtggggcctgccagtacagctcggggaaagcctcgggcacagcctcaggcacgtgccgcaggtctgcacggagcatctccgtccctggctgccgctcgtggggcaccacctgccggtcagtgctcagcagcacccatccctccatatccacgaactcctggcgggtgtaggacgagctccggcagcgctccgtggccccaaagcagaagcagcgggtgcaacctttggggttggcagcatccagtgagaaggtcccaaggctgcactggtcacatttggggccctgcacgttctccttacagtagcactgccctgtgagggggtcacacacgccaggcgcagtgcccgcctcgtgacagtcacaggggcggcagcgggggtagccatggaagcccggagagcaggtatcacagcggcgcccagtcacgttgggtctgcacttgcactggccgctgtctgtgtcacaggtagggtctgtgagctcctggatgccgggccctgagcagttacactcctcacagccgaccagggggtggcagccaaaggtctggggctggcacagcaggcagtcgggcgggatggtgcgtggcgggcagatgcactggcccgtgagctcgtcacagaggcgggcaccgcagtcacagggcctgcagttggggaagccccagtatccggtggcacagcgggagcagtcacggccaatgacatgggcatggcagggacactggcccccgaagggctcacacgtggggcctgtagcacctacttcgtggcagccacatggacgggctccgttgttatagaagagggagagggaagcagcagcgtttcggcagaacagggatgagctgctggggctgatgtggtagccctgggctgcgcagtggctgatgaagtcataggatttatccaggggctcctcccggaggtagccaaagctgtagacgttctcagggaccacgagtacataatccagccagagccaccggcccttgggcacacgcacggtcacagtgagctcgctgtgggtcacgtccagcagggcctggccctcacacaccaccagggtgcggcagccgtagccatgtggacagaagctggcgttggcgtggccctgccacacgcggccggcgttgatgaggacttccacggggaaggtggggtgggctggctggtagccgtgcagcaggaaggcatagcggcccagcgtgggcacatgggtggtgaagaccacggtggcctggggctcacgcagcagggtgggctctgcatcagggtccacagcggtggggggccgaggtcggggtccagctggggacatggctggagtgagatcctgcgcgtgggtcagcgggaggccgggcggcagcgggatcacctggcagtccctgaggatgatgggctggggcggctttgggaagcgcgagggcagacaggcggcactgttggggccaaaggcgccgtggctgctgatgcagctgacccggggctccacgaactccgggctgaactcctcaatgggcaccagagtgaccccgtgcaggaagaagcgtgcctgttcggctgtgagcctcacgctggcctccgagtccaggtggaagacagccaggtggtcctgggtatcccgggcagtgccccggcacagggtgctgtacaggcaggggtgcagggagagcagcccctgctggggggcccgctgtggggtgtgcacggccacgcccacctcctggcgggcatcctcattggcgtactccaccactagggcatagcggcctggctgtggcactgccacttgaagctggacgtccacatcactgcccgtgcaggtgatcagtggcgggtgcgacgggctgagctgctccgtggggcagggccggggcaggctgttgtcctggcgacacagggcctccagcccggcggccgaggggaagccatccagggggaggtgtgtgtagaggaggcagttgtcgccagactgctgggcagagggacggtatgtgcaggcctcagtcacccgcagctgcaggagcgccgcctcgtagtatgcgctaggcagcagaaccacgtagtccaggagcaccccttcggcctccacacgcagggcccaggtgccagggttcagcacaaagggctctccgaagcccctctggggcacggtgatgaaggcaggctccgtgctgggtgggaaggccacgggctgactctgtgctgtgcagttggcgcaggtggccgacctgccctcctctcgcacagagacccgcccgctcacactcatggccccccggttgacgtatcggaagacgagccagaaaaggtcaggggaggtcaggttcagcctggccacgatcctgggctggacaggtgccatctgcgcgtagcccctccagctgaagttctcgaactcgagggggttgaagccaaagcgcacggcgtgaccctcaggtgtggcagcctcctccagctccaggcgcaggtggtgcaggtccgggaggtagtggtccctcgcaggctcgctgcaggtggggccctgggtgttggggcggcaccggcagacgcccgtcctcggttcacagctctggcccagtgcaccgccaatgtcacaccggcagctgcggcagccaaaatagtcagcctgatccagtccaaagaagccatccttgcaggacgcgcaggcctggccgcacacgtggggcttgcagaagcactggccggtgcccggctggcactcagcaactccacccagtgtgcccctgaggtcgcagctgcagcgggtacagccctcggggttgctggggctcagtccccagaacccaggtttgcagcggtcacagctcggcccctccacgtgagcccggcacatacagggaacctgtgcctcaggaagggcaggatccactggggccagaccggcagggtggcaagagccagcttcgcagtaggggaagttgtaggcaccgggcacacatgtgtcacaccgcagccccgtcacacggggccggcagctgcactgcccactccgggggtcacaggctgcgtgcagggagccttcagcagagcagtggcaggggacacagctggggaagccgtgaaagccggggctgcattcctggcaggcagtgcctgtgtagccggggcggcagcggcacaaacctcccgccccacagagctggtccagggctccccgagggtcgcaggtgcatgcttggcagttggggaaaccatggtagccagggcggcaccggtcacaatgaggtccagcaaactcaggctggcataggcagcggccggcctcatcgcagccctcgggcaaggttcctgcagggctgcagccacacaactggcagagagggaagtgaaagtagccgggggcacagcgatcacatgtggccccctcgaagcccactcggcacctgcactggcctgtgtcagggtcacagcggtcatcggccactccagggctggaacactggcagggctggcagccggggccgtagaaccctggcgcgcagagctcacaatgggtgccttggaagttgggtttgcacagacagcgtcccacccttgggtccttccggcaggcgttgccctgggtccctgccgcgctgcagtcacaattcacaatctggccggctggcagcacctgctccctggtgtcattggaggacgagggcgtcgggtagcagcttgggaagcccgtgaagccctcggcacacacgtcacaccgctccccagagaagttgggccggcagtagcatcgacccgtcaggtcctcgcaggtgccatccgtgaagtcggactcgcagttgcagcggcggcagacgtggggcgagtcgagagggtggttgggagagcggtagaagccgggcaggcagcgctcacagttgacgccggtggtgtggtgctggcagtcgatacagacacccccaccctgataggtgccatccaggctctggctggcgcggcgccggtccacctcagggtcgtagtaacagtcggtggcatggccgtagcagttacaggactggcactcgttggcactgttggcagtcgcaggcttccacggctgctgattgaagccggggcagcagcggtcgcaggtgcccccgcaggtgttgtgctggcaggtgcactgcagcctgaacgggtccgtggggtctttggcatcgcaggcatccgcgtggccgtggcagacacagcggcctccgatgctgatatccttgatgctgtaataataccggcgggtgaccgtggggtcccgcagcgccttccccatgagatggcccagcagcgtgttggtacgcaggaagcgcaggcggacgttggtggccttggtgaactcacgtagcagcggcgagtaggagaaattcatggcgcccggacgtccgttcaccagggacaccacgatctctccgttctccaggggcacgatgcgtgagtactcggtggtgcagatggccgcgtcgtcccgtgtgatgcgctccagcgtctgtggcccgaaccgctccagacagtccctcttggaggaggcaaagaactgccagggctggtaggtgcggccgaagtccatggaccgctccagcacccagaggtccggccggggtgagttggcaaacttgatgaggacgtaggccacgtggaagacctggcccaggtccagggtgacgttgacctcgttgtactccaggccgcgggacagcggtggactctgccaccagcgctccgtgccatcgatggcattgctcgcggggtgtgccttgttgctgttggcagccgtgcagatgtcacagtactggccccggatggtctggttggggtcgccgccggccacggggccccctaccagcttgcagtaaaggtcctcggtggggcgcggggagccgcgcgccggggcctcctctccgcaggtcgcggaggcggcgatgcgggcgccctcggccaggttgaagtagggcgggtgcaggctgaagccgccgcccgcctcctcccgcgcccgcgccgcgcccagcagcgccagcccgaccagcagcagcggcgcggggccccgggggccgcgaacacacagtgcgctccccgcgcagagccgcttcgccatcttcccggctccgggccgcgtccccgagctccagggacagcgcgcgcggcgggagcccggcgggtct

SEQ ID NO: 225 - DNA, 1018 bp, Homo sapiens
caacttttttttttttttttttgctgtaggcccgggtggttgctgccgaaatgggcaagttcatgaaacctgggaaggtggtgcttgtcctggctggacgctactccggacgcaaagctgtcatcgtgaagaacattgatgatggcacctcagatcgcccctacagccatgctctggtggctggaattgaccgctacccccgcaaagtgacagctgccatgggcaagaagaagatcgccaagagatcaaagataaaatcttttgtgaaagtgtataactacaatcacctaatgcccacaaggtactctgtggatatccccttggacaaaactgtcgtcaataaggatgtcttcagagatcctgctcttaaacgcaaggcccgacgggaggccaaggtcaagtttgaagagagatacaagacaggcaagaacaagtggttcttccagaaactgcggttttagatgctttgttttgatcattaaaaattataaaagagagagagagagaactagtctcgagttttttttttttttttttgctgtaggcccgggtggttgctgccgaaatgggcaagttcatgaaacctgggaaggtggtgcttgtcctggctggacgctactccggacgcaaagctgtcatcgtgaagaacattgatgatggcacctcagatcgcccctacagccatgctctggtggctggaattgaccgctacccccgcaaagtgacagctgccatgggcaagaagaagatcgccaagagatcaaagataaaatcttttgtgaaagtgtataactacaatcacctaatgcccacaaggtactctgtggatatccccttggacaaaactgtcgtcaataaggatgtcttcagagatcctgctcttaaacgcaaggcccgacgggaggccaaggtcaagtttgaagagagatacaagacaggcaagaacaagtggttcttccagaaactgcggttttagatgctttgttttgatcattaaaaattataaagaaaaaaaaaa

SEQ ID NO: 226 - DNA, 2960 bp, Homo sapiens
atatgatccgctcggcttcctgggtctggctgctgccgcccgccggtgtccgcccgtgtcgcgccggggcaccaaggagccgttggagggtccgggcggaggcccgctcgtgtggaagtcgtcgacgccgccgctcgtccgtcctcccgtccgttctcgctcccggccgccatcatgctggcgctcatctcccgcctgctggactggttccgttcgctcttctggaaggaagagatggagctgacgctcgtggggctgcagtactcgggcaagaccaccttcgtcaatgtcatcgcgtcaggtcaattcagtgaagatatgatacccacagtgggcttcaacatgaggaaggtaactaaaggtaacgtcacaataaagatctgggacataggaggacaaccccgatttcgaagcatgtgggagcggtattgcagaggagtcaatgctattgtttacatgatagatgctgcagatcgtgaaaagatagaagcttcccgaaatgagctacataatcttctagataaaccacagttacaaggaattccagtgctagtgcttggaaacaagagagatcttcctaatgccttggatgagaaacagctaattgaaaaaatgaatctgtctgctattcaggatagagaaatttgctgctattcaatttcttgcaaagaaaaggataatatagatatcacacttcagtggcttattcagcattcaaaatctagaagaagctgaagcatctcttgaagtcttccagtccttcttggctataatcctagaattattgtccgttcctctgaagtaattcccagaatacggtccttcctaaaccccagaaattgcctttttcagagtctatttctcatgtgcactgctgaagatgaatatccctaatccttcataaagaatcagctagagttgtcatgataaagtcagcacacacaaaaaggcttcttacacataccaaaaaaaatgtcttaaaccatgtgtagagctttaaaaacagaaaaaaaaccccatatacttatgaccatcttaaatcaagaaaattgcatatttccattctggtctttctgggccagatttttatattggttttcagtaaatgtctatctataatatttcattatagagtccagtagcttaatactgacactgacttgatacagcacgaagtttctagtgccacacacagtatttagaaaacctttaggcgtgaatgactcatgtgggatatatgtaaacataatgtttattttatctcacaaatgcatgtgaaatgtataattacatcttaggaatccaaaatggtctgcagagagtgagcggaggcaccagatcaatgttggttctttgcactggtgagattctgcctgatgaatattaaagatatcctgctttctgagaactctatcaccagatggcagttgggatatgggaggaactaaagcatcctgttttgtatctgtccagatcattatttctgtctcttgttttttcttcctggttcaggatacttttttaaggggttgagaattgaagattttccaaaagcgttcatgaatttagagcattccacccaatataataaaacctgttaagaatgtcagtctttgttcaaacatctgtttgttctatctccagtcattaaatcagtgctgctgcatgacactcttaactcctgactttttatatccagtcataaagttgactttcagcacaaaagatacttataaacaaataaaaaatttttatttttctctcttactgatgtaagctttggcactcttttgactggtgccattagacatcttgattattgtgacaactctagacctgcctgctttatctaatgtaatcatgctcaatgtctacaggttgtttaataatcagtcacacagagaactgaggaactgatgctgtttgtttgcttctatgatacagagatgtctaaaaacttcaaatggacatgttttgtagtttagcgacttccgtatacataaagggacatattaatactggttcatttgtaaattattattcatatagaccactgtagtagataaaactctatggtacacctgcttatgtgttgcctcacactgtgtgtgattttgtttcttttgttaagcagcacttatgtagactgcatttccaaatgtgttgagcactcagagtgtagtcaacagtaagttcttttaatgaatatcagttttaatttatagactgccatggccttaaaaatattctgtacaatatactgcactgtgttgcacagacactacttgcttttctccattcatatttttatgagtagaatctgggcttttaaatttctcttcttattctttgaagcatgttgcatactaccctggtgggatggatggttctgtaaatgaagggatatttaaacttgctactgttgttcaacaccattaatggtcagtgtgaaccattacaaagaatgtggcaacttgcttgtgcctaaaaggaggaattggaactagaatgtgtgactctgtggggactgcataggtttgttaattgacctatagctaaaccttaatgtgtttgtgtgtctatacattgctttccgcatttcaagacatccagacgctattaccaacattttcctgtgcattaacctctgcatgtgaaaacttttaacagttactgaactatgtaaatatgtgaatttttttatttaggtggatgcattttttgtctgtttactgctcttctcagctttattcaataaacttgcattttaagggttgtattggcaattttaacttaaaatgtgcatcatgatggaaggtgcagacttttttggaaggggatagtaagtttccgagaggagggtctatagaccatttgtcagaaatcagatcagccctcaaagaatggggtctgtgggctagttaaaatagaaataaacttttaaaatatcaaaaaaaaaa

SEQ ID NO: 227 - DNA, 4911 bp, Homo sapiens
actaaaagaataaagatttttattaagcattgtaagttgcattcaatagccttcagatacaccacaccacaatccattggcaagtcaatcaaacccaacagcagttcattcttgcacaaccatgagttagggcaaaactcccttcgaactgacagtaagatcctacttagctcttgcgggcaggggttggggaattacacctcatgttctggatcactaatgtgatgaagagcatcagaagtatatgaaaacgataagaagtgattctgatttcaaagtacattgtttgggaaacattaacaaaaacatcaaaatgatagaagtatacctgcttctactaaattcttgatgggaaagttctcaagaacaagcaatttgtttcctgctacagaaggggggggggggttttttttttttaagatcaaagggttttttttcacagaatttcatatttgctaatatgaaggcataaaacagcaacaaagaacaataatgcatacagcagtgaatacaccagggtaatgttgatattcgaaacggctagataatttttggggggctttagaataaatgcaacagaggtcaataatcacaaaattttaaggttagagcaagatcagtcaatgactaaacagagttaacatcttttataggactattactgattattagcatttttgttttgcaaatgggcacatactggtaagaatggaagaaaggacgataacatgcatattaactacacactttaaaaattatgaaccatgcagaagtttagctcaagtagtagtactaatggtctacatccgattcaaaaccacatagttcattgatcacagatgcatggtattagtcacgaaagtttcagaacacattgtgttgattttgaaaggtcatttgcatcttctatgatttcaactttatctccatttaacttgcttgtaaagtatgtatgatgtattgtatatttaaaatcagcagaacggcaatattactctataattttttagttttgatagttgcactttttttttttaacacaaaagaaccacatcaacagtgatgaaatttaagaaagaaaaactgtggttgtgccttatttctttcataatcataaaaatcaaagccttaaaaaaagcttcattgtgaaaacagtaatgcaaaatcaaatataatggcatacatatggtgcccaatgctaaaaattatattttaagctatatatacttaaagactgccaaaatttgttttctttatagttcaagaaacacaactataggcttttgtcataaccagtttaaactttatgtgtacttcattttaagtgcgggagtcaaatgctcttcattttctttctcttttttgttttattgtagcattttgactacaactggttaaaactaaaaatgtgttgtttaaatctctgatatcaaagagggatctgaatttccaaagtcctcatttttctcttacggaaaggacaaaatgtacataactgcaggctctctttctctccagatattcctaaatccttacccttccagcatccttcaccctctataaaaaataagtttactcttctttatttaagacagctgcctccagagcagcttctctgcggcaagcgctgtctgtacttagtgcatttaaatgaggatttgtattgcacgttttagagtcattattcaaggcactttcagagtggctgggggccctggcgtcacccgtgctcccgttcatctggggagccggcttctcctcggccaatcactccgttttcagccagggacccgtctgaagacatagcagaggacttcgattccccagattttgacttaagttctttggccacttcttctgctgaagcagcataaggaggtctgccctgaattgctgcctggtttttgtaacctctgccatagtaccttccacctcttccaaatgttctaatcactggggtggaaataactcctcttggacgccctctagctggtcctccgacagaaaccacctgcagggggaaaggcccccggcccccacggccccgcctgctcccagcccaatggccaaccacagtgccagctatttctagtttgcctccctgagaaggtataggttggactccgccctgggacttgctagtcctgctgctgtcactgcctgagaaggctccgcagtgtcccgatgctgccgccacacggaaggcacggtaagggcctgttgctaccgtttccccataggggcctccaaagccacagacgcctgcaaagcctctgcccctgccctgagagggtgggacaggcccaaagtgccgggggtacgcagaggcagggtagaagggcagggcaggtggcggcgggaaagggagcgtgtggctctgcctggagaagctgagcccctcgaggacgctctggcgcatcttctctaccttggcagcctgatcagcctgaccatcacagaggtcaatgagtggggtcttttcccggctggctttgaggagtttggattggaagagcttcccatcaaaatacatccaaggacaacagtgttcccaggggattggctgtccgcatgcatcatttgcaaacaaggccatgtctactccactcatgaagagagctgatagctgaattcctcggggatctaggttctcaatcttgagctcctggagctgatcaggctcgtagagtttgggggacagcgcctgagccaggaaggcatctagctcctgacgccgaaggatgcgtgctcccggccactgcaccatgtaccgtaagacgcagcagagcaccatgaggtgagtgggcacgttggcagggttgagcatggctggggtgtccgacctcatgcaggccaggaaggccctcatcctgcggttcttgtcctctaccgccttacccaaccacagcctcttcaggttggggcaggtccactccctgaaggcaagagcttcaaccagttccggggtttgaggagactttcctttgtaagctgcccattctttaatgatcactggtgaaaattctggtggaagtctgttctttctaaaagcaagtctctcagttttctttctgctttctgccaaactaaacaggactccgtaaacatactgacgaactggcctatagagcagagcggccggaggcaggtccttgttggcttcatcttcaatagaaacagcaattttgatttcacccttcgtcaggacatggaagatgtaggggtacatcagccccttcttgtgcctgtgctcggccactctcagcacctcaggtgcgacggggggcaggggaggtgtggtgatgtccatgtggttcctggtgggcatcgacaggaggcacgggattggctggacagtgcccatctggcttcccttgccttcggctagttggcttcctgaagaggcagtggacgagccttctgcctttgtttggtctcctgggtctcctcgtgcctgaggctctgagtggcttcccgtcttctcccagccaatcttgttcccgctgatatggtttgtcgcccctccgctaccctcgtcgttgtcggaagatgacgatgtagaagagccagggaagtaggcggaatccacgtggttggggctgccgctctgggccgggttgatgggcgaggaccgctcatacagcggcgtgtgcttcccttcgtgaggaatgttgctgtagctgttctgctccgtcagattcttcccgctcgtgtccaaagtgagaggtgctggctcagagaggctgtacgggtatggaccctggcccggggcgccccctgggctgggcacctgtggggccaccggctttgcttgcagagaggtctgcggaatgttgagcatctgaggaggaacatgcggcggcaccatcccaggcattccaaacggaccgggtctggctgctaagtaatgtggtggatgaaatgacataggcttactagtcgctgaataatatccaattgctctcttaaatcgaataactttgtcatctgttctagactgtgaatgctggaaaacatctttagctatggcatccaagtcagaggtgtcctgaatgttgcgtacatagtcagcaacggctttgatcactacgtcgcaaggtggcaagaccagctggtgggcccggacctttagtgaggctagtggatgttctggaccaagtaaactccaatgaaaggaagccagatcttcatcaggcagaatgtgatttcctaagagagcagcaaaaataggaaaacgatttggattcaggtccagttgcttggcaacttcatgcatcagatattggcttgtggtgagacttttcccgttccggctcagttttagggcatgggcactgaaatagtaggggatgttgcacagtgcataatcagagtcatacgcaaccaagccatggaaaccattctctctgcagaaaccaatcacttcctgatggtgatcctcaatgctctgtgcaaccttgacgtggaagcggatgagcgccaggcggatgcagtgggccatgcagacgggcggcaggaaccagacctttggcggcggggtgcccttgttctggacatggctgacgatctgctgtgccgtctggcgctcgttgccctgccgcttgacccactcgtgcagccgggccttctcgagcgcgccgttgaagaagacgaagagctcgatgttgccgccgaagcaggccttggccagcgccgccaggtagccaagcatgtggttccactggccgccgctgacccagtcggtgtagaagccgccgtagaggcggtgcaggcagttgtcggcgtccaccagcaggcgcagcggggtctgcgggggccgctgccgcccgccgcccaccaggctgccccgggccagcttctgcagctccaccggcaccacggcgctcgggcagtgcttctcgatgtagtcct

SEQ ID NO: 228 - DNA, 1400 bp, Homo sapiens
aaatcgactcgctcggtgttcgcccgccgacgccgcacggcttgctggggctgggctcttcctcgcggaagtggggaggaggcggttgcggttagtggaccgggaccggtaggggtgctgttgccatcatggctgaccccgacccccggtaccctcgctcctcgatcgaggacgacttcaactatggcagcagcgtggcctccgccaccgtgcacatccgaatggcctttctgagaaaagtctacagcattctttctctgcaggttctcttaactacagtgacttcaacagtttttttatactttgagtctgtacggacatttgtacatgagagtcctgccttaattttgctgtttgccctcggatctctgggtttgatttttgcgttgattttaaacagacataagtatccccttaacctgtacctactttttggatttacgctgttggaagctctgactgtggcagttgttgttactttctatgatgtatatattattctgcaagctttcatactgactactacagtattttttggtttgactgtgtatactctacaatctaagaaggatttcagcaaatttggagcagggctgtttgctcttttgtggatattgtgcctgtcaggattcttgaagttttttttttatagtgagataatggagttggtcttagccgctgcaggagcccttcttttctgtggattcatcatctatgacacacactcactgatgcataaactgtcacctgaagagtacgtattagctgccatcagcctctacttggatatcatcaatctattcctgcacctgttacggtttctggaagcagttaataaaaagtaattaaaagtatctcagctcaactgaagaacaacaaaaaaaatttaacgagaaaaaaggattaaagtaattggaagcagtatatagaaactgtttcattaagtaataaagtttgaaacaatgattaaatactgttacaatctttatttgtatcatatgtaattttgagagctttaaaatcttactattctttatgatacctcatttctaaatccttgatttaggatctcagttaagagctatcaaaattctattaaaaatgcttttctggctgggcacagtggctcacgcctgtaatcccaccactttgggagaccgaggcaggtggatcacgaggtcaagaggttgagaccatcctggccaacatggtgaaaccccgtctctactaaaaatacaaaaattagctggatgtggtggcacacacctgtagtcccagctagtcaagaggctgaggccagagaatcgcttgaacctgggaggtggaggttgcattgagccaagatcacgccactgcattccagcctggtgacagagcgagactcagtctcaaaaaaaaaa

SEQ ID NO: 229 - DNA, 2061 bp, Homo sapiens
gcgcctgtcagggaagcggcgcgcgcgcgcgggcggcgggcgggctggggatccgccgcgcagtgccagcgccagcgccagacccgcgccccgcgctctccggcccgtcgcctgccttgggactcgcgagcccgcactcccgccctgcctgttcgctgcccgagtatggagctgctgtgttgcgaaggcacccggcacgcgccccgggccgggccggacccgcggctgctgggggaccagcgtgtcctgcagagcctgctccgcctggaggagcgctacgtaccccgcgcctcctacttccagtgcgtgcagcgggagatcaagccgcacatgcggaagatgctggcttactggatgctggaggtatgtgaggagcagcgctgtgaggaggaagtcttccccctggccatgaactacctggatcgctacctgtcttgcgtccccacccgaaaggcgcagttgcagctcctgggtgcggtctgcatgctgctggcctccaagctgcgcgagaccacgcccctgaccatcgaaaaactgtgcatctacaccgaccacgctgtctctccccgccagttgcgggactgggaggtgctggtcctagggaagctcaagtgggacctggctgctgtgattgcacatgatttcctggccttcattctgcaccggctctctctgccccgtgaccgacaggccttggtcaaaaagcatgcccagacctttttggccctctgtgctacagattatacctttgccatgtacccgccatccatgatcgccacgggcagcattggggctgcagtgcaaggcctgggtgcctgctccatgtccggggatgagctcacagagctgctggcagggatcactggcactgaagtggactgcctgcgggcctgtcaggagcagatcgaagctgcactcagggagagcctcagggaagcctctcagaccagctccagcccagcgcccaaagccccccggggctccagcagccaagggcccagccagaccagcactcctacagatgtcacagccatacacctgtagccctggagaggccctctggagtggccactaagcagaggaggggccgctgccacccacctccctgcctccaggaaccacaccacatctaagcctgaaggggcgtctgttcccccttcacaaagcccaagggatctggtcctacccatccccgcagtgtgcactaaggggcccggccagccatgtctgcatttcggtggctagtcaagctcctcctccctgcatctgaccagcagcgcctttcccaactctagctgggggtgggccaggctgatgggacagaattggatacatacaccagcattccttttgaacgccccccccccacccctgggggctctcatgttttcaactgccaaaatgctctagtgccttctaaaggtgttgtcccttctagggttattgcatttggattggggtccctctaaaatttaatgcatgatagacacatatgagggggaatagtctagatggctcctctcagtactttggaggcccctatgtagtccgtgctgacagctgctcctagagggaggggcctaggcctcagccagagaagctataaattcctctttgctttgctttctgctcagcttctcctgtgtgattgacagctttgctgctgaaggctcattttaatttattaattgctttgagcacaactttaagaggacgtaatggggtcctggccatcccacaagtggtggtaaccctggtggttgctgttttcctcccttctgctactggcaaaaggatctttgtggccaaggagctgctatagcctggggtggggtcatgccctcctctcccattgtccctctgccccatcctccagcagggaaaatgcagcagggatgccctggaggtggctgagcccctgtctagagagggaggcaagccctgttgacacaggtctttcctaaggctgcaaggtttaggctggtggcccaggaccatcatcctactgtaataaagatgattgtgaaataaaactggctttggcttcttggaaaaaaaaaa

SEQ ID NO: 230 - DNA, 5170 bp, Homo sapiens
agaagagcgatgggagggggtgacgtggcagtgacaggcgcataaactgaaatgaatggcggaaacagcagccaatcggcgatcagattggccgggcattccgcattctcccgtcctccctgagcgctggaaacttcaggaaagcaccaatgagcttccccaaaagtctgattggcctttatctgaaccaatcaaaggtgggtctggcggacgcgtcccaccccaggctctcactgggcgctgtagaatgacaggcccgagagaaatgccaatatccgcggggtcttcctcaagtgacactcagcggcaccaatcgacgtccttcttcccggcggccgagccctcctccccgcggctggccgggcggggcggggacgctgcgcggcggtggctgatgcggtagccgtgtggggcgctccgggcggcgacggcggctctcgtaggcggttccggtcttgtatctccaggcggcggcggctcatggcggcgacggagctgagaggagtggtggggccaggcccggcagccattgcagcacttggcggcggcggcgccggtcccccagtggtgggaggaggcggcggccgcggagatgcggggccaggctccggggccgcgtcagggacggtggtcgcggcggcggcgggaggcccgggcccgggggccgggggagtggcggcggctggcccggcccctgcgccgccgactgggggctcgggcggctcgggcgctgggggttcgggctcggctcgagagggctggctcttcaaatggaccaattatatcaaaggctaccagcggcgatggttcgtgctgagcaacgggctcctgagctactacagatcaaaggcagaaatgagacatacctgccgtggtaccatcaacctcgccacagccaacatcaccgtggaggactcctgcaacttcatcatttccaatgggggtgctcagacctaccatctgaaagctagttcagaagttgagcggcagcgctgggtgacggccctggaactggccaaggccaaagctgtgaagatgctggcagagtcagatgaatcaggagatgaagagtctgtctcacaaactgacaagactgagctgcagaatacccttcggaccctctctagcaaagtagaggacttgagcacgtgcaatgacttgatagctaagcatggcacagctctgcagcgttctctcagtgagctggagtccctgaagttgcctgctgagagcaatgaaaagatcaaacaggtcaacgaacgagccacactctttaggataacatccaatgccatgatcaacgcctgcagagatttcctcatgttagcccagacccatagtaaaaaatggcaaaagtcactacagtatgaaagagaccagcgtatccgactggaagaaaccctcgagcagctggcgaagcagcataatcacctggagagggccttccgaggagccacggtgctgccggcaaacactcctggcaatgtgggttctggtaaagatcagtgctgctctggcaaaggggacatgagcgatgaagatgatgagaatgaattttttgatgcacctgagatcatcaccatgcctgaaaatttgggccacaaacgtactggcagcaatatcagtggagccagcagtgacatcagccttgatgaacagtacaagcatcagctggaggagaccaaaaaggaaaagagaaccagaataccatacaagccaaactatagcctcaatttatggagcatcatgaagaactgcattggaaaagaactctctaagatccccatgccggtaaactttaatgagcccttgtccatgcttcagcgccttactgaagatctggaataccatgagctgttagaccgagctgcaaaatgtgagaattctctagaacagctctgttatgttgcagctttcaccgtgtcctcctactccactactgtcttccgcaccagtaagccattcaacccactgcttggggagacctttgagctggaccgattagaggagaatgggtaccgatccctctgtgaacaggtgagtcatcatccccctgctgctgcgcaccatgctgagtccaaaaatggctggacattgcgtcaggaaatcaaaatcaccagcaagtttcgaggcaaatacctctccattatgcccctcggtaccattcattgtattttccatgcaactgggcaccactacacttggaagaaagttaccacaactgtacacaacattattgtgggcaagttgtggatagatcagtctggcgaaattgatattgtgaatcacaagacaggagacaagtgtaatcttaaatttgttccttatagctacttctctcgggatgtagcaagaaaggtgacgggggaagtgacagatccatcaggaaaagtccactttgctcttctggggacgtgggatgagaaaatggaatgtttcaaagtacagccagtcattggggaaaatgggggtgatgctcgacagagaggccatgaagcagaggaaagcagggtcatgctgtggaaaaggaatcctttaccgaagaatgcagaaaacatgtactacttctcagagcttgctctgactctcaatgcttgggaaagtggcactgcccccacagacagccggttacgacctgaccagagactgatggaaaatggacgctgggatgaagcaaatgcggagaagcagcgcctggaggaaaaacaaagactttccagaaagaagagagaagcggaagctatgaaagccacagaggatggcacaccatatgatccctataaggcactgtggtttgagcggaagaaggaccctgttaccaaggagttaacccatatttataggggagaatactgggagtgtaaagaaaaacaggactggagctcatgcccggacattttctgaaacggcagtaacaaaaaagaggagcatataatggagaagaggacagaggatgtgtgggaaagctggaagttgtgactctcttaccaagtgctttcctcaagtttgtctctcttgaccaatcattttttccaaatcaatcaccagaaggagacaccagtggtggtgattggctggttgccttagctgattgaaactgaaatcgacataggagatactatgtctgtaagggagaggtttagtggccgaaggttagtgttattccacatccacgaagtcaagtattcttggctcttctttctccctctgcccccatttaagacaatgtcactcaccctccccttgtagtatcctgctcagccaagatctggctaagattatgattcaggggcattttggtgctgttaaaagcaagagccgaatttagaagttcccttaaaaagaaacacataagacttaccaatggaggcattgtgaatggttgcagtggagcttaggtataacatcatcaagtgtgttcacacgcgcgggtcggtttaatgggagtgtccacgcggagataactgcgatattggaacacctgtgagagagattgttctatagggctggaatattcagagttacattcttggaagtttctgtttttacttgcatcaaacacccctctgttgttctccatcatctttaatagcaactggagaccactttggtcattggtaagggggtgcattctcctcacaaaggggttttatggacttcctcaggcggagagcttctgagaacacaggcaggatggaaaaagactactagccacttttgctttcccaaccccccttaatgccatccttcattgtctttctggcttctcttcttctggcacagtaccattttgggtctgtgccccagtgtggagcaaaacattgcctgtcccattctgatatacttcagaatttgagagcagaagttaatgtggaacaaaagttttcaccatctctcaagccccaaggactggagccacctctggaataatgtgttaaatatctgtatattatatatatgtagagaaaaatctaattttttggtttgatttccttcccattaagaatcttgttttttgatacccttgtctccctgagactctttcttggacacgtgttgatgtggatggcactcctgctctccatcttttatgggcagagagatttcaaaacctgagcaggatcatgtctggcagttactaaacagggactttgtccatggtttgtatcatggggtgcctactgctgtctaaactctgctctcctaattagctgactcttgaaaatgaaatcctaacctctttcctgcctcttttctttctcttttcaggaagagtgtgggtagaaagtccggagggcaacttccaatttaattctgctctgtccggcgcataggctgaattccaaaagaactttcttcctaggatgtggggcttaaagcaccgtcatgtggggtggatcagataattgctcctgtggggccctggcttccttctctgtttgtgcagtatttgtttttgttgtcttgttgagaaatatcccctgtgcaacccacccttggttgaggatcacaaattgaggtgccttccttgtatgctttttgttagtattttttgtttttgttccttaactgctgagcctcagccagcgtgggtcctgggggaaataccattccaaaggaagccatccctatggggaaattggttttactgggtaaattaatacttttatttcttcccctatcccttccttcctagttgtgataaacatgggagaggagtgactttgactgctggggaatttcctcctaagaaccttattcccaaaataagccagggattatgtcaaggcttctttcaaggaggctcataaaagcagtgacctcatccggggctttggatagagtgagaattccccaactaaattggacttctctgctttatccccttctcttccttcaccatctgcactacatttctggctgatcccaatcagattcccgctaatggaagaagtttagaatctttcaggtggaataaagtcacatgaaaacaaaacacaactatatatattttcagtttttttgccttattgatttttttccaaaaaaaaaaactactaaattaaataattttttaaaagtcaaaaaaaaaatttcccccgtggaatttctatccttttaatcaaatattcctgtaattctttttccaatttaagggttttaaaaaaaa

SEQ ID NO: 231 - DNA, 5669 bp, Homo sapiens
gggtaggaaaacagttcctcgtggacagcagagctgcctgctcggtcctgacccagcctatttgcctcctctccaattgcaattgcagggtaatgggaatagacaggtgtcctaaggtaagaaaatttactttccctcttgcttgtgaggccatgtctaggcttttttctcctcatttctgtatgccccccggaatgtcctactccattgctgggtagagacttattaagcaaaatgggagccaccatctccctggaagaggacagactgcaggtagaggcagagccagaacagggaatccacctgctagcactcttaaatggacaggaacttgagacccaaaacatacccaaagaaagcaaggatcacatcaccccttccctatcggacacttcagtcctaggacaggctaataaagttccgccagtaaagacagacctgaagcctgggatgggctatccatggaggaaatcatacctcctaaaacctgtggcactgaatggggttcagccattactccacaaattcctatagcaagggctaaaccctgccagtccccaggcaacacctcggtcctccctgttaaaaagcctaatggagaatatcagtttgtgtaggacttgaagggggttaatgaggcagtcattcccatccacccaacactggtcccaagcttgtctgtgctcagatacctggagatgctcagtttttcactctactacacttcaaggatgctttcttttgtgtagccctctccacccagaatccctgtatctttttgctttgaatggagaaatctctgatacccagaaagccacatagtacacatggactgtgcttccccagggcttctgggaaggcccccacctttttgggaatgcagggagctaagcctacagaatgggacttttattacaatatgtggatgacttgttcattgtcagccaaacatggcaggattcagattttaatatcattaaaaccttgaatttcctggctgagcggtgatacaaggtcagccccatccaaggcccagatttctttacagaagttccgatatctggggttcattctgaccccaggagcccgaacactagttgtggactggaaaaagcaatcacttcattgctggtcccacaaacaaaaaggcagccccagggtttcttgggaatggtgggcttctgtagtatttggattccaaattatggcctgacggctaaacccctatgtgagacccaaaagggggaagaaagagagcccttgtactgggagaagaaatgtcaactatcttttgaacctctaaaaactgagctgggtcaagcccttgtccttggactccctgagaaaaaccacttaccttgtatgttcgtgagagactaggaatagctttgggagtcttaactcaaaggttaggacctgttcagaagccagtggctcatttttcgaaacagacaaatccagttgcacagaagcggcctggctgctggagggcagtggcagccactgccctgctgtttagtgaagcatctaagctgacacagggacaatatacagaagctatgactccccaccaggttcagactgggttagaagtcaagggacaccattggctcactgcagggaggctgaccaactaccaagctctcttattagacaccctggatattactttaagggtatgtcagactttgaacacagcaacctcactcccaaccacagatgatgaggactcacagcatcaatgcacagggcccacaaaacagactccagcaggcctagcttgtgagataagcctcttgagaatgcaaagacggaatgatatcctgatggcagtagctttgtggagggagacccaaaaggcaggacatgcagtagtaagcctgaaggagactacagaaactaaagcccttcctccccaaaatggcacaaaaagcagcactagaggccttaacagagcctcacaactgggagaaagggagggagtaaatttatacaccaactcaaagtataggtttctcctgctgtgtgcccatgcagccatatggaaggaaaagggcatgttaacagataaaaattccccaggcaaacgtaaggatccaatccaacttctcctggaagcggcacaacttccctgccaggtggcagtcattcactgcaaaggccaccagagggactggtccctcatcagccaaggaaatagggccacaaaacaggcaacctggttataggaatccagcaatgtgttggccttaatgacagaccctaccaaccttcctaatcacctacaatactcacaacaagagcaagagtaagctaaggggcaggggtaccaggaaaacagtgctggatggttcacagatggtgacaagttttattccaggaactgaccagttgaaagttactaagcatctccatgatgccactcattaatggagagatgttttatggaattctgtccataaaatattcaccagaaagaaactaagaaaaagtgtaaaacaagtaacctttgtcagtgaattgtgttcccgaaataatccccacacccatccaattcccccttcttgacttaaactggttcaacacaggggaacttatctgggagaagactggcaggttgttttaacccaaatgactccaaatctagggtacaaatatctcctggtgtttgtggatacttttactggacgggtcaagggtttccctacctgtacagaaaaagcagtagaagtctgtaaaccttcactaaaggaagtaatttctcaatttggactccccaagtcccctcagagtggtaacaggctctccttcatgggtaagattactcagagcctctccacaaccttaggaatagattatgaactggcaccccaatcatcagggaaagttaagatgaaccatacacttgagacgactctagccaaactctttcaggagatgcacgagtcctgggttaagatgctcccagtcttctcagggtccgcagggccccttcgtgcagcctaagacttagttcttctcagatgatctaccagaggcctttcctcaccactgacctcctgttaggtgaagaattacataaaaaattacagtatcgatttaggacagattcaaaaggtgacttcagaatatggaaacaaaatcctgccagtccccactaaggatgggaaaacccctttacaagttaatccaggggaccaagtcctcctaaaggcttgaagggcaggctccccggaggaccaccccttgcttaaatgggagggcccttgctgggtgatcctgaccactccaactgcagccaactcacaaggaatcactagctgggtacacctctcccgatcagaaatgctttctcctaaatgtttccagactcgcccagatggcccattttactcctgaaaacctgtggaagacctcaaattcaggagagccaattcatcatcggagaagtaatgtggttagagatcttgagtccaatacttttccttgtattactaattggtttactattattctgttgctttgctcagcctcctccctcaggtaaagacttcgtttgtccctgctgggtataaagatgctactctttactttgttcctactcctccccatcagggcacagggtaggctaggcctactaaaatgagaaacaaactctcttgacaacctttccggcattatagcttcaggtaataatttgtccaactgctgggtgtgctaccatcatccccaggctcagaggggctgcctcttgcactccctaaaagctcaactaccaacttcacaaaagaggtatggaaacctaaaataacctctgcacctcttatggtggacctaagtgtctccctttcctttgaatgtataaacctcattgggctgctaaatgctttggtcaccaaaaagggtggaaaaaagagaagttggactgcctactttgaaatcccaccgggttttctcttagcagtaaagaaaaaccctaatcaaacttgggctcaggaaggctatcttttcccccatgccaaaacagtcatacctctctccacagcttagctgctcacctgaactcctctcgccttgtgtaagtttgtgcacccatggggtattctgttcctttgtggacacccagactgccatctgatcaacagctacccttcagccaatttcacctttctgttacttgcactagcgtgcccttgtgtggataatgtacaacgcaataaggaatgcatgttaggtactttaagtcccagtagaataacagttcataatatcacacatgtggtggaatctaaaaaggcaatagggctaattttggcaggagttggaatagccccttgggatggctttgcatactgtcagacagctttgagaaactttcaaacccttgaaacactggcaactagtacaggcagagccataaaaggacatcaagcctccctgcactccctagccaatgctgtcttggataacagatttgccctggaatatcttctggctgaacaagggcgggtatgcacagtaataaaccacatctgttgttcttacattaacagttcaggattggctaaactgcaagttcaaaagatttaccaagaccaggcacaatggttcatgcctgtaatcccagcactttgggaggccaaggtgggtgggtcgtttgagcctaagagtttgagaccagcctgggcaacatggctaaaccccatctctacaaaattacaaaaaaagaaaaaaaaattaggtggccttggtggcatgtgcctttattcccagctactcaggaggctgaggtgggaggattgcctgagcccagaaggttgaggctgcagtaagccatgatggcaccactgcactcctacctggatgacagagtgagaccctgtctccaaaagaaaataaaagtaaagattcaccaagaggctacctggctacataatcgtaatgactctactgctcaaaccatctggggctccatcagtggatacctacaaagtatgacatggtttttacctttcttcggaccctaagtggtcatttaattgctattacttttggcgtattgtgtttttaaccttttggtaaagtttgtgtctttcaggtttcaatagctccaagtcaagctaatgatggcccaagaattccaacccataacatcccaggagcaccccagtccctacaggtctttaggacagccagtgagagatttccccaccccctaaagttaggcagggacgacatccctgttcagcaggaagtcgcttcagaagatgagatcttcagccctttctccttaagaatagagggtgaaatctctcagggggaaatagagatagaacagaaatggaatggggttgcttcttcataatacttaaccatgccttctacttaaagttctaggaactggccttaggaaatctaactatgaaaccaaggttatggagtatcccacctcaggaaggaacactgaacaactgattgacagtcttcttgccgccagccagaccaccaagtggcccattaaccaagagaaccagcgcaaccagatacgctgacccgcatctcctacctctcatgtgctttgcccagcccagcctgcataccttactcatgatgtcaattcccaagtttcgctaataaaaacatctctgcaagcctcttcaaaaaaaaaa

SEQ ID NO: 232 - DNA, 1969 bp, Homo sapiens
ttttttttttttaaggtaagcaattattttatttccttggcctgatggcattgacttcattatacaagaacttgcagctgacagaactgacacacacatttcccccaagagaaagaacccttttcattagcagagatgaattgaaatgtcatgtctgagtgcaattcctgctccccactcccaccccacaaaatcccaaaagtgaaaataaatcaataaaatccccatgatttactaaaagtcatccctccaaacctttctaactagcagctgcagtggatgataaccaaggagggaagcagctggccatcatgtagcattcctgtgcatgtgagcctgaagggacagcagcatgggagcaagaatcctgaatgagagtagtatataattaccttacttcatacttgccccctccctacataagacacctctgtcctgatacatggaaaatactagaggagatgctaagagtggttttagtctacaattggaaatgcctgagacttattaaattccaaggaaggggtgagataaggggcaccaaagagaaagagcaggttagacagggatgctcaacactcttgtcaattccagtttaatgctatttaataacaaaaccatcttcttaatcacaaccaccttcatgcctaacccctattttccaaaggtaagagatccctgtctaaatttctgggttgttgtctactgccacccctggggtggtactgtcatgtctgagtgagattgcaaccgggatgggagaaaagaagtgtgagacagggaagatcaggggccacaatgcatcaattacagtgggtctcttttggtccccaggtatggtccactaccacaagtcccctttccctacctgtcttgtgcaaatgtcaaaaatagaatctctgcccaaagagaagggagcacagggagttgctgctggactgccatcatctctggccccaacttgtccacctcctgacccatctatgaaactgcacaacaattaaaccccaggaatactgtaaacttacatcatccccattcctctatcaaagccaatccaacagctctgtcctgacatgctttctccctgggccgaggaagcagcaaaaaatatcaattgagcatgtgaaaatgtgatgacggtgtgtgtggtgtaatgtttctagatgtcttcaccttctgtctccttgcggtgggagccaccctctttccccatgtcgcgcacacacacccctcccctacccccaagtccaggtgctcccatctgctgggcttccaaccactcatttcccatagacactctcatcactgtaggccacatacagaaaatagtcttcctcatgattgtcctcatacagttggcccatggtagcactggtgggagggatggtgttgttgacaaagaagaataaggcgtcctcaggtctcaggtggattctcttccggattaagaagtagaactggccaacagtaaggtcagagggcactaggtacttcctcttgtccagatcaggcaccctggcttttggagccttctctacaatcacggggaccctgtccggatatttcttccggatcttttctccttcctttttccgatactcaaagggatggtcctccttgtactggaacttcatgatgcaccgcagggcttccgagatccccgcgcggggcctgcctccttcgccgctgaccctgtcccgctccctcagccgacgtcaaggtgtgctcagaatagctgcagaaacgtccgctccgggggcaacagcgctgggccgagtgtgcagggggcgttcggggcggggatctcgggtgagcctgcctggaggtagaggagagccagatggagaaataccggcggcttttcgctagagcttgtgagcacaaaaacagcttgggtggcgccgtcgggctgtgacgtcacccccgcgagcatcagcccagcccgcccatgcgttatgcgtccagt

SEQ ID NO: 233 - DNA, 1776 bp, Homo sapiens
ggcacgaggcgccggccgccatgtggagctgcagctggttcaacggcacagggctggtggaggagctgcctgcctgccaggacctgcagctggggctgtcactgttgtcgctgctgggcctggtggtgggcgtgccagtgggcctgtgctacaacgccctgctggtgctggccaacctacacagcaaggccagcatgaccatgccggacgtgtactttgtcaacatggcagtggcaggcctggtgctcagcgccctggcccctgtgcacctgctcggccccccgagctcccggtgggcgctgtggagtgtgggcggcgaagtccacgtggcactgcagatccccttcaatgtgtcctcactggtggccatgtactccaccgccctgctgagcctcgaccactacatcgagcgtgcactgccgcggacctacatggccagcgtgtacaacacgcggcacgtgtgcggcttcgtgtggggtggcgcgctgctgaccagcttctcctcgctgctcttctacatctgcagccatgtgtccacccgcgcgctagagtgcgccaagatgcagaacgcagaagctgccgacgccacgctggtgttcatcggctacgtggtgccagcactggccaccctctacgcgctggtgctactctcccgcgtccgcagggaggacacgcccctggaccgggacacgggccggctggagccctcggcacacaggctgctggtggccaccgtgtgcacgcagtttgggctctggacgccacactatctgatcctgctggggcacacggtcatcatctcgcgagggaagcccgtggacgcacactacctggggctactgcactttgtgaaggatttctccaaactcctggccttctccagcagctttgtgacaccacttctctaccgctacatgaaccagagcttccccagcaagctccaacggctgatgaaaaagctgccctgcggggaccggcactgctccccggaccacatgggggtgcagcaggtgctggcgtaggcggcccagccctcctggggagacgtgactctggtggacgcagagcacttagttaccctggacgctccccacatccttccagaaggagacgagctgctggaagagaagcaggaggggtgtttttcttgaagtttcctttttcccacaaatgccactcttgggccaaggctgtggtccccgtggctggcatctggcttgagtctccccgaggcctgtgcgtctcccaaacacgcagctcaaggtccacatccgcaaaagcctcctcgccttcagcctcctcagcattcagtttgtcaatgaagtgatgaaagcttagagccagtatttatactttgtggttaaaatacttgattcccccttgtttgttttacaaaaacagatgtttcctagaaaaatgacaaatagtaaaatgaacaaaaccctacgaaagaatggcaacagccagggtggccgggccctgccagtgggcggcgtgtgctagcaaggcctgccgggtgtgccgcagtcaccacagggttctgagaacatttcacagaagtgcctgagacgcggagacatggctggtgttaaatggagctattcaatagcagtgacgcgctctcctcagccaccaaatgtccctgacaccctccccagcccccacagataacatcagctgaggtttttttcagtatgaacctgtcctaaatcaattcctcaaagtgtgcacaaaactaaagaatataaataaacaaaagaaaggtgaaaaaaaaaa

SEQ ID NO: 234 - DNA, 2058 bp, Homo sapiens
ggcctggccatgtcccctttcggaagcctgttcccttacccctacacgtacatggccgcagcggcggccgcctcctctgcggcagcctccagctcggtgcaccgccaccccttcctcaatctgaacaccatgcgcccgcggctgcgctacagcccctactccatcccggtgccggtcccggacggcagcagtctgctcaccaccgccctgccctccatggcggcggccgcggggcccctggacggcaaagtcgccgccctggccgccagcccggcctcggtggcagtggactcgggctctgaactcaacagccgctcctccacgctctcctccagctccatgtccttgtcgcccaaactctgcgcggagaaagaggcggccaccagcgaactgcagagcatccagcggttggttagcggcttggaagccaagccggacaggtcccgcagcgcgtccccgtagacccgtcccagacacgtcttttcattccagtccagttcaggctgccgtgcactttgtcggatataaaataaaccacgggcccgccatggcgttagcccttccttttgcagttgcgtctgggaaggggccccggactccctcgagagaatgtgctagagacagcccctgtcttcttggcgtggtttatatgtccgggatctggatcagattctgggggctcagaaacgtcggttgcattgagctactgggggtaggagttccaacatttatgtccagagcaacttccagcaaggttggtctgggtctctgcccaccaggcggggaggtgttcaaagacatctccctcagtgcggatttatatatatatttttccttcactgtgtcaagtggaaacaaaaacaaaatctttcaaaaaaaaaatcgggacaagtgaacacattaacatgattctgtttgtgcagattaaaaactttatagggacttgcattatcggttctcaataaattactgagcagctttgtttggggagggaagtccctaccatccttgtttagtctatattaagaaaatctgtgtctttttaatattcttgtgatgttttcagagccgctgtaggtctcttcttgcatgtccacagtaatgtatttgtggtttttattttgaacgcttgcttttagagagaaaacaatatagccccctacccttttcccaatcctttgccctcaaatcagtgacccaagggagggggggatttaaagggaaggagtgggcaaaacacataaaatgaatttattatatctaagctctgtagcaggattcatgtcgttctttgacagttctttctctttcctgtatatgcaataacaaggttttaaaaaaataataaagaagtgagactattagacaaagtatttatgtaattatttgataactcttgtaaataggtggaatatgaatgcttggaaaattaaactttaatttattgacattgtacatagctctgtgtaaatagaattgcaactgtcaggttttgtgttcttgttttcctttagttgggtttatttccaggtcacagaattgctgttaacactagaaaacacacttcctgcaccaacaccaataccctttcaaaagagttgtctgcaacatttttgttttcttttttaatgtccaaaagtgggggaaagtgctatttcctattttcaccaaaattggggaaggagtgccactttccagctccacttcaaattccttaaaatataactgagattgctgtggggagggaggagggcagaggctgcggtttgactttttaatttttcttttgttatttgtatttgctagtctctgatttcctcaaaacgaagtggaatttactactgttgtcagtatcggtgttttgaattggtgcctgcctatagagatatattcacagttcaaaagtcaggtgctgagagatggtttaaagacaaattcatgaaggtatattttgtgttatagttgttgatgagttctttggttttctgtatttttccccctctctttaaaacatcactgaaatttcaataaatttttattgaaatgtcaaaaaaaaaa

SEQ ID NO: 235 - DNA, 806 bp, Homo sapiens
ttttttttttttgagacggagtcttgctctgttgcccaggctggagtgcagtagcacgatctcggctcactgcaccctccgtctctcgggttcaagcaattgtctgcctcagcctcccgagtagctgggattacaggtgcgcactaccacaccaagctaatttttgtattttttagtagagatggggtttcaccatcttggccaggctggtcttgaattcctgacctcagttgatccacccaccttggcctcccaaagtgctagtattatgggcgtgaaccaccatgcccagccgaaaagcttttgaggggctgacttcaatccatgtaggaaagtaaaatggaaggaaattgggtgcatttctaggacttttctaacatatgtctataatatagtgtttaggttcttttttttttcaggaatacatttggaaattcaaaacaattggcaaactttgtattaatgtgttaagtgcaggagacattggtattctgggcaccttcctaatatgctttacaatctgcactttaactgacttaagtggcattaaacatttgagagctaactatatttttataagactactatacaaactacagagtttatgatttaaggtacttaaagcttctatggttgacattgtatatataattttttaaaaaggttttctatatggggattttctatttatgtaggtaatattgttctatttgtatatattgagataatttatttaatatactttaaataaaggtgactgggaattgttactggtgtacttatcctatcttccatttataatttat

SEQ ID NO: 236 - DNA, 1364 bp, Homo sapiens
ttttttttttttgaaatatatattccactttattagttagaaaaaatcatttaagccacatggtggccacaatgtccataacttgagcaggctttggcatcccaccacccccttcagaccaatacacactatgttggaggaacgactttaaaatgtaaaatgagaaatgggcactgaacactccatcctcactcccaacagcccacccacacacctcttcaactgctatccaaacatggaggagctcttgtggaagagaggctcaacaccaaataattgagcataagacattcaagactaaaggaaccccagacagatgtttaggaagtagggttgaaaatatcaccatctcccaacagctgaagttgggacatctaagagatgtcagagccatactgctgaggaaagcacagcatacaccagaccccggggtaagggcgagatcaacctatctcatagccataagcaatccactcacacctgtgcattaaacaggctttttcttttcttttttttttgagatggagtcttgcactgtggcccaggctgggtacagcagtgcgatctcggctcactgcaacctccgtccccgggttcaagcaattctcccgcctcagcctcccaaggagctgggattacaggcctctgccaccacacccagctaacttttgtatttttagtagagatggggtttcgccatgttggcgaggctggtctcgaactcctgacctcaggtgatccacccacctcagcctcccaaagtgctaggattacaggcatgagccaccgcaaccggcctaaacaggccttgcccaggcaatgagcatccagttagacaggttcttcaaggcctagtaatagttctctggttacaacggtgctcagcttgtctgctaggaatgggactcccatctggacatgtctaggtcagtgttccaaaatatggccagtatggaaggaggtcttatcacatgcttctggatggatggtctggaaggcccttggtgggctctgtgttggctagttggcttctggtggtccaggaggtcccaggcgatgggctctctagtaagccctctagggactccatcactctaacgaagatggagagtagggtcagtaccacacctaacaggtagaggttcaacacatgcttcatggctgaaaggaccctactcctctgcagagaaacagagctgccttctccttctgaaaggcctctggaccctccgggggaacagccgggagtggatcgccggctgtaggagcaggtcgtgcaggagtccggaggaaagtcggttactaagcaccagcgcagaagcttcccgccacaaaactcaccggagacaaaagcgccctcgtgc

SEQ ID NO: 237 - DNA, 1740 bp, Homo sapiens
ggcacgagggagacttcctgctcatctgccgctccctttgccgccgccttagcccgggacccgaacccagcctctcccctacccgaacaccggccccggctccaccgaggcccgggtcccccagcccgtctcgccgccgccatggcggaccctaaatacgccgaccttcccggcattgccaggaatgagccagatgtttatgaaactagcgacctacctgaggatgatcaagcggagttcgatgcggaggagctgacaagcacaagtgtggaacacatcattgtcaatcctaatgctgcctatgacaagttcaaggacaagagagtggggacaaagggacttgatttctcagatcgtattggaaaaaccaagaggacaggatatgaatctggagaatatgagatgcttggagagggtctgggagtgaaggagacaccccagcaaaagtaccagcgcctactgcatgaggtccaagagctgacaactgaagttgaaaaaatcaagacgacagtgaaggagtcagccacagaggagaagctgacccctgtgttggctggctaaacagctggcagccctgaagcagcagctggttgcttcccacctggagaagctgctgggaccagatgctgcaatcaaccttaccgaccccgatggcgccctggctaagcgcctactactgcagctggaagcaacaaagaacagcaaagggggatcagggggaaaaaccactgggacccccccagatagcagccttgtcacttatgaactacattctcggcctgagcaggacaagttctctcaagctgccaaagtcgcagaacttgaaaagcgcctgacagagctggagacagctgtacgttgtgatcaggatgctcagaatcccctttctgcaggtctacagggagcctgtctcatggagactgtagagctgttgcaagcaaaggtgagcgccctagaccttgcagttttggatcaagtggaggctcggctacagagtgtcctgggaaaggtgaacgagattgccaagcataaagcctctgtagaagatgcagatacacaaagcaaggtgcaccagctatatgaaactatacagcgctggagccccattgcctccaccctccctgagctggtgcagagacttgtcaccatcaaagcagctgcacgagccaaggccatgcagtttggtcagctcctgacacacttgggataccacccagcagatgattgctaattccttgaaggacaataccaccctcttgacccaggtgcagacaaccatgcgtgaaaacctggccacagttgaggggaactttgccagcattgatgaacggatgaagaagctgggaaagtgagcacatttgggagctggagaacaggggttatccctacccctgtgaactctgttaacagcttacatagggtttcccctttactataactctagcatccccatcccatttgacactgggggcaagggttcttcttgcatgtggggtttatacccctcccctgatgaatacagagtggtagctaggggttggttatcatcagaaggtggtctcccctcaggcctgggggataaggacgtgggcccagccacatgccaactcatgtccaatactgctttgcctggtgtggggaaggattgggtcttgtcccccaacacagcttctgtggctgactgtaatactgtacaactgtttctgaccattaaatgctgttgtactctgaaaaaaaaaa

SEQ ID NO: 238 - DNA, 4229 bp, Homo sapiens
tcccgaaaccagagggatggggccggctgtgcagtagaacggggatcgaaaagaggaaaacaagggcacgaagaccagcgagaaagaagaggacacctgggaaaggcggaagcagaagacggggaagggaaaagaaacccatagcaggtggaaaccagatctagagcaacaccgtcaggttcacagtttgtttttctagaagagaagaaagtacctgaggattgctcttttttcctaccgttaatgaaaactacttttgtcttcatcataaaagaaaaaactaaggggaggtaaaggcagtctcctgttttattagggggagaggtgaagggaaatccaggctcactttctgaataagccactgcctggtgcacagagcagaaccatcctggtttctgaagacacatccctttcagcagaattccagccggagtcgctggcacagttctatttttatatttaaatgtatgtctcccctggcctttttttttttttttttttttttttagcaacacttttcttgtttgtaaacgcgagtgaccagaaagtgtgaatgcggagtaggaatatttttcgtgttctcttttatctgcttgccttttttagagagtagcagtggttcctatttcggaaaaggacgttctaattcaaagctctctcccaatatatttacacgaatacgcatttagaaagggaggcagcttttgaggttgcaatcctactgagaaggatggaagaaggagccaggcaccgaaacaacaccgaaaagaaacacccaggtgggggcgagtcggacgccagccccgaggctggttccggagggggcggagtagccctgaagaaagagatcggattggtcagtgcctgtggtatcatcgtagggaacatcatcggctctggaatctttgtctcgccaaagggagtgctggagaatgctggttctgtgggccttgctctcatcgtctggattgtgacgggcttcatcacagttgtgggagccctctgctatgctgaactcggggtcaccatccccaaatctggaggtgactactcctatgtcaaggacatcttcggaggactggctgggttcctgaggctgtggattgctgtgctggtgatctaccccaccaaccaggctgtcatcgccctcaccttctccaactacgtgctgcagccgctcttccccacctgcttccccccagagtctggccttcggctcctggctgccatctgcttattgctcctcacatgggtcaactgttccagtgtgcggtgggccacccgggttcaagacatcttcacagctgggaagctcctggccttggccctgattatcatcatggggattgtacagatatgcaaaggagagtacttctggctggagccaaagaatgcatttgagaatttccaggaacctgacatcggcctcgtcgcactggctttccttcagggctcctttgcctatggaggctggaactttctgaattacgtgactgaggagcttgttgatccctacaagaaccttcccagagccatcttcatctccatcccactggtcacatttgtgtatgtctttgccaatgtcgcttatgtcactgcaatgtccccccaggagctgctggcatccaacgccgtcgctgtgacttttggagagaagctcctaggagtcatggcctggatcatgcccatttctgttgccctgtccacatttggaggagttaatgggtctctcttcacctcctctcggctgttcttcgctggagcccgagagggccaccttcccagtgtgttggccatgatccacgtgaagcgctgcaccccaatcccagccctgctcttcacatgcatctccaccctgctgatgctggtcaccagcgacatgtacacactcatcaactacgtgggcttcatcaactacctcttctatggggtcacggttgctggacagatagtccttcgctggaagaagcctgatatcccccgccccatcaagatcaacctgctgttccccatcatctacttgctgttctgggccttcctgctggtcttcagcctgtggtcagagccggtggtgtgtggcattggcctggccatcatgctgacaggagtgcctgtctatttcctgggtgtttactggcaacacaagcccaagtgtttcagtgacttcattgagctgctaaccctggtgagccagaagatgtgtgtggtcgtgtaccccgaggtggagcggggctcagggacagaggaggctaatgaggacatggaggagcagcagcagcccatgtaccaacccactcccacgaaggacaaggacgtggcggggcagccccagccctgaggaccaccattccctggctactctctccttcctcccccttttatcctacctccctgccttggtcccgccaacacatgcgagtacacacacacccctctctctgcttttgtcaggcagtggtaggactttggtgtgggtggtgagaaattgtaaacaaaaactgacattcatacccaaagaaccagcctctcaccccagggtccatgtcccaggccccactccagtgctgcccacactcccagctgctggaggagaggggagatgccaaggtgccctgcaggacctccctccgggccacaccctcagctgcctcttcaggaaccggagctcattactgccttccctcccagggaggccccttcagagaggagaggccacaggagctgcattgtggggggacaggctcaagcaattctgtccccatcaaggggtcagctggagagacccaagaccctatctgttcaccagggacccaaaatccaaggggatgcttccctctgccctctttcctgcccctccccatcatacctgcacccaccccagccagggctccctgtccagaattcggttctcctcaggacgccaactcccagagctaaggaccaaggagaagaacagcctctccacccccaagccaggcggttgaggaacatattgagaaaggttcagattgcagaaacccagccctgcccctgcctcctgcatccagcccccaacatggtgccaaagcttccagaagccaaaaagcttctgatttttaaggtagtgggcatctctcttcctaatgacgaagctgctcagcaactccacctgcccgccgcaggaaggagcagtcccctgctatccctgcagccactcccagcacacccgcacacagccagcaccaccgcccccaccgtgcacttctcctctctgggccttggcttgggaccaggtacgaaggatccccaagcccttcaggcctgagatcagagccagatcagccttaagtcacctcccatccaagaacttggcctaaaaatactcccctatttctaaccctcaggacggatctgatattaaatgccttccctgggaggaagggtgctttccccctccctagaggtgcccattccataccctgggagactgaggagagcattggctgaagcccagttcctttcccatccatccccaactccaataatcccccactcctcgcaggtctcagtgtcatgctgtcttggggcagggtgaaagggtagtggcagcagggcgcccactctggagatcctcaaaaaaggccctcctctgtggctggcagcctctgacctttccctgggcttcaaaggaaggctatggagtttgctgtgggccctgcaaccttcccagccactcctgctgcactaaggacttaggatccttttatcacaaatcgggattctctcccccaccccgaattctgtctgcttaaactggaatacacaggagcccttcctggcctggatggtgtctcccagcttccccgcccagcttgcccaccccatagttggtgagatgccaagtttggtctgagttgtgaccccttcagagtagatgcccggcaggctggggttggcccctggagggtcaggggaccatcttcttattccctcttttctcattcctccaacttcctcccctccttcaattatttttttgtaaagttgatgccttactttttggataaatatttttgaagctggtatttctatttcttttggattttttttaatgtaaggttgttttgggggatggagttagaaccttaatgataatttctttcgtttggtgtaggttttagagatttgttttgtggagaggtttttttcttttgatgtaataaaatttaaaatggaaatgaaaaaaaaaa

SEQ ID NO: 239 - DNA, 1748 bp, Homo sapiens
ttttttttttttttttttttttttttttttttttttttttttttttgagctagagagagtcttggctctgtcacccaggcaggagtacaggggcatgatctcggctcacttcaatctccacctcctagttcaagcgattctccgcctcagcctccagagtagctgggagctactccatgtaccacaatgcccagctaatttttttggtattttagtagtgatggggtttcaccctgttccccaggctggtctcaaactcctgagctcagacaatccacccacctcagcctcccaaagggctaggattacagcgtgagccaccacacctggccaattctaattctgtgtaaaatgagtgaaacacagctaaactagaactagtccttgctagcatgttaatatagatttggctcaaacatctgccatccccatcctgttgcagagatgaccaacaaccctgggtccacagcagtgttccaaatctctcaagtagtactaaatctattacttctagtaccccagcctttttccccctcctggtggcaaaattcaagtatctcacacgcaccctaaatgtctcttcctctatgcagggaacttttggttgcctccccaaataaacggcattgttcaaactcagagctcagaacaaaccaatgaaaaaaaaaaaggaaatagcgtatttgttttaactttttattaaaatgcttaggatacagattgactttctttcgtaaatgactgttttacttttcctgaagtaggacatatatgcactctgataaaacagaatgagaagtcataattcatgggaattcctatacaaggtgctgatcctgtgtttggagctgagctcctcacagcagcttctttcagctatcttataggaatagtgttccgtggggcaagaaatacattggttctaactgattttcaatcccctttctccagtggaataaaccactttcacaaagagctgccctatgtataacccacagatttctagcttgcaacaaagtgacaagggacaaataggggaaaaaaaaaattaagaaaactaacactgaagtaatcatacttctcatgtctccgaacagagaagtatgggggacctttaaccaaaggaaattaaaaatatgcaagttatattacctagttcattcactgttagctagatttgttcacttaaggctttaacccctttccaaaccaacaactttgtcttaatccagctatgtttgctaataaacgaaatgcatgcacttcccacatatatacttcactgagcctctgcattcagtacctggcagtgaaaaagtatgctttccccacaagtcagtactggagaataaaaatgagaactccaactaaagaacaatgcctccttcaccccagtaatgttatccacattttccctaccctcacattagaataaagacatcctcccaacttttcatctcctatctccaatctgttcataggagatatatcttttgatcttttattataagggtagaatatagattaagatcatcaaaatccaatttcacatgtggcactaggaaaatggaatgctataaaattaatccccatcacccaagtagggatgctggtgcttttatactgagtctttactgccaataagtgatgctgcctccaaaggaacagctctacagaaagtttttgggttagtgtttccctagcttatttctgcaatggagaaagacaatttcatatcaaaaaaaaaa

SEQ ID NO: 240 - DNA, 2035 bp, Homo sapiens
ggcacgagggttgatggtgacagcagcagtgaccgtagcagcctagaggtggccgaatgcttactctaatgggctggcccatccctgagtgtctagagttcccagcccgcttaaggaaggaaggaaaacacaggcagctctaagtgtacgacgagggaggtctcatcggcggtgaggaagcccaggcgggtccccttcccagctgaaaggggttcggaatttcactctgtcgccaggctggaatgcagtagggcaatctcggctcactgcaacctccacctcccgagttcaagtgatgctcctgcttcggcctcctgagtagctgggactacagggactatgtcaccggtggggcttgccccagcaaggccaccatccctgggaagacggtcatcgtgacgggcgccaacacaggcatcgggaagcagaccgccttggaacttggccaggagaggaggcaacatcatcctggcctgccgagacatggagaagtgtgaggcggcagcaaaggacatccgcggggagaccctcaatcaccatgtcaacgcccggcacctggacttggcttccctcaagtctatccgagagtttgcagcaaagatcattgaagaggaggagcgagtggacattctaatcaacaacgcgggtgtgatgcggtgcccccactggaccaccgaggacggcttcgagatgcagtttggcgttaaccacctgggtcactttctcttgacaaacttgctgctggacaagctgaaagcctcagccccttcgcggatcatcaacctctcgtccctggcccatgttgctgggcacatagactttgacgacttgaactggcagacgaggaagtataacaccaaagccgcctactgccagagcaagctcgccatcgtcctcttcaccaaggagctgagccggcggctgcaaggctctggtgtgactgtcaacgccctgcaccccggcgtggccaggacagagctgggcagacacacgggcatccatggctccaccttctccagcaccacactcgggcccatcttctggctgctggtcaagagccccgagctggccgcccagcccagcacatacctggccgtggcggaggaactggcggatgtttccggaaagtacttcgatggactcaaacagaaggccccggcccccgaggctgaggatgaggaggtggcccggaggctttgggctgaaagtgcccgcctggtgggcttagagcgctccctctgtgagggagcagcccctccccagataacctctggagcagatttgaaagccaggatggcgcctccagacccgaggacagctgtccgccatgcccgcagcttcctggcactacctgagccgggagacccaggactggcggccgccatgcccgcagtaggttctagggggcggtgctggccgcagtggactggcctgcaggtgagcactgccctgggctctggctggttccgtctgctctgctgccagcaggggagaggggccatctgatgcttcccctgggaatctaaactgggaatggccgaggaggaaggggctccgtgcacttgcaggccacgtcaggagagccagcggtgcctgtcggggagggttccaaggtgctccgtgaagagcatgggcaagttgtctgacacttggtggattcttgggtccctgtgggaccttgtgcatgcatggtcctctctgagccttggtttcttcagcagtgagatgctcagaataactgctgtctcccatgatggtgtggtacagcgagctgttgtctggctatggcatggctgtgccgggggtgtttgctgagggcttcctgtgccagagcccagccagagagcaggtgcaggtgtcatcctgagttcaggctctgcacggcatggagtgggaaccccaccagctgctgctacaggacctgggattgcctgggactcccaccttcctatcaattctcatggtagtccaaactgcagactctcaaacttgctcatttaaaagaaaaaaaaaagaagaaaatgtaaaaaaaaaa

SEQ ID NO: 241 - DNA, 2457 bp, Homo sapiens
agcctccgccctcccaggctctgccccagcagctgcagcagatgcatcacacacagcaccaccagccgccaccacagccccagcagcctccagttgctcagaaccaaccatcacaactcccgccacggtcgcagacccagcctttggtgtcacaggcgcaagctctccctggacaaatgttgtatacccaaccaccactgaaatttgtccgagctccgatggtggtgcagcagcccccagtgcagccccaggtgcagcagcagcagacagcagtacagacagctcaggctgcccagatggtggctcccggagtccagatgatcacggaagccttggcccaaggtgggatgcacataagagcccggttcccgcctaccaccgctgtgtccgccatcccgtcaagctccatccctttgggcagacagcccatggcacaggtcagccagagcagcctccccatgctgtcctcgccgtcaccgggccagcaggtgcagaccccgcagtcgatgccccctcccccccagccgtccccgcagcccggccagcccagctcacagcccaactccaacgtcagctctggccctgccccatctcccagtagcttcctgcccagcccctcaccgcagccctcccagagcccagtgacggcgcggaccccacagaacttcagtgtcccctcacctggacctttaaacacacctgtgaaccccagctctgtcatgagcccagctggctccagccaggctgaggagcagcagtacctggacaagctgaagcagctgtcgaagtacatcgagcccctgcgccgcatgatcaacaagatcgacaagaacgaagacagaaaaaaggacctgagtaagatgaagagccttctggacattctgacagacccctcgaagcggtgtcccctgaagaccttgcaaaagtgtgagatcgccctggagaaactcaagaatgacatggcggtgcccactcccccaccgcccccggtgccaccgaccaaacagcagtacctatgccagccgctcctggatgccgtcctggccaacatccgctcacctgtcttcaaccattccctgtaccgcacattcgttccagccatgaccgccattcacggcccacccatcacggccccagtggtgtgcacccggaagcgcaggcttgaggatgatgagcggcagagcatccccagtgtgctccagggtgaggtggccaggctggaccccaagttcctggtaaacctggacccttctcactgcagcaacaatggcactgtccacctgatctgcaagctggatgacaaggacctcccaagtgtgccaccactggagctcagtgtgcccgctgactatcctgcccaaagcccgctgtggatagaccggcagtggcagtacgacgccaaccccttcctccagtcggtgcaccgctgcatgacctccaggctgctgcagctcccggacaagcactcggtcaccgccttgctcaacacctgggcccagagcgtccaccaggcctgcctctcagccgcctagccaagactgcagggatggcctgcagcctcatcggggccaaggacacacgcctcctgtcagacacttctaggtgttggcttccttagagagcctggggttaggttagctttcctgcttttatcttctgccttggggacctgccaaacgaaatcccacacctgtacagaactgggataggcgcagtggagcgggttgcttggggggcgttggccgacttcttagagaaggccctccatgtgacttcctcccaggagccagatgcgatcctcaggctgctctcaccgtggcctgtccacggtccaggtccatctcagcagcgtgagggtgcactcagggtgttgttagagcgtctcgtgtgtgctagacgcacccctactcgttcctatagaacacagaggacataggaaacccttaaaacacacatgggattctctggtcacagttttgggttcaggctatgctgctttgggcaggtggagcaccccccgaggaagcctgcaagtccagggcacaggctgccttttggagggagggctggcccataggtgctgctggctccccgccaccagctgggcctcagccctcacggcattcctgctgagcaccgtggggcacccagggagcaggggcgtcagggatcctgctgccggcacccctgtgccgctggcatgagggccgtgtccccactgtgaaggatgaagagcaaggccctcaggacccgtgtcctcagagcaccacacactgagcacccagagacagcgggcctggcagcgggccgggccatgcagggagcgcctccctatgttgcctgccactctgggcaccggccagcaccctctggtgagaagaggtcccccctttttatgtgcactaccccaccatctgtgattataataaatttattattcctgtgttaaaaaaaaaa

SEQ ID NO: 242 - DNA, 2288 bp, Homo sapiens
ctgcgaaccctctctactctccgaagggaattgtccttcctggcttccactacttccacccctgaatgcacaggcagcccggcccaagtctcccactagggatgcagatggattcggtgtgaagggctggctgctgttgcctccggctcttgaaagtcaagttcagaggcgtgcaaagactccagaattggaggcatgatgaagactctgctgctgtttgtggggctgctgctgacctgggagagtgggcaggtcctgggggaccagacggtctcagacaatgagctccaggaaatgtccaatcagggaagtaagtacgtcaataaggaaattcaaaatgctgtcaacggggtgaaacagataaagactctcatagaaaaaacaaacgaagagcgcaagacactgctcagcaacctagaagaagccaagaagaagaaagaggatgccctaaatgagaccagggaatcagagacaaagctgaaggagctcccaggagtgtgcaatgagaccatgatggccctctgggaagagtgtaagccctgcctgaaacagacctgcatgaagttctacgcacgcgtctgcagaagtggctcaggcctggttggccgccagcttgaggagttcctgaaccagagctcgcccttctacttctggatgaatggtgaccgcatcgactccctgctggagaacgaccggcagcagacgcacatgctggatgtcatgcaggaccacttcagccgcgcgtccagcatcatagacgagctcttccaggacaggttcttcacccgggagccccaggatacctaccactacctgcccttcagcctgccccaccggaggcctcacttcttctttcccaagtcccgcatcgtccgcagcttgatgcccttctctccgtacgagcccctgaacttccacgccatgttccagcccttccttgagatgatacacgaggctcagcaggccatggacatccacttccacagcccggccttccagcacccgccaacagaattcatacgagaaggcgacgatgaccggactgtgtgccgggagatccgccacaactccacgggctgcctgcggatgaaggaccagtgtgacaagtgccgggagatcttgtctgtggactgttccaccaacaacccctcccaggctaagctgcggcgggagctcgacgaatccctccaggtcgctgagaggttgaccaggaaatacaacgagctgctaaagtcctaccagtggaagatgctcaacacctcctccttgctggagcagctgaacgagcagtttaactgggtgtcccggctggcaaacctcacgcaaggcgaagaccagtactatctgcgggtcaccacggtggcttcccacacttctgactcggacgttccttccggtgtcactgaggtggtcgtgaagctctttgactctgatcccatcactgtgacggtccctgtagaagtctccaggaagaaccctaaatttatggagaccgtggcggagaaagcgctgcaggaataccgcaaaaagcaccgggaggagtgagatgtggatgttgcttttgcacctacgggggcatctgagtccagctccccccaagatgagctgcagccccccagagagagctctgcacgtcaccaagtaaccaggccccagcctccaggcccccaactccgcccagcctctccccgctctggatcctgcactctaacactcgactctgctgctcatgggaagaacagaattgctcctgcatgcaactaattcaataaaactgtcttgtgagctgaccacacaccacccacccaacaaacaccaaacggaacagtcgccaccccacagtaatatcattcaatgtggcctcccccccattctcgtcaccaccgatgactatgcaaccacgccgccccatacagaacatccaccctctctcccgcacaacgagacctgcgatgcagcctgacatccaacacgcgtcctcgacaccgctataacaccaggtccactgacatgcaaccacctttcggctgacaggacaaacgatatcactctcgtgatggtgccctccatatccagatcgcccaccacccacacactcaaccgctgtgcctaccttcgcattccgctcttctcgcgcgtaaatatctacaaccacgtccccggggcaacaaaaagacagaactcccaatacagctggctcactgctgcacaaggagcacagccagacacggggtcacaccgcgataccatgctattacgcgcacacccatcacatcagagttgcccct

SEQ ID NO: 243 - DNA, 1984 bp, Homo sapiens
gcggccgccgggactcttcctggagacaccgccatggccgggctatcccgcgggtccgcgcgcgcactgctcgccgccctgctggcgtcgacgctgttggcgctgctcgtgtcgcccgcgcggggtcgcggcggccgggaccacggggactgggacgaggcctcccggctgccgccgctaccaccccgcgaggacgcggcgcgcgtggcccgcttcgtgacgcacgtctccgactggggcgctctggccaccatctccacgctggaggcggtgcgcggccggcccttcgccgacgtcctctcgctcagcgacgggcccccgggcgcgggcagcggcgtgccctatttctacctgagcccgctgcagctctccgtgagcaacctgcaggagaatccatatgctacactgaccatgactttggcacagaccaacttctgcaagaaacatggatttgatccacaaagtcccctttgtgttcacataatgctgtcaggaactgtgaccaaggtgaatgaaacagaaatggatattgcaaagcattcgttattcattcgacaccctgagatgaaaacctggccttccagccataattggttctttgctaagttgaatataaccaatatctgggtcctggactactttggtggaccaaaaatcgtgacaccagaagaatattataatgtcacagttcagtgaagcagactgtggtgaatttagcaacacttatgaagtttcttaaagtggctcatacacacttaaaaggcttaatgtttctctggaaagcgtcccagaatattagccagttttctgtcacatgctggtttgtttgcttgcttgtttacttgcttgtttaccaatagagttgacctgttattggatttcctggaagatgtggtagctacttttttcctattttgaagccattttcgtagagaaatatccttcactataatcaaataagttttgtcccatcaattccaaagatgtttccagtggtgctcttgaagaggaatgagtaccagttttaaattgcccattggcatttgaaggtagttgagtatgtgttctttattcctagaagccactgtgcttggtagagtgcatcactcaccacagctgcctcctgagctgcctgagcctggtgcaaaaggattggcccccattatggtgcttctgaataaatcttgccaagatagacaaacaatgatgaaactcagatggagcttcctactcatgttgatttatgtctcacaatcctgggtattgttaattcaacatagggtgaaactatttctgataaagaacttttgaaaaactttttatactctaaagtgatactcagaacaaaagaaagtcataaaactcctgaatttaatttccccacctaagtcgagacagtattatcaaaacacatgtgcacacagattattttttggctccaaaactggattgcaaaagaaagaggagaagaatattttgtgtgttcctggtattcttttataagtaaagtttacccaggcatggaccagcttcagccagggacaaaatcccctcccaaaccactctccacagctttttaaaaatacttctactcttaacaattacctaaggcttcctcaactgccccaaatctcttaatagcttctagtgctgctacaatctaagtcaggtcaccagagggaagagaacatggcattaaaagaatcacatcttcagaagagaagacactaatattattacccatatacatgatttcagaagatgacataagattcctcttaaagaggaaatgtcaggaatcaagccactgaatccttaaagagaaaagttgaatatgagtcattgtgtctgaaaactgcaaagtgaacttaactgagatccagcaaacaggttctgtttaagaaaaataatttatactaaatttagtaaaatggacttcttattcaaagcatcaataattaaaagaattattttaaaaaaaaaa

SEQ ID NO: 244 - DNA, 4749 bp, Homo sapiens
agcagacgggagtttctcctcggggtcggagcaggaggcacgcggagtgtgaggccacgcatgagcggacgctaaccccctccccagccacaaagagtctacatgtctagggtctagacatgttcagctttgtggacctccggctcctgctcctcttagcggccaccgccctcctgacgcacggccaagaggaaggccaagtcgagggccaagacgaagacatcccaccaatcacctgcgtacagaacggcctcaggtaccatgaccgagacgtgtggaaacccgagccctgccggatctgcgtctgcgacaacggcaaggtgttgtgcgatgacgtgatctgtgacgagaccaagaactgccccggcgccgaagtccccgagggcgagtgctgtcccgtctgccccgacggctcagagtcacccaccgaccaagaaaccaccggcgtcgagggacccaagggagacactggcccccgaggcccaaggggacccgcaggcccccctggccgagatggcatccctggacagcctggacttcccggaccccccggaccccccggacctcccggaccccctggcctcggaggaaactttgctccccagctgtcttatggctatgatgagaaatcaaccggaggaatttccgtgcctggccccatgggtccctctggtcctcgtggtctccctggcccccctggtgcacctggtccccaaggcttccaaggtccccctggtgagcctggcgagcctggagcttcaggtcccatgggtccccgaggtcccccaggtccccctggaaagaatggagatgatggggaagctggaaaacctggtcgtcctggtgagcgtgggcctcctgggcctcagggtgctcgaggattgcccggaacagctggcctccctggaatgaagggacacagaggtttcagtggtttggatggtgccaagggagatgctggtcctgctggtcctaagggtgagcctggcagccctggtgaaaatggagctcctggtcagatgggcccccgtggcctgcctggtgagagaggtcgccctggagcccctggccctgctggtgctcgtggaaatgatggtgctactggtgctgccgggccccctggtcccaccggccccgctggtcctcctggcttccctggtgctgttggtgctaagggtgaagctggtccccaagggccccgaggctctgaaggtccccagggtgtgcgtggtgagcctggcccccctggccctgctggtgctgctggccctgctggaaaccctggtgctgatggacagcctggtgctaaaggtgccaatggtgctcctggtattgctggtgctcctggcttccctggtgcccgaggcccctctggaccccagggccccggcggccctcctggtcccaagggtaacagcggtgaacctggtgctcctggcagcaaaggagacactggtgctaagggagagcctggccctgttggtgttcaaggaccccctggccctgctggagaggaaggaaagcgaggagctcgaggtgaacccggacccactggcctgcccggaccccctggcgagcgtggtggacctggtagccgtggtttccctggcgcagatggtgttgctggtcccaagggtcccgctggtgaacgtggttctcctggccccgctggccccaaaggatctcctggtgaagctggtcgtcccggtgaagctggtctgcctggtgccaagggtctgactggaagccctggcagccctggtcctgatggcaaaactggcccccctggtcccgccggtcaagatggtcgccccggacccccaggcccacctggtgcccgtggtcaggctggtgtgatgggattccctggacctaaaggtgctgctggagagcccggcaaggctggagagcgaggtgttcccggaccccctggcgctgtcggtcctgctggcaaagatggagaggctggagctcagggaccccctggccctgctggtcccgctggcgagagaggtgaacaaggccctgctggctcccccggattccagggtctccctggtcctgctggtcctccaggtgaagcaggcaaacctggtgaacagggtgttcctggagaccttggcgcccctggcccctctggagcaagaggcgagagaggtttccctggcgagcgtggtgtgcaaggtccccctggtcctgctggaccccgaggggccaacggtgctcccggcaacgatggtgctaagggtgatgctggtgcccctggagctcccggtagccagggcgcccctggccttcagggaatgcctggtgaacgtggtgcagctggtcttccagggcctaagggtgacagaggtgatgctggtcccaaaggtgctgatggctctcctggcaaagatggcgtccgtggtctgaccggccccattggtcctcctggccctgctggtgcccctggtgacaagggtgaaagtggtcccagcggccctgctggtcccactggagctcgtggtgcccccggagaccgtggtgagcctggtccccccggccctgctggctttgctggcccccctggtgctgacggccaacctggtgctaaaggcgaacctggtgatgctggtgccaaaggcgatgctggtccccctgggcctgccggacccgctggaccccctggccccattggtaatgttggtgctcctggagccaaaggtgctcgcggcagcgctggtccccctggtgctactggtttccctggtgctgctggccgagtcggtcctcctggcccctctggaaatgctggaccccctggccctcctggtcctgctggcaaagaaggcggcaaaggtccccgtggtgagactggccctgctggacgtcctggtgaagttggtccccctggtccccctggccctgctggcgagaaaggatcccctggtgctgatggtcctgctggtgctcctggtactcccgggcctcaaggtattgctggacagcgtggtgtggtcggcctgcctggtcagagaggagagagaggcttccctggtcttcctggcccctctggtgaacctggcaaacaaggtccctctggagcaagtggtgaacgtggtccccccggtcccatgggcccccctggattggctggaccccctggtgaatctggacgtgagggggctcctgctgccgaaggttcccctggacgagacggttctcctggcgccaagggtgaccgtggtgagaccggccccgctggaccccctggtgctcctggtgctcctggtgcccctggccccgttggccctgctggcaagagtggtgatcgtggtgagactggtcctgctggtcccgccggtcccgtcggccccgtcggcgcccgtggccccgccggaccccaaggcccccgtggtgacaagggtgagacaggcgaacagggcgacagaggcataaagggtcaccgtggcttctctggcctccagggtccccctggccctcctggctctcctggtgaacaaggtccctctggagcctctggtcctgctggtccccgaggtccccctggctctgctggtgctcctggcaaagatggactcaacggtctccctggccccattgggccccctggtcctcgcggtcgcactggtgatgctggtcctgttggtccccccggccctcctggacctcctggtccccctggtcctcccagcgctggtttcgacttcagcttcctgccccagccacctcaagagaaggctcacgatggtggccgctactaccgggctgatgatgccaatgtggttcgtgaccgtgacctcgaggtggacaccaccctcaagagcctgagccagcagatcgagaacatccggagcccagagggcagccgcaagaaccccgcccgcacctgccgtgacctcaagatgtgccactctgactggaagagtggagagtactggattgaccccaaccaaggctgcaacctggatgccatcaaagtcttctgcaacatggagactggtgagacctgcgtgtaccccactcagcccagtgtggcccagaagaactggtacatcagcaagaaccccaaggacaagaggcatgtctggttcggcgagagcatgaccgatggattccagttcgagtatggcggccagggctccgaccctgccgatgtggccatccagctgaccttcctgcgcctgatgtccaccgaggcctcccagaacatcacctaccactgcaagaacagcgtggcctacatggaccagcagactggcaacctcaagaaggccctgctcctccagggctccaacgagatcgagatccgcgccgagggcaacagccgcttcacctacagcgtcactgtcgatggctgcacgagtcacaccggagcctggggcaagacagtgattgaatacaaaaccaccaagacctcccgcctgcccatcatcgatgtggcccccttggacgttggtgccccagaccaggaattcggcttcgacgttggccctgtctgcttcctgtaaactccctccatcccaacctggctccctcccacccaaccaactttccccccaacccggaaacagacaagcaacccaaactgaaccccctcaaaagccaaaaaatgggagacaatttcacatggactttggaaaatatttttttcctttgcattcatctctcaaacttagtttttatctttgaccaaccgaacatgaccaaaaaccaaaagtgcattcaaccttaccaaaaaaaaaa

SEQ ID NO: 245 - DNA, 3626 bp, Homo sapiens
ttttttttttttaaagttagttaaatacagtgcctagaaggaacagacggcccagcgcaacaggtcgaggcctttgtccttgatgatttttttttcctctggctacgttcagtccgactgagtgcagcgctatgcatatgtaaacatattcgttaaagccgatcacctttaaggtcattcggaaaaaagcggtccttgttttcgcggtgtgggtgtgggtcgtaacagcagtctcattcccccgggaggaaggctcttgggcgttggagagtcccactcgggttgtgccacaggacaatgtgggcagggcgtgagcggctcggcgggcgcggcccgggcgttacctcctgccgatctcgctctgccgcaggaactggatgttgttggcgctgtcggccagctcggggtactgctccaccgagagtacgtagtacccgtcgtagccctgcaccttgccggcgctcagcagctgccgcttctcgccctccgtccagaggcgcgcgccctcctcgccgtcgcgcacgcgctgctgctcgcgcgcccaggcccgggcgagcgcgcgctgccgcgcctgctccaggatgcgcgccttctcctcgtccagggtcatgccgtagcgcacgtgcagcgccagcgcgccgaactgcatctccacgtccgcgaacctgcgcgtcctgccgttcaccaccgtggtggactgcgacaccgtcacgttgatgccgttctccagcgccttgcggccgctggtcaaccgcagcgtgcccaggtcgctctcgggcgtggtggtcttgatgaagtagtgcgtgtccttgccctcgatggtgaagtgcaggttctccaggtagaaggcgttgttgagcacggccgccaccttgatgcagtcctcgttggcgatgttgagcacgttggtctgcacgcggccctggctgacggccagcatgacgcccttgccgatcagcgacttgaccgtggcgaaccacagccaggactgcgcgccgccggcccggcgccggctcacctgcacctcggccatcttccccagcgacaggaaggccttggcctgccgcgccacttgctgctggactccgaagatgggcggtatatcatcccactgctgactcttcacaagttcgtaagaaggttctgttaaatcaaatttgggaacagggaatccaggaatagcattgtgcagatggaaaccaaatgtcaccagccagctgttaacatctgtgatgtaatctttcacgtcatggattttgcttgcagggttgttattcctaaacatgtacaagttaaaaggagctgggtccttcccaattcttttccagatttctatgtcaggtgttgtccaccgtcctgccaaaatgtcataatctctttctccaaagtggattaatttggtgagtgggtcatacaggccaccatgaaatccaattaccagttgaaagtcaatattagagtcaaaatagatttccccatatgcagtgtactgaatctgtttcagcataagcccattgctactgaacacagccagtggtgtccctgtgttatccgatgcaatatagaattcatccccactgctgatttccatggcaaaaagatgtccttggagatcataatacagggaggtaatttctgaactcgaatggttgtagacatgagtaatcctagtgggataagttaagtcagcataaaaaaactgcaggtgctgtcctagactggttttgctagaaacacgccttcccaggccgtcataacggtagatcactgtccagccactgcctttactgtaaactcgagttagaagccccttggagctatattcaaagatttccgtgcccctttgacgtaggaaaccatcttcatccaaccgatattgaacatcacccagtcgagtgattctgtctcgcaggtcatagcgaaggggtgtcagacgcgcactgttacttgggttcagtaaatggaggtttccattcagatcgtagttgtaccgccacattatcttttcattgaggtaaactgtttggagctgtccatcaacatcatattcataagcatatttggtggtgttggcaaagggccctattttaatctctctcttggttacccgacccatgttatcatactgaattgtaatccagtacatgagcgacctgaatatctcatattgaatctccttgatacggccatgagcatcaaagtgcttcgtataggtcattacagctgtagaaatgatctggttaatatcataatatataactccaaactttccaaactgctcaactttgccagaaatgtcatcaaactgatacagatcaataggcagtggcgtttcattgatcacaccctgcatgctggtcactcgaaagctgttgtcatagctatagtcaaatcttgcatttaccatcccatcttcactaaagcggaaaatctgcctgtcaatcaggggaccaatttgcctgtatctaatggtgcaaataaaaccatcactctggaggtttactgtctttaggactcctgctgtttcatcataggtaaaactgactcttgtgctatcatataaaatttctgagagcctagtctgccttctgtatttgaataagaccctccgacttgtacccaagaaagctgtttgtagaagcagcccttcctcgttgtagtccgtgatgatggaggcgttgctttccggggggttgtatatgttgcggtagtagccaatggatcggatggtctgcatggtgtggcgagccacactgggcatggtgatggcagacaggcggtcccacatatcgtattcgaagatgtactgccgctggctatgaagcagaagaaccatggacttttctaaatatgtgtaactccatgttttaccatcagcaaagacccgagacacgatcctcccctgtccgtcataatctactttctcgctagtggtgcctcgctggatgctggcaatttgacctgtggatgaataggtgacattgacggccatcagcttgctgcttggcagccagagagtcgggtgcccagacgtgtcgtaggcgatcctcagtagaaatttacggtggtcgtcatagatcttttctgtctttgttgttcgatcaaagtcaactgaaaggaggtttctgccattaaccctgagcttgcggccaaagacattgactttcccttgggcttgctcttttcggaatctccattccaccaagttttgaccgttctcgccaggcaaagtcatgtttcttttggcaaccgtcggattagcggtgccagccagaacgtgcggctctgtttggtagtgtgagtccaggccactggcgtagataattctgagggagccgtcataaccaatctggtagctgtttcttaactgatcttgaaccatggtgtagaaagaatcgatcgaggacagatttgaagtgatgctgacatcttcttctcggctagatgactcaatgtccactgtgatagccttgtccatgtccccatgcaggtttgtgaccactccagttggaaacgtaacatttgtcagacgaccttcactgtcatagtcaaaaaacgttgtccatccagtttcatcacttttagtggctaaaaggccactattgccatggtaagtaaacaaaact

SEQ ID NO: 246 - DNA, 2038 bp, Homo sapiens
cgacagcgtcagccctgcgcggagcgccggcccgatggcggcggcggcggcggcgatggccgagcaggagagcgcccggaacggcggccgcaaccgcggcggcgtccagcgtgtggagggcaagctgcgcgccagcgtcgagaagggcgactactacgaggcgcaccagatgtaccggaccctgttcttcaggtacatgtcccagagcaagcacacggaggcccgggagctcatgtactcgggagccctgctcttcttcagccatggccagcaaaacagtgcagcagacttgtccatgctggtcctggagtccctggagaaggcggaagtggaggtggctgacgagctgctggaaaatctggctaaagtgttcagcctgatggaccccaactctcctgagcgcgtgacctttgtgtccagagccctgaagtggtccagtgggggctccgggaagctgggccacccccggctgcaccagctgctggccctcaccctgtggaaagaacaaaactattgtgagtcgaggtatcattttctgcactcagcggacggggagggctgtgccaacatgctggtggagtattccacgtcccgcggcttccgcagcgaggtggacatgttcgtggcccaggccgtgctacagtttctctgtttaaaaaacaaaagtagcgcatcggtggtcttcacgacgtacacccagaagcacccgtccatcgaggacgggcctccgtttgtggagccgctgcttaacttcatctggttcctgctgctggctgtggacggtgggaagctgacggtgttcactgtgctgtgtgagcagtaccagccatccctccggcgggaccccatgtacaacgagtacctcgaccgcataggacagctgttcttcggcgtcccgcccaagcagacgtcttcctacgggggcctgctcgggaaccttctgaccagcctcatgggctcctcagagcaggaggatggggaggagagccccagcgacggcagccccatcgagctggactgaactggccaggccacgtggagacaccacggtcgacgacggctggagggacgtttcagaggcgagtcctgggtggctcctcgccttgggggctcctggccctgaggctggcggtggccgcatgccggcgcgtgtctgtttctgtgcggcggctcagggtggcgcggctgctgctcactgtgctgctgggacccaagagtggggcgtcgcccctgctggccgccgcgtcccccgagattgacccacaataaagcacaggccttaccgcggcgtcaccctctcccactccttttgttctgggtcctttcgggaggggtggatgggcagcacaggaggcccgtccctcggggggctgcgcacatcacgctccttggccggggcgtccggcacagctgcggtcaccaaagcaggtgctggccctcggacctgagagcccagccagggcccatgtggtctgcaaatgggagcggctgtttttgaacacggggtcattctgcagtcaggacgaaccggtccccgtcgcagacggagtgcacgtgccctgcgccacatcctcacgctcggtggagggacgcgtgcggcgggacggtgcctacgggtacttgcagccgtgtcccatgtggcatcccagagctgcgccctgctggtctctgtgagcgccacgctgctgtgctggaaatgccgctttaaaaagggataccgtgggactctgcccgtctctttcataacgcaatatttatttgtattgggtgacgattgattctttcgacctaacattttgggttttaaccaaataaccggtccaggagtgagcagctccgttctgtcagatgctactccaaatgttaccagaacgatgacaaaaggggagacgctctattttttcacagttaaatgacagttgtagattgatacgcagttgtgcatgggaaggggaaacgcacagctttatttactgtaaagtggaatttcaggaaggcttgtgtgaaccgttgcgcataaataaaccctttctaccgg

SEQ ID NO: 247 - DNA, 931 bp, Homo sapiens
  misc_feature (1)...(931): n = a,t,c or g
ttttttttttttcaagttttcaattaagaataatatttgctgatggcaccatcttcctgtctttcagccttcagcatggtagaggaaaagagaaagagtgtagacaaaaacagttgaagaacatctgtgcttgttccaccttcattttctgttttgtgcgttgcctgaatgaacggtgtcttcaggttggtatttcacaggcggtgctcccaagtagtctggttttcccatttgtggagggcgaggtcatagaggggacagggggaggctgtctggtcagcactgtgtatttccaaagaacaaggactagccaaaactacaagcctttgaaggaccaaaggaaaagagaaaaaaccagcctctaaccaggccatgcgctagaaatgattgagtataaaaaagaaaattggtttctgtgtatgagggtgcatggaaaaggtctttatctctgcacaaaacaaaatattcaagtttcagaatatcccaatggccttgccctggatctcctcttgtgctcttccaatttccaaggatgttccaacttggtggaaggagggtatgtgggaaattcaacagcccctctgtatctctttctacccaacattaacttagcaggatggatttaagaaccggcagcttagcctgaggaattgctgtgttctgtgggagcagggcaggttcataaataagtgcacagaggtcttgaaatacagggattatctgtncttctcggaacatggatgtccttccagggatgtgcatctggccttgctgtctaagttccatcaagggagccttccgttctagagtatctgctttccacggcatcagggacagctttccggacttcactgtacactgtctctbtktccttctttcctagatctttgtgagactcagctgaggacacttgaacttccgtgtactgcac

SEQ ID NO: 248 - DNA, 2010 bp, Homo sapiens
gcgcggcggtagggaaggcgcctcccgcagtcgctcggaactgccgacccgagtgcttcccgcagagggctggtggtgggagcggagtgggtcgggcggggccgagccgggccgtgggccgtgtgggggccgggcggcggccgggccggcggacggcgggatgggctgcaccgtgagcgccgaggacaaggcggcggccgagcgctctaagatgatcgacaagaacctgcgggaggacggagagaaggcggcgcgggaggtgaagttgctgctgttgggtgctggggagtcagggaagagcaccatcgtcaagcagatgaagatcatccacgaggatggctactccgaggaggaatgccggcagtaccgggcggttgtctacagcaacaccatccagtccatcatggccattgtcaaagccatgggcaacctgcagatcgactttgccgacccctccagagcggacgacgccaggcagctatttgcactgtcctgcaccgccgaggagcaaggcgtgctccctgatgacctgtccggcgtcatccggaggctctgggctgaccatggtgtgcaggcctgctttggccgctcaagggaataccagctcaacgactcagctgcctactacctgaacgacctggagcgtattgcacagagtgactacatccccacacagcaagatgtgctacggacccgcgtaaagaccacggggatcgtggagacacacttcaccttcaaggacctacacttcaagatgtttgatgtgggtggtcagcggtctgagcggaagaagtggatccactgctttgagggcgtcacagccatcatcttctgcgtagccttgagcgcctatgacttggtgctagctgaggacgaggagatgaaccgcatgcatgagagcatgaagctattcgatagcatctgcaacaacaagtggttcacagacacgtccatcatcctcttcctcaacaagaaggacctgtttgaggagaagatcacacacagtcccctgaccatctgcttccctgagtacacaggggccaacaaatatgatgaggcagccagctacatccagagtaagtttgaggacctgaataagcgcaaagacaccaaggagatctacacgcacttcacgtgcgccaccgacaccaagaacgtgcagttcgtgtttgacgccgtcaccgatgtcatcatcaagaacaacctgaaggactgcggcctcttctgaggggcagcggggcctggcgggatgggccaccgccgactttgtaccccccaacccctgaggaagatgggggcaagaagatcacgctccccgcctgttcccccgccgcttttctcctctttcctctctttgttctcagctccccctgtcccctcagctccagacgtaggggaggggttgccacaggcctccctgtttgaagcctgcccttgtctgagatgctggtaatggccatggtacccccttctgggcatctgttctggtttttaaccattgtcttgttctgtgatgaggggaggggggcacatgctgagtctcccaaggctgcgtctggaggggcccctgcttctccagcctggacccccagctttgcccaacaccagcccctgccccagcccaagtccaaatgtttacagggagcctcctgcccagtcccccaaccccagccgctcggaggccccaaaggaaaaagcacaagaagcgtgagacgccaccattcctggaaaccacagtccacctgctcattctcgtagctttttaaaagccattgaacagctcaagaagacctctcataacacagacaacccttgcagaggcacttcatatgtctacgggttccgaaaaacaaaagacggttcactgaaaaggggcccatgggcgcccgtagcgcgtgtatccgtgcgccccagcttttctgtgtgtcccaagagttgcaacaaattttgcgcgagatccccataattgtggacgcgcttattacatttcagatcacgcccggtttacct

SEQ ID NO: 249 - DNA, 3424 bp, Homo sapiens
ggagagaggacctatttctacctaaggacattcccggaaggcaatgggtttcaaacaatatcctgaagagactcatctcggggaactaagcaggtggtaatcagagaacacagagcccccggaagaattttatggcatttcaggcaagccacaggccagcctggggaaaaagcaggaagaaaaactggcaatacgagggcccaacccaaaagttattcctgaagagaaacaacgtgtcagcaccagatgggccttcagaccccagcatctccgcgagcagtgagcaaagcggggcacagcagcctcccggtttacaggttgaaaggattgttgacaaaaggaaaaataaaaaagggaagacagagtatttggttcggtggaaaggctatgacagcgaggacgacacttgggagccggaacagcacctcgtgaactgtgaggaatacatccacgacttcaacagacgccacacggagaagcagaaggagagcacattgaccagaacaaacaggacctctcccaacaatgctaggaaacaaatctccagatccaccaacagcaacttttctaagacctctcctaaggcactcgtgattgggaaagaccacgaatccaaaaacagccagctgtttgctgccagccagaagttcaggaagaacacagctccatctctctccagccggaagaacatggacctagcgaagtcaggtatcaagatcctcgtgcctaaaagccccgttaagagcaggaccgcagtggacggctttcagagcgagagccctgagaaactggaccccgtcgagcagggtcaggaggacacagtggcacccgaagtggcagcggaaaagccggtcggagctttattgggccccggtgccgagagggccaggatggggagcaggcccaggatacacccactagtgcctcaggtgcccggccctgtgactgcagccatggccacaggcttagctgttaacgggaaaggtacatctccgttcatggatgcattaacagccaatgggacaaccaacatacagacatctgttacaggagtgactgccagcaaaaggaaatttattgacgacagaagagaccagccttttgacaagcgattgcgtttcagcgtgaggcaaacagaaagtgcctacagatacagagatattgtggtcaggaagcaggatggcttcacccacatcttgttatccacaaagtcctcagagaataactcactaaatccagaggtaatgagagaagtccagagtgctctgagcacggccgctgccgatgacagcaagctggtactgctcagcgccgttggcagcgtcttctgttgtggacttgactttatttattttatacgacgtctgacagatgacaggaaaagagaaagcactaaaatggcagaagctatcagaaacttcgtgaatactttcattcaatttaagaagcccattattgtagcagtcaatggcccagccattggtctaggagcatctatattgcctctttgcgatgtggtttgggctaatgaaaaggcttggtttcaaacaccctataccaccttcggacagagtccagatggctgttctaccgttatgtttcccaagataatgggaggagcatctgcaaacgagatgctgctcagtggacggaagctgacagcgcaggaggcgtgtggcaagggcctggtctcccaggtgttttggcccgggacgttcactcaggaagtgatggttcgcattaaggagcttgcctcgtgcaatccagttgtgcttgaggaatccaaagccctcgtgcgctgcaacatgaagatggagctggagcaggccaacgagagggagtgtgaggtgctgaagaaaatctggggctcggcccaggggatggactccatgttaaagtacttgcagaggaagatcgatgagttctgagtgtcgggctgcccactggtgacaccgggatcgggctgagcaggagaacatcaccggctccagttcccctgatccattctcacagcctgaaacaagctcacccgtagcttacgcttggaagcaggactgggaacatccacgctatttattatcgaggagttttaaagtactgtaactttaaaataaataactacaaagcttctttgtccaaacgtcattattttatacttatatacacgcaggtgtaaaagtataaaggtgagcactagactgctcttagaagctctaatttttgttttctttggctagtactgtataaaaaacagaattgtgttttattggttttggatgacagaaaagtctggaataatgtttgttttcctcatttcttccttctagaacacagaatctaaaggggtgttagccagcctcgcctccctgccccacgtagagacacagagtgatgtgaggcgttggctttttctccaagaaggtacagatacctcagattcgggaaactcaaaatcaaaagacttagcttctaggataaatacttctgatgaaaaatccgctgaggagcataccccaaaccagacatatgcttaggattcatgctgagatatcaattggtttccccttctttttaaaatacgtccagttcttacccagttaacatgaagaaaccactgtctctagaagaaagcttgttttgcagtattagtgaatcactgaatagcttaagtatgactatctaagttataagttagtctttagtgggttttaaatagtttttctgacccttctgaaaaataactacataagtgcttcttgttgctgggtgagaaatactactttatagacagttttggttttctgtttgcagatatgattgatgtatttcaccaaaataaaatatttttatgtttataaagtgtaatttttaggttcacttagaatatattttatttaataagttaaaattcttttggcacactattaaatgcaaaaactcctttcaaaacaaaaaagaactaccttatattcaacatttaatgttcttggcctctgcttttatgtctatacaatatactgagttcagtatggtgtccaagagtgccctgtgtggatagacatgtgcactccttccaggagtgggtactgattcccagactccagatgcctattattagttaggcttctgagcttgcaatcatattgaatgtatgaagagcgaaatcaaattcttatttttgtacagttttgaagtttatacttagaactgaccacctccccggccacgcggagagctgtacagtgtgtaaatctgcctttatcttggattgattggtacagtatttttgcatctgtgggacctaccttttcgttcagtagtttgaactatatataaactgtacaatctgtaaagtttttatagaataaatattcagctgtgaaaactggttaaataaaactaatatttcttaacaaaaaaaaaa

SEQ ID NO: 250 - DNA, 5465 bp, Homo sapiens
atgaggggacttgggacttgcctggcgactttggccggacttttgctaactgcggcgggcgagacgttctcaggtggctgcctctttgatgagccgtatagcacatgtggatatagtcaatctgaaggtgatgacttcaattgggagcaagtgaacaccttgactaaaccgacttctgatccatggatgccatcaggttctctcatgctggtgaatgcctctgggagacctgaggggcagagagcccacctgctcttaccccaacttaaggaaaatgacacccactgcatcgattttcactattttgtgtccagcaagagtaattctcctccggggttactcaatgtctacgtgaaggtcaataacgggccactggggaatcctatctggaatatatctggagacccaacacgtacatggaacagggcagaactggccattagtactttctggcctaacttttatcaggtgatttttgaagtgataacttctggacatcaaggctatctcgctatcgatgaggtgaaggtgttaggacatccatgtaccaggactcctcacttcctgcggattcagaatgtggaagttaatgctggccagtttgctaccttccagtgcagtgccatcggcaggaccgtggcaggagacaggctctggttacagggcattgatgtgcgagatgctcctctgaaggaaatcaaggtgaccagctcccgacgcttcattgcttcatttaatgttgtgaataccaccaaacgagatgctggaaagtaccgctgcatgattcgcactgaaggaggtgttggaatatcaaactatgcagagttggtagttaaagaaccacccgttcctattgccccacctcagctcgcctctgtaggagccacctacctgtggatacagctcaacgccaactccatcaatggggatgggcccattgtggcccgagaggtggagtactgcacggccagtgggagctggaatgaccggcagccagtcgattccacgagctataaaattggacaccttgacccagatacagaatatgagattagtgtgctcctgaccaggccaggggagggtggcactggctctcctggtccagctctcaggacaagaacaaagtgtgctgatcccatgcgaggcccaagaaaactagaagtagtggaggtcaaatctcggcaaatcactatccgctgggagccatttggatataatgtaactcgttgccacagttataatctcactgtccactactgttaccaagttggaggacaagaacaagtgcgagaagaagtaagctgggatacagaaaattcacaccctcaacacacgatcactaacctgtcaccatacaccaatgtcagtgtgaaactgatcctcatgaacccagagggccggaaggaaagccaagaactcatagtgcagacagatgaagacctcccaggtgctgttcccactgaatccatacaaggaagtacctttgaagagaagatatttcttcagtggagagaaccaactcaaacatatggtgtaatcactttatatgagatcacctacaaagcagtcagttcctttgacccagaaatagatttatccaatcagagtggaagagtttcaaagctgggaaatgaaacccattttctgttttttggactgtatccggggaccacatactcctttaccatccgagctagcacagctaagggttttgggcctccagcaacaaaccagttcaccaccaaaatatcagcaccctctatgccagcttatgaacttgagacacctttgaatcaaactgacaataccgtgacagtcatgctgaaacctgcccacagcagaggagcacctgtcagtgtctatcaaatagttgttgaggaagaacgtcctcgaagaactaaaaagacgacagaaatcttaaagtgctacccagtgccaattcacttccagaatgcttctctgctgaactcacagtactactttgctgcagaatttcctgcagacagcctccaagctgcgcagccttttacaattggtgataataagacatataatggatactggaacactccccttctcccctataaaagctacagaatttatttccaagctgctagtagagccaatggggaaaccaaaatagactgtgtccaagtggccacaaaaggagctgccactccgaaaccagtcccagaacccgagaaacagacagaccatacagttaaaattgctggagtcatcgcgggcatcttgctgttcgtgattatatttcttggagttgtgttggtaatgaagaaaaggaaactggccaagaagcggaaagagaccatgagcagcacccgacaggagatgactgtgatggtgaactcaatggacaagagctatgctgagcagggcacaaactgcgacgaggctttctcattcatggacacgcacaatctgaatgggagatctgtgtcttcaccatcgtccttcacaatgaaaacaaatacactgagcacatcggtgcctaattcctattacccagatgaaacccacacaatggccagcgataccagcagcctggtgcagtcccatacttacaagaagcgagagccggccgacgtgccctatcagactgggcagctccaccccgccatccgggtggcagacctccttcagcacatcacacagatgaagtgtgcggagggctacggcttcaaggaggaatacgagagcttctttgaagggcagtctgcaccatgggactcggctaagaaagatgagaacagaatgaagaacagatacgggaatatcattgcatacgatcattcccgagtgaggctgcagacaatagaaggagacacaaactcagactatatcaatggcaattatatcgatggttatcatcgacccaatcattacattgctacccaagggccaatgcaggaaaccatctatgacttctggaggatggtgtggcacgaaaacactgcaagtatcatcatggtgaccaatcttgtggaagtgggaagggtcaaatgctgcaaatactggccagatgacacagagatatataaagacattaaagttaccctaatagaaacagaactactggcagaatatgtgataagaacatttgctgttgaaaagagaggtgtgcatgaaatccgagagatcagacagtttcacttcactggctggccggatcatggggtcccctaccatgccaccggcctgctgggattcgtgcggcaagtcaagtccaagagcccgcccagtgcaggcccactggtggtgcactgcagtgctggtgcagggaggactggctgtttcatcgtcattgatatcatgttggacatggccgaaagggaaggggtcgtagacatctacaactgcgtcagggagctgcggtcacggagggtgaacatggtgcaaacagaggagcagtatgtgtttatccacgatgcgatcctggaagcctgtctttgtggggacacctctgtgcctgcttcccaagttaggtctctgtattatgacatgaacaaactggatccacagacaaactcaagccagattaaagaggaattccggacgctaaacatggtgacaccaacgctgcgagtagaggactgcagcatcgcactgttgccccggaaccatgagaaaaaccggtgcatggacatcctgcccccagaccgctgcctgcccttcctcatcaccatcgatggggagagcagcaactacatcaatgctgccctcatggacagctataaacagccttcagcttttatagtcacccagcatcctttgccaaacacagtgaaagacttttggagactggtcctggattatcactgcacatccgtagttatgctaaatgatgtggatcctgcccagttgtgtccacagtactggccagaaaacggagtacacagacacggccccatccaggtggaatttgtctctgctgacctggaagaggacatcatcagcaggatattccgcatttacaatgccgccagaccccaagatggatatcggatggtgcagcaattccagttcctgggctggccgatgtacagggacacaccagtgtctaagcgctccttcttgaagctcattcgccaggtggacaagtggcaagaggaatacaatggcggggaaggccgcaccgttgtgcactgcttgaacgggggaggccgcagtgggacgttctgcgccatcagcatcgtatgtgagatgctccggcaccagagaaccgtggatgtctttcacgctgtgaagacactgaggaacaacaagcccaacatggtcgacctcctggatcagtacaagttctgctacgaggtggccctggaatacttgaattctggctgatggtgtaaacagctctgcaaacaatccctttcataccacaaagccaagacgttccatggtatttgtgcaaaagagatgaagacttctcaatatgcttattttgctttgcataattggctctttttaagagcccaagaaagtgtttctaaaattgcttgcactgcccaatcccagtaatgctgctgcctgacagaaacacacacacagccacagttgccaaatcccgtactccttgccaccggcttcctagagcagcgtagacagctggtaaactgaagagcacaactatattcttatgaaggaatttgtacctttggggtattattttgtggcccgtgaccctcgttattgttacagctgagtgtatgtttttgttctgtggagaatgctatctggcattatggtaatatattattttaggtaatatttgtactttaacatgttgcataatatatgcttatgtagctttccaggactaacagataaatgtgtaatgaacaaagatatgttgtatgagtcgtcgtttctgtcagatttgtattgtttccaagggaaaagcttgggggaggactcagttcacaaaatgcaaaactcaacgatcagattcacggacccagagcttttccatgtgtttatattgtaaatatttttgatttcatcaaattctcaattccttcaccgaaatctcgggcaaacacaaacaacacacaccccaccaactaccccacacacagtaaacagacactaaaaacacaaagacagaacccagaacaacaaaacggggccgcgccacaacaccaccccccgggcccacacacaacagccacctcgtcacgcaggccgacaccgcgccgcctatatacagagcgcgcgccttcatcacagcgggaggaaaagagacccagccgcagcgagccacacctcgctcggggcaaagagaaacacaccgacgaacgatggacagcactaaaacacggcttcacccaccaactggcccaggtgcgtatacaacccgatcggcagtccaagctgagagctcgtagccgaaagagagaccaacagcgacgatcgagccacacaactgacaagccaacaagacatagcca

SEQ ID NO: 251 - DNA, 872 bp, Homo sapiens
  misc_feature (1)...(872): n = a,t,c or g
ttttttttttttgagacggagtctcgctctttcgcccaggctggagtgcagtggcgcaatctcggctcactgtaatctccgcctcctgggttcaagggattctcctgcctcagcctcccaagtagctgggactacaggcacacgccaccacacccagctaattttttgtatttttagtagaggcggggtttcaccatgttagccaggatggtctccatctcctgacctcgtgatccgcccgccttgtcctccaaagtgctgggattacaggcatgagccactgggcgcggccagataagtttttaaggttccttcttgctttagcattctgagaaatgtctaattggtagtaagacaagagtaatagcaacctgtattgttagtatttaaccaaataggctaaaattttaatcaggtaccttatgtattaaatagaaatcggaatgtaccataataaatccaaactctcaattacgccatggtaattcagtcactaaaatatgtaaagatagaaaattttttaatttaaagaagtgtgaaacatagccattgattgatcagaattctggaatctgaatattaaaaccttacttagtgactggaatggtatatgctccctccaaaagtttatctttgtttattgattaaaggtaatccttactttctttgtattacttaggttctcaattaaaggtaatccttactttctttgtattacttaggttcttaaatttctatgataaacatgtattgctaaataataaaaagtatataaaaatggcanaaaaaacgaaaaaanaacancccctcccaacccacccacaccctatcncactatacnctaataaattgggacaatctccatactattt

SEQ ID NO: 252 - DNA, 2388 bp, Homo sapiens
gaggaggagtggggaccgggcggggggtggaggaagaggcctcgcgcagaggagggagcaattgaatttcaaacacaaacaactcgacgagcgcgcacccaccgcgccggagccttgccccgatccgcgcccgccccgtccgtgcggcgcgcgggcggagacgccgtggccgcgccggagctcgggccgggggccaccatcgaggcgggggccgcgcgagggccggagcggagcggcgccgccaccgccgcacgcgcaaacttgggctcgcgcttcccggcccggcgcggagcccggggcgcccggagccccgccatgtcgcgatccaaccggcagaaggagtacaaatgcggggacctggtgttcgccaagatgaagggctacccacactggccggcccggattgacgagatgcctgaggctgccgtgaaatcaacagccaacaaataccaagtcttttttttcgggacccacgagacggcattcctgggccccaaagacctcttcccttacgaggaatccaaggagaagtttggcaagcccaacaagaggaaagggttcagcgaggggctgtgggagatcgagaacaaccctactgtcaaggcttccggctatcagtcctcccagaaaaagagctgtgtggaagagcctgaaccagagcccgaagctgcagagggtgacggtgataagaaggggaatgcagagggcagcagcgacgaggaagggaagctggtcattgatgagccagccaaggagaagaacgagaaaggagcgttgaagaggagagcaggggacttgctggaggactctcctaaacgtcccaaggaggcagaaaaccctgaaggagaggagaaggaggcagccaccttggaggttgagaggccccttcctatggaggtggaaaagaatagcaccccctctgagcccggctctggccgggggcctccccaagaggaagaagaagaggaggatgaagaggaagaggctaccaaggaagatgctgaggccccaggcatcagagatcatgagagcctgtagccaccaatgtttcaagaggagcccccaccctgttcctgctgctgtctgggtgctactggggaaactggccatggcctgcaaactgggaacccctttcccaccccaacctgctctcctcttctactcacttttcccactccaagcccagcccatggagattgacctggatggggcaggccacctggctctcacctctaggtccccatactcctatgatctgagtcagagccatgtcttctccctggaatgagttgaggccactgtgttccttccgcttggagctattttccaggcttctgctggggcctgggacaactgctcccacctcctgacacccttctcccactctcctaggcattctggacctctgggttgggatcaggggtaggaatggaaaggatggagcatcaacagcagggtgggcttgtggggcctgggaggggcaatcctcaaatgcggggtgggggcagcacaggagggcggcctccttctgagctcctgtcccctgctacacctattatcccagctgcctagattcagggaaagtgggacagcttgtaggggaggggctcctttccataaatccttgatgattgacaacacccatttttccttttgccgaccccaagagttttgggagttgtagttaatcatcaagagaatttggggcttccaagttgttcgggccaaggacctgagacctgaagggttgactttacccatttgggtgggagtgttgagcatctgtccccctttagatctctgaagccacaaataggatgcttgggaagactcctagctgtcctttttcctctccacacagtgctcaaggccagcttatagtcatatatatcacccagacataaaggaaaagacacattttttaggaaatgtttttaataaaagaaaattacaaaaaaaaaattttaaagacccctaaccctttgtgtgctctccattctgctccttccccatcgttgcccccatttctgaggtgcactgggaggctccccttctatttggggcttgatgactttctttttgtagctggggctttgatgttccttccagtgtcatttctcatccacataccctgacctggccccctcagtgttgtcaccagatctgatttgtaacccactgagaggacagagagaaataagtgccctctcccaccctcttcctactggtctctctatgcctctctacagtctcgtctcttttaccctggcccctctcccttgggctctgatgaaaaattgctgactgtagctttggaagtttagctctgagaaccgtagatgatttcagttctaggaaaataaaacccgttgattactaaaaaaaaaa

SEQ ID NO: 253 - DNA, 3950 bp, Homo sapiens
ttttttttttttatttgaataaaagatttatttttttttctcaggaaaaacagaaagttagggaaacacactacatttgacaaccaacattaatttgtagttggtcctaacccttcctggcacagctatcaaaagtacagctgtttaaccagaaccaaggtgttcaccccccacagaatgtacatgaaacactagaggactgcatgtttttccctgagagaagcgtaagacaaacagaagtcaaaaagtagtcactgggagcgccatccttctaagcaaatcctccctttcccttttggaggatttgcccgaactacgtagccagtcagcacttagaccacctgcctcctcctccccctataaacccaccactcccctcctcctttcccaaaccacttggggtgtcctaagccctcactgccccaagcccaaaatatcaactaagatccttgtctgtatttccacagtcatacctaatgaattgggaagtggggcccctaaaaaccaattcacatctatgcacttgtttccactggatttggcagacaggcttttttagttaccgtaaccagatcttaagattaattaaaaactacataaagtgcttttaggtccttagagatacatgatataaataagcggcttatgatcaagaacgataaatacataggtaaaaatagctctagcaaagatgaccttatggctctgagatgggcaggcagggcaattcttccccattacattcttagtcatcttattcatacctatttttaaatggagtccacagactaaaggtcatgttccgagactgaagctttcaaatgaccctagttccaatatagacactttcttcagtttatcagtagcttttaaactctgaggtttaacacagctcacctctttctgtaaatttaagtgagcatactcctatacaaaggaaactttagagaaagcctcataaaatgttctttcctctgaaaattcctgaggggacttttgacacattgcccccaaagacaggataaaacaatagttgaaaagataccagtccaaggaaaagggacttcctcccacctctcaatgactgttagtgtcacagcacccatggtattaccacctgctaacaggatcaagttcgtgaaagatgaaaggtctgtggactcttggtggggagggagggtcactcaggtttccagcaggggtttcacagtgccaaaatctaaaagggctagaaagagttcagggatggcaggggaaagctgtaggaattgatataaatatctgtagagggagcagaacaatcagcaatttcaaggaaggacaggaaataaaaggttaagtctgatagaacaaacatcaagactgaaatccaaagatgccaatgcaaaaacttgcaacaaggtttgggaatcattaatagaaacaaaacagtaagtatttgctttattgacatactaggcttagacctgtgtgtgtaacaagcaagcctaataatagcaccatggttagactagcctgcttttccaagccatcattttataatttattaagcaaacaagggatcaaatgtctctccatccacctgatgtgatctttttatatgcacacagctaatgagttccattcagctgaaaatcttttagtaaaagctttaaagatgagcccatgaattcactttaaatttcaccagttaaattaggtcaaatggaaggaactcaaatgagtattgcccaatcagagcccattatttgtaagtcatcagtaaccttaaaactccacttagacctaattattgaaaacttgcatataatgaagtgaaagaatttccattcatcaacctctcaatcccaggttttcaaagaaaaacctatctaaggaatacttaccaaaatcagataagaaaatttaaacctgcatagttatcagatttgttccactacaaccagtctgcatacagttacacatcaattcgttctgtatacactctagaactgaacagaacaaagtttagcatagaaaagctgtaagaaacaggttcctaattacggaagttgcaaagttcaaaagggtatgaaaaaaactaatgtaaattcgatacttccttcgtttcaaagaaatagactttctgtaaaaatatatacaatttttacaaatacatttacaagctgtcttaagaattgaggatatccatattcataactaattactgagccttccgtcaagtattattggtgataaactaggctaataaagtaagaatcatggaaaccaagccaaagtataacaggtataaaagtcctgaacacttggactttctaagaagtatactgggaaagctaattagagagaggaaaagcttcccttgtacagtactgaggcttacagtcatagttctattacttgtaacttttacacaggtcactggcattcttagtgcttctcttaacactactacagtaaattaatgaattcggcgggtaatcaattctatgacttgcctggctactggccactttcctgttctcaacaaggaaattaagtctttccaccctaccatcttcactaaatctaaaagtcctcctccatagcttcccaaacaaagtttgtttgttgctgaaactgaactttgcttctttcagacagtgactcttcaatcaatggggagcactcttcccatgtatttattcttgttagccataatcctcttgccacttgcttttctggctaggttgctagggtgcaactctaggaagttacagcttggagtccaactgcataaactggttttggtggtggtggtggttggttaaaagtcaactattgcacttacagtaaggctatcttattagatatgccaaaccagctcctactccagcaacacctgcaaaagccagcagcacattcctgatgccaccttctaggtcctctacatggaagaactccacaaacccatcccagcctctttgtttaactagccagtcccgttttgtccttacgagaacgtctgtgatactttctgctaatggttcgatgcagctttcttggtttatggtcttcaagtgtttagccacaaaggcaccaaaagaaatgagagtcacaatcctgccccagtttgttacgccgtcgctgaaaacatggatcatcactcgagacaacgatttcacatcgtcttcgtttttgatgtccagtttccgaagcatgccttggaagaccgtctcgtggttgcgctgcacgccatccccaacccgtcgtaaggtctccagcgccttcctgctggtggccccagacctgcccattggctttgtgtccttggcgccggtggcctgctcccgaaggtaccgagagataatctccagcgactgccggtacaactcgtcctcctcctcctctgctggcggcggcgtcgagggtagtgacccgtccgtactggtgttattaccagattccccgaccaactccagcagcggcaggacagccggccgcttcccgagaggctccggctcgtacccgtccagctcctcttcgggcgacatgatggcgtcagcggccggggcttccatctcctcaagcggcgccgcgcggcgggtgggcgcgaagaaaagcagcctcgcgggggtcgcggtgacgtcggggacctcggcgccaatgggcggcggccgcgcgaccctccgggagtctggcgtgagggtggacggggggcttgcgccggcgcttccgccaatcaccgcgccggcctcccctccccctatctctcgccgggccgaggcctccttctccgtagccaaaagtcgccctcccgggcgggtggcgccgccgctgccggcccccaagccggcccccccacagtagaggttgagtccgattaccgcgtttcttttgaggccaaacattgccagtcgccgccgccgcctggctgagaaaactggggaagaccccgactccttactgga

SEQ ID NO: 254 - DNA, 3920 bp, Homo sapiens
gtggggtggggtggggctgggggcttgtcgccctttcaggctccaccctttgcggagattataaatagtcatgatcccagcgagacccagagatgcctgtaatggtgagactttggatccttcctgaggacgtggagaaaactttctgctgagaaggacattttgaaggttttgttggctgaaaaagctgtttctggaatcacccctagatctttcttgaagacttgaattagattacagcgatggggacacagaaggtcaccccagctctgatatttgccatcacagttgctacaatcggctctttccaatttggctacaacactggggtcatcaatgctcctgagaagatcataaaggaatttatcaataaaactttgacggacaagggaaatgccccaccctctgaggtgctgctcacgtctctctggtccttgtctgtggccatattttccgtcgggggtatgatcggctccttttccgtcggactcttcgtcaaccgctttggcaggcgcaattcaatgctgattgtcaacctgttggctgtcactggtggctgctttatgggactgtgtaaagtagctaagtcggttgaaatgctgatcctgggtcgcttggttattggcctcttctgcggactctgcacaggttttgtgcccatgtacattggagagatctcgcctactgccctgcggggtgcctttggcactctcaaccagctgggcatcgttgttggaattctggtggcccagatctttggtctggaattcatccttgggtctgaagagctatggccgctgctactgggttttaccatccttcctgctatcctacaaagtgcagcccttccattttgccctgaaagtcccagatttttgctcattaacagaaaagaagaggagaatgctaagcagatcctccagcggttgtggggcacccaggatgtatcccaagacatccaggagatgaaagatgagagtgcaaggatgtcacaagaaaagcaagtcaccgtgctagagctctttagagtgtccagctaccgacagcccatcatcatttccattgtgctccagctctctcagcagctctctgggatcaatgctgtgttctattactcaacaggaatcttcaaggatgcaggtgttcaagagcccatctatgccaccatcggcgcgggtgtggttaatactatcttcactgtagtttctctatttctggtggaaagggcaggaagaaggactctgcatatgataggccttggagggatggctttttgttccacgctcatgactgtttctttgttattaaaggataactataatgggatgagctttgtctgtattggggctatcttggtctttgtagccttctttgaaattggaccaggccccattccctggtttattgtggccgaactcttcagccagggcccccgcccagctgcgatggcagtggccggctgctccaactggacctccaacttcctagtcggattgctcttcccctccgctgctcactatttaggagcctacgtttttattatcttcaccggcttcctcattaccttcttggcttttaccttcttcaaagtccctgagacccgtggcaggacttttgaggatatcacacgggcctttgaagggcaggcacacggtgcagatagatctggaaaggacggcgtcatggagatgaacagcatcgagcctgctaaggagaccaccaccaatgtctaagtcgtgcctccttccacctccctcccggcatgggaaagccacctctccctcaacaagggagagacctcatcaggatgaacccaggacgcttctgaatgctgctacttaattcctttctcatcccacgcactccatgagcaccccaaggctgcggtttgttggatcttcaatggctttttaaattttatttcctggacatcctcttctgcttaggagagaccgagtgaacctaccttcatttcaggagggattggccgcttggcacatgacaactttgccagcttttcctcccttgggttctgatattgccgcactaggggatataggagaggaaaagtaaggtgcagttcccccaacctcagacttaccaggaagcagatacatatgagtgtggaagccggagggtgtttatgtaagagcaccttcctcacttccatacagctctacgtggcaaattaacttgagttttatttattttatcctctggtttaattacataatttttttttttttactttaagtttcaggatacatgtgccgaatgtgcaggtttgttacataggtatatatatgccatgatggaaatatttatttttttaagcgtaattttgccaaataataaaaacagaaggaaattgagattagagggaggtgtttaaagagaggttatagagtagaagatttgatgctggagaggttaaggtgcaataagaatttagggagaaatgttgttcattattggagggtaaatgatgtggtgcctgaggtctgtacgttacctcttaacaatttctgtccttcagatggaaactctttaacttctcgtaaaagtcatatacctatataataaagctactgatttccttggagcttttttctttaagataatagtttacatgtagtagtacttgaaatctaggattattaactaatatgggcattgtagttaatgatggttgatgggttctaattttggatggagtccagggaagagaaagtgatttctagaaagcctgttcccctcactggatgaaataactccttcttgtagtagtctcattacttttgaagtaatcccgccacctatctcgtgggagagccatccaaataagaaacctaaaataattggttcttggtagagattcattatttttccactttgttctttaggagattttaggtgttgattttctgttgtattttaactcatacctttaaaggaattccccaaagaatgtttatagcaaacttggaatttgtaacctcagctctgggagaggatttttttctgagcgattattatctaaagtgtgttgttgctttaggctcacggcacgcttgcgtatgtctgttaccatgtcactgtggtcctatgccgaatgccctcaggggacttgaatctttccaataaaccaggtttagacagtatgagtcaatgtgcagtgtagcccacacttgagaggatgaatgtatgtgcactgtcactttgctctgggtggaagtacgttattgttgacttattttctctgtgtttgttcctacagcccctttttcatatgttgctcagctctccctttcccttcttggtgcttacacatctcagaccctttagccaaacccttgtcagtgacagtattttggttcttagttctcactgttccctctgctcctggagcctttgaataaaaatgccacgtagctgaggccggatgcggtggctcacgccctgtaatccccagcactttggggaggcctaggcgggcggtcaggggttcgagaccagtctggccaacatcgtgaaaccctgtctctactaaaaatgcaaaaattagccgggcgtggtggcgggcgcctgtaatcccagctacttgggaagctgaggcgggagaatcatgtgaacccgggacgcaggggttgcagtgagcggagatcgcatcattgcactctagcctgggccacagggcgagactccgtctcaaaaaaaaaaaaatgcacatagctatcgagtgtgctttagcttgaaaaggtgaccttgcaacttcatgtcaactttctggctcctcaaacagtaggttggcagtaaggcagggtcccatttctcactgagaagattgtgaatatttccatatggattttctattgttactctggttctttgttttaaaataaaaattctgaatgtacacg

SEQ ID NO: 255 - DNA, 3893 bp, Homo sapiens
atagttttcaggttaagaaagccagaatctttgttcagccacactgactgaacagacttttagtggggttacctggctaacagcagcagcggcaacggcagcagcagcagcagcagcagcagcagcagcagcagggctcctgggataactcaggcatagttcaacactatgggtcctcctctgaagctcttcaaaaaccagaaataccaggaactgaagcaggaatgcatcaaagacagcagacttttctgtgatccaacatttctgcctgagaatgattctcttttctacaaccgactgcttcctggaaaggtggtgtggaaacgtccccaggacatctgtgatgacccccatctgattgtgggcaacattagcaaccaccagctgacccaagggagactggggcacaagccaatggtttctgcattttcctgtttggctgttcaggagtctcattggacaaagacaattcccaaccataaggaacaggaatgggaccctcaaaaaacagaaaaatacgctgggatatttcactttcgtttctggcattttggagaatggactgaagtggtgattgatgacttgttgcccaccattaacggagatctggtcttctctttctccacttccatgaatgagttttggaatgctctgctggaaaaagcttatgcaaagctgctaggctgttatgaggccctggatggtttgaccatcactgatattattgtggacttcacgggcacattggctgaaactgttgacatgcagaaaggaagatacactgagcttgttgaggagaagtacaagctattcggagaactgtacaaaacatttaccaaaggtggtctgatctgctgttccattgagtctcccaatcaggaggagcaagaagttgaaactgattggggtctgctgaagggccatacctataccatgactgatattcgcaaaattcgtcttggagagagacttgtggaagtcttcagtgctgagaaggtgtatatggttcgcctgagaaaccccttgggaagacaggaatggagtggcccctggagtgaaatttctgaagagtggcagcaactgactgcatcagatcgcaagaacctggggcttgttatgtctgatgatggagagttttggatgagcttggaggacttttgccgcaactttcacaaactgaatgtctgccgcaatgtgaacaaccctatttttggccgaaaggagctggaatcggtgttgggatgctggactgtggatgatgatcccctgatgaaccgctcaggaggctgctataacaaccgtgataccttcctgcagaatccccagtacatcttcactgtgcctgaggatgggcacaaggtcattatgtcactgcagcagaaggacctgcgcacttaccgccgaatgggaagacctgacaattacatcattggctttgagctcttcaaggtggagatgaaccgcaaattccgcctccaccacctctacatccaggagcgtgctgggacttccacctatattgacacccgcacagtgtttctgagcaagtacctgaagaagggcaactatgtgcttgtcccaaccatgttccagcatggtcgcaccagcgagtttctcctgagaatcttctctgaagtgcctgtccagctcagggaactgactctggacatgcccaaaatgtcctgctggaacctggctcgtggctacccgaaagtagttactcagatcactgttcacagtgctgaggacctggagaagaagtatgccaatgaaactgtaaacccatatttggtcatcaaatgtggaaaggaggaagtccgttctcctgtccagaagaatacagttcatgccatttttgacacccaggccattttctacagaaggaccactgacattcctattatagtacaggtctggaacagccgaaaattctgtgatcagttcttggggcaggttactctggatgctgaccccagcgactgccgtgatctgaagtctctgtacctgcgtaagaagggtggtccaactgccaaagtcaagcaaggccacatcagcttcaaggttatttccagcgatgatctcactgagctctaaatctgcaatcccagagaatcctgacaaagcgtgccacccttttattttccgtcaggtgccaggtcttagttaagattcacaatctttagaaagaatgagattcacaataattaactcttcctctcttctgataaattccccatacctcccaatccaagtagcatctgtagctacataacctatatacctccagcagctggacatggggaggcgacagtcctatctagacatcatacacatttgccaagaaaggatctctggggcttccgggggtgagattcaagcaggacaataacaagaggctggacaccctacagatgtctttgatgttttcagttgtttgatatatctcccctgtagggcatgttgaggaaggaggagggctgatcaaggccaagctggtctagcctgacatcctagctcctgactgaacactatagacttcccagcagcatttcacccagcagccagagccggctttaagtccccaacccttacagacaccactgccaccaccaccaaccacgaccaccaccaccaccaccactcaccaccatcatcacctccggaaagtgtagtcctgccctaacccaagtcacccccgacagtaaattttaccttcatgttgagaaagcttcctggtgcttaatcaagagctggagttcaatgagtcctagacagtgagaggggcctgagcttcagctcaatggaagcctgctgtgtgccacaagacggaaaagtggaagaagctgcagtgggagacaaagcctcggtcccccacccatccacacacacctacactcacacacgcgcacatgggcgcgcacgaactaccattcaggcagtcagtgggcaagaggaaagataagtaagtaccatacacacctaaaagatgagagaattcatccagacatattacagccagtttggggcccctgactgcaatgtgaaacctctcgctgctgctaggtttacaaacaagcccattgtcctgtgcctcctaatatcatttgtactgaagaccccatctggggacttgagactttggtcccagcccagactcctcagacttttctctcagttgggatgcttcactcgctgggggtgtttgtttgccctctcatttttcagtacttctacagaattttctctagagtcagtcattatgaaatgtacttccctccatcttaacctatcaactttctgcccctccttcaaggcccagtataaatgccacctcctccatgaagccttccctaattccaccccaaacccccaccttcaacaatatttcaacgcttctgcaatgatgaaaaagaaacatagttgtagtacttagcctacctagaccagcaagcattcatttttagctcgctcattttttaccatgttttccagtctgtttaacttctgcagtgccttcactacactgccttacataaaccaaatcacaataaagttcatattcagtacattgcaaaaaaaaaaggaagaaaaaaaaaaacatttgtccgcgccgcattagagcccccgagacaggttgtaaaacacacgcgtgtgtgaccgggggcccatgtgagcgagtaaggtggaccacctgtggggcaaagcagggacgtcccacaaggagaaaacggggggccaagaaaacacggcgctggagatctccaccaagtaaaagaaacgcccgcgtggtgacaccaggcgcgtgttgtgaaccaaactccaaaagggagtatcgagagggacaaacaggggatcattaacagagggaccaagggaggcgcgcaatacaattg

SEQ ID NO: 256 - DNA, 2706 bp, Homo sapiens
ttttttttttttcaatagccaaaatagttatttattaataatttaaggttttacattcttataataaattccagctctaaactttacaccacgaacataatggagaatttaactctcccttcttcacaatcaaatgcatttctcttatcaaatgggtacccatgctcacacacacacacttccagttttatacaaatttttttaaaggaaagaaaccaacccaaagtattgcatttgaggtgacactccctgaagaattttatacagaggtaatatactgtttagcacagctgaaggtttttttattctttctttttttaaagtgagcccatgatttggtgtctttcccagattatcccctttgcgacaacacaagcaaaaatatttacaaaggtaaggcatagtcaaactacataaagagaaaaaatcatgaggaaaatacatgaaaaagactaaagacttcgccataacaaggtcttagtgataatagtgtccgtaaagatgtcatcagaattggtaaagtcaagcatgctgcaaatataccctttggattagaaaagagcacaattttctttttttgttttgttctgttttaagaagtggcatactgctctttctccctttggataatttcttttaagcccatcaaaggaaaaaacaaacacaattcaaacaaacactgtcaagtgattcaagatcaaatatttacaataatcaaatggagtatcagatttttttttccaaactgataccacaaatacagagctgaaatctctctttggctcctctatatgcaaaattgaattagtcttcattgaagacaattatatagtcagttccagatgcaaaaggaaacagccttacaaggccctaaagaacacatgctcctaccctatcatttggttctaccctatgcgcctggaagtcctcgaatcccagtccctgcatgggtaggctgtacacatgggtacagagcaaacctactgcctgtatctatacagcatgtcctgttattccaaagagaatggagcaaatctctctgttagtattaaccaattccgcacttggtaaccttgtctagtacagacagctggtgtcattttgacacctggggccacacacaaagaaagcagcccagctgatgctgccaagagaaactgctgaagggccagacacattccagcaaggaggggtgtggggtctttcacgtagattgcagagagtccacctggtatacattctggttggaaggggtggtaaaatacagctgctgtgctggaaccctgttgtcacatgggctgctgagtcccagcgtcctctcgaagtccagcagctgacccatgaagttgaagttaggggatatgttggattttttcattttgacaatgtcataggcatcgttcatcgacagattgagcttctgcataaggtaagccacagtcacagtgactgagcggctaatgccagccaagcaatgtaccaagacaccacagttcttgccccgggcttcatctatgaaagaaatggcctcagggaaaaactgggacaggttttggctccagtgatccgagatggggatttgcttgtatttaaactctcctgcgttctcaaagagattcggcaaattgggggtgacgttcaagatgtacttgatgccgaattcctccaacacgtccaagttggtggagtctttggcacagcccaagtagaggaagggcaagatctccactgggaaggaaggctggctgttggacagcggactaccatccgagtctgttgcactattggggtctcggtcaaggtcagactcgatgtccgaggaagagtcagagctgatccgcaggcccccgagccccagcactggcaacggcggcgagctgctgctacacgagccgtctagattggtctcgcaatgcagggagaactcggcttggaacttactgaagccaccttccaggtagaacgcccggcagccctcgtccttgagcttcttgagcagcagcccgagcaacgactcgccgcccgtattctcgttccagtcgctgctgctctcgtcgtagagcaccactgtgtcggtgccacagcgccgggtgaagcggtcccggtcctcgccgcgcgtgaagagcgcgcgcaccggcaggttacccttctgcaggcgccgcagcatgatgcccgggatggccacgttgatggccgactcgatgtgcgacgactcgtatagctcctgcggccggcagtccatcagcagcagccgctcgttgcccagctccagctgctcgttgagccacgccaccgtcttgctgatcgccatttccgacgcgaagggcacgggtctgagcgtatctatcatgggggtcgagctgcgggagagggcggggtgcctaccagacgcccctcggggcaggcataggccgagcgcaccgcgcgcgaagctgccgctctcggagcggggtttaattccgcctcgccttacccaagccgaggctagcggccttggggcagacgagacagaagtcaaagccggaggttctctctgcacccagctgcagccgctggctcttagtgtcaatgaatctctctcaatgaagctgcccagatagtttttgttcctccccagtgaatgaaatccaattaattcggactccgtgctactgagaggggaggaaaaaaagtctagcggcttctaatccctccctccgaggctgg

SEQ ID NO: 257 - DNA, 4928 bp, Homo sapiens
cggcgcccgcgggctgggagccggggcccgcaggtggaagcgcacccgggaggcgggccggccggggctggagcggctcgggcgggctcttgacgctcagccagcttcgctccggcctcgggaaggcgcgcgtcccgccctgacccgccggcctctcccaccccagcagtgacgcgccgcctgggagctggagcccgcgcagcgccccgcagggcgatggacggccgaaccccgcgcccgcaggacgccccagccaggagaaaaccaaaagccaaggcaccacttcctccagctgagaccaaatatactgatgtctcttcagctgctgattctgtagaatccactgctttcatcatggaacagaaagaaaacatgatagataaagacgttgaactctcagtggtcctacctggggatattatcaaatctactactgttcatggcagtaaacctatgatggacttgttgatattcctttgtgcacagtatcacttaaatccatcaagttacacaatcgatctgttgtcagctgaacagaaccacattaaatttaagccaaacacaccaataggaatgttggaggtagagaaggtaattttaaagccaaaaatgttggataagaaaaaacctacacctataataccagagaaaactgtgagagtagtgattaattttaagaaaacacagaagaccatagtgagagtgagtccacatgcatcgcttcaagagcttgcccctattatatgtagcaaatgtgagtttgatccgttgcatacactattgttgaaagattatcaatcgcaggagcctcttgacttgacaaaatctcttaatgacctgggactaagagaattatatgcgatggatgtcaacagagagtcctgccaaatatcacaaaacctagatattatgaaggagaaagaaaataaagggtttttcagtttttttcaacgcagtaagaaaaagcgagaccaaactgcaagtgcccctgcaacccctctagtaaataagcaccgcccaacttttacaaggtccaataccatttccaaaccatatatttccaacaccctgccgtcggatgcacccaagaagaggcgggctccactgcccccgatgccagcatctcagagtgtcccccaagaccttgcacacatccaggagaggcctgcttcttgtatagtgaaatccatgagcgtggatgagacagataagagtccctgtgaagcaggaagagtgagggcaggttcactgcagctcagcagcatgtctgcagggaattcatctttgagaaggacaaagcgaaaagcaccttccccaccctccaaaatacccccgcatcaaagtgatgaaaatagtcgtgtgactgccttacagccagtagatggagttcctccagacagtgcttcagaagcaaactctcctgaggagctatccagcccagaaacctttcaccctgggctttccagtcaggagcagtgcactgcgcccaaactgatggaggaaacctctgtctttgagtgccctgggacacctgaggcagccataacatcattgacatctggaataagctctgattatagccttgaagagatagatgaaaaggaagaactgagtgaagtgcctaaagttgaagctgaaaatatttctccgaagtcacaagatattccttttgtatctactgatataataaatacactgaaaaatgatcctgactcagcccttggcaatggtagtggagagttctcacaaaactccatggaagaaaaacaagaaactaaaagcacagatggacaagaaccacacagtgtagtatatgatacaagcaatggaaagaaggtagttgacagtataagaaacttgaagtcgttgggcccaaaccaagagaatgttcaaaatgaaataattgtctatccagagaacacagaagacaatatgaaaaatggagtgaagaaaacagaaatcaatgtagaaggtgttgccaaaaataacaacattgatatggaagttgagagaccatcaaactctgaggcacatgaaactgatactgctataagttacaaggaaaaccatctagcagcttcatcagtaccagatcaaaaactgaatcaacccagtgcagaaaagacaaaagatgcagcaattcagacaaccccttcttgtaacagttttgatgggaaacaccaagatcataatttatctgactccaaagttgaagaatgtgtgcaaacttcaaataacaacatatcaactcaacactcatgcttaagttcacaagattctgtaaatacctcaagggaattcaggagtcaaggcaccctaattatacattcagaagatccgcttaccgtaaaagatccaatttgtgcacatggtaatgatgatcttttgcctcctgtagataggattgacaaaaattccactgcttcttacctaaagaattacccactttatagacaggactacaatcccaagccaaaaccttcaaatgaaattacacgagagtatatacccaaaattggcatgactacttataaaatagtgcctcccaaatccttggaaatatcgaaagactggcaatcagaaaccatagagtataaagatgatcaggacatgcatgctttagggaaaaagcacactcatgagaatgtgaaagaaactgccatccaaacagaagattctgctatttctgaaagcccagaagagccactgccaaaccttaaaccgaagcctaacctgagaacagagcatcaagtgcccagttctgtgagctcacctgatgatgccatggttagtcctctgaaacctgctcccaaaatgacaagagacactggcacagctccttttgcaccaaatttggaagaaataaacaatattttggaatcaaaatttaaatctcgggcttcaaatgcccaggccaaacccagctctttttttttgcagatgcagaagagagtatcgggtcactatgtgacatctgcagctgccaagagtgtccatgctgcccctaatcctgctccaaaagaactgacaaataaagaggcagaaagggatatgctgccttctccggagcagactctttctcccttaagtaaaatgcctcactctgttccacaaccccttgttgaaaaaactgatgatgatgtcatcggtcaggctcctgctgaagcctcccctcctcccatagctccaaaacctgtgacaattcctgctagtcaggtatccacacaaaatctgaagactttgaaaacttttggtgccccacgaccatactcaagttctggtccttcaccgtttgctcttgctgtagtgaaaaggtcacagtctttcagtaaagagcgcaccgagtcacctagtgccagtgcattggtccaacctccagccaacacagaggaagggaagactcattctgtaaataaatttgtggacatcccacagcttggtgtgtctgataaggaaaataactctgcacataatgaacagaattcccaaataccaactccaactgatggcccatcattcactgttatgagacaaagttctttaacattccaaagctctgacccagaacagatgcgacagagtttgctgactgcaatccgttcgggagaggctgctgccaaattgaaaagggttaccattccatcaaatacaatatctgtgaatggaaggtcaagactcagccattccatgtcccctgatgcccaggacggccattaaatgttaccctgccacaccactgcacttcacttccacttcagaccaacttcatactaatggaacattttggcaaatgtatattcagatgtacactaatatattatctattaaaatattagaatttgtgttgtggcttttaatgccagaagaaaagttaccagaatttataatttatagtaattttttgatcttttttttgccttaagagttgaatatgctgctttagaactttaaaacaaggtgtaaatgattttcattttttacaaatgaaaaataattcctttgtattgatttcacttaccagcacattctctacaatggtgacttagacaaaagtataagattcatagactttatatttgtatgacatacaactaggacaaacatagatatgacatttgctgcctcagtgtagcaattggaaatatttataagttatatgaaagcctgttttgggctgaaagaatgatttagaaaactagtgataccaaataagtatattcagttcaataattattttcaatgatgaatcacttagtgtgaaagacttgccttgtgtattctttatgtaattacaaatcactgtcaattttatgggaagctcatagtattttaatattttattaacatggaactcttgtttttttaatctttagaacttaaattctacaagaattttaaatattttctgtatataattatgacattgtcacacagaaattacacattttatgtgccagaagccttaaacatctttctgtgaaaatgctgatatattgtgacagttatttcacatttgatatgtagagaggaataggggttagtttatgtttatattgaaaaactttaaagactatttggaagttccagaaattctggttttaattcaagtaaaatgataaaatagtcattatatagttcagatgctaatattctaagtaataatatatatttacattgaagctaaaactgttaagcaaaacaatgcccatttgtcggcttacagctcttccggagtctagagcctgttggtgttctgtccctactttaagaatttaattgctcacttattctgaaagctttgttcaaacaagatgatattaaatttgttttcactaaaactactgggatatctgcctcttggggatttttttttcaatttaataaaagcaagttgtatatttggggtgctttttaaaataaaaaaaaaa

SEQ ID NO: 258 - DNA, 3848 bp, Homo sapiens
gcataagtttttttttcttaaaaaaacggcatctgcttaaagggatttatgactaaaattgcttatttttctacagagttgtctgctggttctcagcttgaagaagattctgcagtccttattgatcctttttcttggcgttaccattttttgaagcaaagttaacctagctttctagtttgagctttctttttggccgtctttaaaaaaaattttttttttaatctataaaatagacaagagctagttctacaatgtccaagtcattccagcagtcatctctcagtagggactcacagggtcatgggcgtgacctgtctgcggcaggaataggccttcttgctgctgctacccagtctttaagtatgccagcatctcttggaaggatgaaccagggtactgcacgccttgctagtttaatgaatcttggaatgagttcttcattgaatcaacaaggagctcatagtgcactgtcttctgctagtacttcttcccataatttgcagtctatatttaacattggaagtagaggtccactccctttatcttctcaacaccgtggagatgcagaccaggccagtaacattttggccagctttggtctgtctgctagagacttagatgaactgagtcgttatccagaggacaagattactcctgagaatttgccccaaatccttctacagcttaaaaggaggagaactgaagaaggccctaccttgagttatggtagagatggcagatctgctacacgggagccaccatacagagtacctagggatgattgggaagaaaaaaggcactttagaagagatagttttgatgatcgtggtcctagtctcaacccagtgcttgattatgaccatggaagtcgttctcaagaatctggttattatgacagaatggattatgaagatgacagattaagagatggagaaaggtgtagggatgattctttttttggtgagacctcgcataactatcataaatttgacagtgagtatgagagaatgggacgtggtcctggccccttacaagagagatctctctttgagaaaaagagaggcgctcctccaagtagcaatattgaagacttccatggactcttaccgaagggttatccccatctgtgctctatatgtgatttgccagttcattctaataaggagtggagtcaacatatcaatggagcaagtcacagtcgtcgatgccagcttcttcttgaaatctacccagaatggaatcctgacaatgatacaggacacacaatgggtgatccattcatgttgcagcagtctacaaatccagcaccaggaattctgggacctccacctccctcatttcatcttgggggaccagcagttggaccaagaggaaatctgggtgctggaaatggaaacctgcaaggacctagacacatgcagaaaggcagagtggaaactagcagagttgttcacatcatggattttcaacgagggaaaaacttgagataccagctattacagctggtagaaccatttggagtcatttcaaatcatctgattctaaataaaattaatgaggcatttattgaaatggcaaccacagaggatgctcaggccgcagtggattattacacaaccacaccagcgttagtatttggcaagccagtgagagttcatttatcccagaagtataaaagaataaagaaacctgaaggaaagccagatcagaagtttgatcaaaagcaagagcttggacgtgtgatacatctcagcaatttgccgcattctggctattctgatagtgctgttctcaagcttgctgagccttatgggaaaataaagaattacatattgatgaggatgaaaagtcaggcttttattgagatggagacaagagaagatgcaatggcaatggttgaccattgtttgaaaaaagccctttggtttcaggggagatgtgtgaaggttgacctgtctgagaaatataaaaaactggttctgaggattccaaacagaggcattgatttactgaaaaaagataaatcccgaaaaagatcttactctccagatggcaaagaatctccaagtgataagaaatccaaaactgatggttcccagaagactgagagttcaaccgaaggtaaagaacaagaagagaagtccggtgaagatggtgagaaagacacaaaggatgaccagacagagcaggaacctaatatgcttcttgaatctgaagatgagctacttgtagatgaagaagaagcagcagcactgctagaaagtggcagttcagtgggagacgagaccgatcttgctaatttaggtgatgtggcttctgatgggaaaaaggaaccatcagataaagctgtgaaaaaagatggaagtgcttcagcagcagcaaagaaaaagcttaaaaaggtggacaagatcgaggaacttgatcaagaaaacgaagcagcgttggaaaatggaattaaaaatgaggaaaacacagaaccaggtgctgaatcttctgagaacgctgatgatcccaacaaagatacaagtgaaaacgcagatggtcaaagtgatgagaacaaggacgactatacaatcccagatgagtatagaattggaccatatcagcccaatgttcctgttggtatagactatgtgatacctaaaacagggttttactgtaagctgtgttcactcttttatacaaatgaagaagttgcaaagaatactcattgcagcagccttcctcattatcagaaattaaagaaatttctgaataaattggcagaagaacgcagacagaagaaggaaacttaagatgtgcaaggagatttaatgatttcaaagaaaataatggttctttgtttttaatgttaaccttttttaaatacaatactgatagttagaagaaaactattgtactcttttgttttagtggagaaataatagatgtctgttcatgtgttaagtgttatagcaaaaaaaatacacatatggttaagttaatgaatagtttttgttttatcagaatggcaacagacagaagtactttgtagagattgacttcctaagctacttaagacaacttgcaccactaagaaaaaaatgtagaaccatttggaaaaatgaaatttagtagttccaagtttcaaagaaatgtcaacattttattccattcaataaagaacaaaaccaatagtgtttttattactttcatctgaaacattccatgttttaatctgagccttgcagactttcatttggagtttgaacccgttttggttgcatttcatttttggagaacttaattaacgtgagattggcaattgaaatgcaggtgcagttttctgttaatgtcatgctgttgtttaggtaataagaaatattaagtaattggctttagattttgtaatttttttccctgagttcctgctagatttcgtattctagtagtcaatgtattttcagtgaaatgcaaaaatattcccattatctttgaccagtattaatttttgagatcttactgcttgtcacttgaatcccgtgattgtcatacatctctggtataagcaacatttgatttttgaagtgtgtagaccatctcttcatattttcaagatgtaattttacatttctgcatttttaaaacagtttggccataatcctagatgcacgcttctaattcatgtacctgcacatgtgacctttgtgaacagaaatttgcatgtataatttgtgtttacttgtaactttctggttatatactgcttatatctgtggattcaagttactgaagtgaataccaataaaaagaaaaccctaggccatgttaattggttatacatgtttggaatgttaaaaaaaaaa

SEQ ID NO: 259 - DNA, 1321 bp, Homo sapiens
ttttttttttttctaattactaccttttattctaatgtgaaccatggccctgaaagctgataacaagcttggctgagcagagggaactaggggtcggcagaaaggattatgggtggaaaacattggctcttccttggggagtgatgctggggaaagggaagagagtggctcagcctgcaggtaaataggctagaaaagccaaggccaaaggctggaggggagaggacagtcagcatgtccagcctggggtctgggtgtagggttatcccttctccctgtgccttcccatctcgtccatgagcctaggtcttggagccttgtgttggaggctgctgtgatgtcaggaacggggatctgtctagcttttggccacttcctgggacctcacgcccctgttgacagatggagattgggcagcagggccttgctgcattgttatctgctgttccgacttggtttgtcttgtccaagggtgacgaaagagccaggcaccagggtctcatgggatgaggtacagggtgggagatgggggaggggctgggggctgaagggagcaagaaagctgtagctgtgtggggctggcaggatgttgaagaccgcctctgctgctctcacatggggactgggcccagatcctgcttggtcacacccagcccagaagacgggtcctccagttccagtgactctttcggtggagcgtcagtgggcttttgctccaaggagtgcctgctcatttcaaacaggagccaatggtgcatccagctctcaaagaccttccagtctatggtctccatggtgttcttaaggtgtctcaggttctccgggaagctccccttcagtggcgggtacaccttcagggggtcagcattctggagcaggtgcatcacatggtcctctgtcatgttgccatacttggtggcattctgcatgggcccctggggcagggctcccatgggcagcgcctgcatcagcagcggggtggccatgcgcatcttgctcacaggcttgggaggcttgggaagcttcatgcgcaggttctccagctgcaggttctgggaggtgactgtcagtttgtccagccggccctgctgctggtacaggaagtaggcggtggtggcctggccagcgaggagcagagtcaccaggatggaaaagcctgtgtacagggctccgcggctgcacttgctctccggggccccagggcgccggcccagcatgggcagttgctcattgttggagataaggtcgcgctggtcatccatgactggcttctgatcttcccgacagctcctgcttctcctcctgtgcatctgggaccctg

SEQ ID NO: 260 - DNA, 3150 bp, Homo sapiens
gggacagcttagggactatcgtcctgggactagggggaagttcgcgactttctgaagactggcaggaatgtgcctcctggccctcgatgcttcccccctgaggggaggcatcgtgagggactgtggcaggcttcactgaacgctgagccggggaggtccaactccacgtatggatccggggaatgagaattcagccacagaaggccgccgcgatcatagacctagatcccgacttcgaaccccagagccgtccccgctcctgcacctggccccttccccgaccagagatcgctaaccagccgtccgagccgcccgaggtggagccagatctgggggaaaaggtacacacggaggggcgctcagagccgatcctgttgccctctcggctctcagagccggccgggggcccccagcccggaatcctgggggctgtaacaggtcctcggaagggaggctcccgccggaatgcctggggaaatcagtcatatgcagaattcatcagccaggccattgaaagcgccccggagaagcgactgacacttgcccagatttacgagtggatggtccgtactgtaccctacttcaaggacaagggtgacagcaacagctcagcaggatggaagaactcgatccgccacaacctgtccctgcacagcaagttcatcaaggttcacaacgaggccaccggcaaaagctcttggtggatgctgaaccctgagggaggcaagagcggcaaagccccccgccgccgggccgcctccatggatagcagcagcaagctgctccggggccgcagtaaagcccccaagaagaaaccatctgtgctgccagctccacccgaaggtgccactccaacgagccctgtcggccactttgccaagtggtcaggcagcccttgctctcgaaaccgtgaagaagccgatatgtggaccaccttccgtccacgaagcagttcaaatgccagcagtgtcagcacccggctgtcccccttgaggccagagtctgaggtgctggcggaggaaataccagcttcagtcagcagttatgcagggggtgtccctcccaccctcaatgaaggtctagagctgttagatgggctcaatctcacctcttcccattccctgctatctcggagtggtctctctggcttctctttgcagcatcctggggttaccggccccttacacacctacagcagctcccttttcagcccagcagaggggcccctgtcagcaggagaagggtgcttctccagctcccaggctctggaggccctgctcacctctgatacgccaccaccccctgctgacgtcctcatgacccaggtagatcccattctgtcccaggctccgactcttctgttgctgggggggcttccttcctccagtaagctggccacgggcgtcggcctgtgtcccaagcccctagaggctcgaggccccagcagtctggttcccaccctttctatgatagcaccacctccagtcatggcaagtgcccccatccccaaggctctggggactcctgtgctcacaccccctactgaagctgcaagccaagacagaatgcctcaggatctagatcttgatatgtatatggagaacctggagtgtgacatggataacatcatcagtgacctcatggatgagggcgagggactggacttcaactttgagccagatccctgagtcatgcctggaagctttgtcccctgcttcagatgtggagccaggcgtgttcatatctactctttacccttgagccctccccaggaatttgggaccctgctttagagctagggtggggtctggtcacacacaggtgttgaagaaattataaagataaagctgccccatctggggacgatatggggagggagatgggaggggaaaggggagagggtttttctcactgtgccaattagggggtaaggccccctctcaggagccatcatcggctttccccattcctacccacttaggctttgtagcaagatgagcaatgctgttggaaatgtgaagtcaccagtggccttacccctgcctttgggagcaggatttttttgtagagagtcttatctgagctgagccaggctagctggagcctgggatttctatgcagtggccccttaggccagtgatgtgcggtgggtgggctgtttaggggatctggaagggccaaggtctgagcactggagtggctcgccaggccaaatcacccttagaaggctgcagataacagaaaggctttttataaacttttaaagaaatataaacacaaatatagagattttttaaccatggcagggtgctagtggtgggcagaatgcttttttttctttctgaaggctttgtgatagtgacatgatacaaacactacagacaataaatattaggagacacagggaagtggggagaggtggggagtaatagtaaacacagggaagagctcccctacggaccaggtatagagaaaggtctatgcagaaataggttagagtttccctaacaaaaaagctaacccaggtcccctcattccttcaacttgtgcctgggagtgtgtggtgttagggtgcagccacactcttctatgacccagcatgggttagtgctatggtgggagagtacattgaaggcctggaattagcttggggccagggaagggactgggaggggagagaagagaaggagggaaggatttaggatggtaaagttaggtacagagacctccctgttcaaggcccctgacagctgtccctgcccttcttccccttccctgactgcaggggttatgtggaagtgtgtgtggcagcaggcagcggggaggggaggaacagggaagggggagctggggagcttggctgagggtctgggaaatgagcagggatggggggggatgtggatcaggtttactagcacctgccagggaggccatctggggctccttctccaccccagcccccaaagcagcccttcccccagtgccctttgcatcgtcccctcccccacccctgctgtgggttcccatcatttcctgtgtcagcgcctggcctacccagattgtatcatgtgctagattggagtggggaagtgtgtcaaatcaataaatgaataaattcaataaatgcctataaccagcagaaaaaaaaaa

SEQ ID NO: 261 - DNA, 2805 bp, Homo sapiens
aaagtcgtttaatcttagagccacaacgcctttgagttaagtgatttgctcaaaggctaaatggaaatagtaccacttatttcgagtagggctgggattcaaaggaggtacagctcttgaactagagttttctgtctccattggtgataagccttgtttagagatgaccaaagactggcactctttttcatcaaaagcagctagttttagcttctcgtgccctcagagctcgccctcctgcagtttgaaggaagtttccaaataatcttatttagaaagaatagcatttacactggccagttaggatatcttgggacacaccagagtagcaacatgaaacacccacttctgggggaaaaaaaagtgttataatttgaaataaaaaaaaaatacaagtcttgggaaattagagaccaaagtgatagaaatctggagggacttttcacaaatgccgacttctggtttgtgcctttcccatattttattaaattcgtgttttattttaaaaaattacagcaacattatcaaagacaacatatgtacaaacattttacaaaaaagaacattaccaatatcagtggcagtaagggcaagctgaagaataaatagactgagtttccgggcaatgtctgtcctcaaagacatccaaactgcgttcaggcagctgaaacaggcttctttcccagtgacaagcatatgtggtcagtaatacaaacgatggtaaatgaggctactacataggcccagttaacaaactcctcttctcctcgggtaggccatgatacaagtggaactcatcaaataatttaaacccaaggcgataacaacgctatttcccatctaaactcatttaagccttcacaatgtcgcaatggattcagttacttgcaaacgatcccgggttgtcatacagatacttgttttttacacataacgctatgccatcccttccttcactgccccagtcaggtttcctgttgttggaccgaaaggggatacattttagaaatgcttccttcaagacagaagtgagaaagaaaggagaccctgaggccaggatctattaaacctggtgtgtgcgcaaaagggagggggaaggcaggaatttgaaaggataaacgtctcctttgcgccgaggaatcaggaagcgtgactcacttgggtctgggacgataccgaaatccggtaccccaccccatcccctgccccgccgggtacctacaagctcggttcctttctcaactcccccagttccttgatctccaccttcttgtacttccccgactttctccggttggtgatcaccaggacggccatgccggcgacgagggccaccacgaccaccacgatgacggcgatgaggccggcggtgaggcgcttcatggagaacttcgggggaatctcgtccaggtaatagatgagcgtgcgctccacctgcaggggttctccgcgcacgcgcaagtccaggccgccgcggccctggaatagagactcgcccttgatgtccctctcgaagtagtaggcggcatcgccgatatccacgtcaccggcggccttctgagacgtgttctgccgcagctcgatctggatggtgggctgctcgtagtgcacggccgccacgaacttggggtgcagccgatagcgctcgcggaagagccgcctcagctcggcgtccaggtctgagtggttgaaggcgccggcggtggggcggtggcgcaggtcaatgaggatgtggtgggtgcgcaccagctcatcgcagcgtaggctcaggtcgcccttgtccgtgcggcgcacgcccaccgagttcacgcaccagcacaccgacgtctggttgcactggcgcgccttgaagcggccctcggggtcgcagtcggggtcgtagaggccatcgttgtccacgagcgcgtgctcactcggccgcaccagcgtgcgggcgttcttgggggcgctcatgcgcgccttgagcagcagacacttggaggtcagcgtggagcagtcgaccgccatgcccgagcccagcgcgcggcactggcagcggccgccggggccgtcggggctgcacacggtcatcttgttggtgggacacgtgcagttgtcctgcgcggccgtgtggccggtcaccgccgccagcaccagcagcagcagcggcagccgcagcggtggcggcgcgaggccggggccccgagccatggtggggcggaggaacgcggaccggacgcgggcggatgaggcgcggggactcgtcggggctcgggctccggcgtctgggatggtctgcaggcgtctgcgccccggccgctccctccggctcttatactctacccgacctgcccggctggttccaccaccgaccgtccccactggtatttgggtgacacatcccgcccccctccccgtcccacggaaggccaagccggccctgcgccgcccgcgataggatcagaacagggaagctgctcccgcctcctccggaccgaaagccgggaaggggagaaccgatactcacctgtaggcttctggggacccgccctcgcggcctcctgctacagacctggcgcgtctgggccgctctcccggcagaaagtctaaagagtttcattgcaaagtgtggctcgcgactgtcgcctctcctctatacgcgactcccttttcgttctttcccagccccagccctcccttgatttctctcactccctctcttctttgttccagttctcacagtagcacacgtttatatatgtttacagttcacaaacattatctcatcctaacaccagtcctgacaggtagggactatcagacccg

SEQ ID NO: 262 - DNA, 1250 bp, Homo sapiens
cggcacgagggtgacaggtcgcctgactgggctcctccccgggcccgccccgacaggtttgtcttgtgaccgcgggcggccgctgcttctttcccgagcttggaacttcgttatccgcgatgcgtttcctggcagctacattcctgctcctggcgctcagcaccgctgcccaggccgaaccggtgcagttcaaggactgcggttctgtggatggagttataaaggaagtgaatgtgagcccatgccccacccaaccctgccagctgagcaaaggacagtcttacagcgtcaatgtcaccttcaccagcaatattcagtctaaaagcagcaaggccgtggtgcatggcatcctgatgggcgtcccagttccctttcccattcctgagcctgatggttgtaagagtggaattaactgccctatccaaaaagacaagacctatagctacctgaataaactaccagtgaaaagcgaatatccctctataaaactggtggtggagtggcaacttcaggatgacaaaaaccaaagtctcttctgctgggaaatcccagtacagatcgtttctcatctctaagtgcctcattgagttcggtgcatctggccaatgagtctgctgagactcttgacagcacctccagctctgctgcttcaacaacagtgacttgctctccaatggtatccagtgattcgttgaagaggaggtgctctgtagcagaaactgagctccgggtggctggttctcagtggttgtctcatgtctctttttctgtcttaggtggtttcattaaatgcagcacttggttagcagatgtttaattttttttttaacaacattaacttgtggcctctttctacacctggaaatttactcttgaataaataaaaactccgttggtctggtcttctgccacaacaccacaacaagggcgcgccgcacaaaaattccacaagggcgcaggtaaagagaccagcctctggcacagaggcccatatacgagatgacatcaaacacagcgacctacagccgcctaaccccccgcatcgcgaacacgcccaccggcactcgtaaccaaccccacctcgcgggcgcacccgagcccccccggatcagcgcccgagcataaacaacgacactgaacaagcccgacacgacgcaactcagcgatcataagacaccaaacgacgaaagcccagcgacacgaccaccgaccagcacacagaacgcagacaaaccgagagaacagtcacc

SEQ ID NO: 263 - DNA, 1056 bp, Homo sapiens
agtctcctacttttgctcctttttggaccatgtctcctaaatctaataacccaatttgtctcctctcgccttcaggccataaagctccagacgaatctcagtgcaggacgccatcctcgcaatattcaagagtcacccttctaaggaggacccctagactgctcgctagtggaacacgacaggggcgaaatcctgccccgtctcccgtggacctggctggatatggtttttgccaatccacagagccatcctgccctgacagctagcaagaggccaagacccacagaacaaccactacagcccctctgtcagcaggaagcagttaaagaagactgaccttcgtccattttcccagataattgggtcttggactcttgagggggggaaatgttggagcaggtagctagtcagacatgagcagggcaggggagggccccctcaccaggaatgtcaggcaaccatcaggtgatggtgaggcagttgttaagctgtgtctctaacataataatgagtggcagctggcgccagggaactatggcctcccaatagataggaacacacctgaagctggtgatcagccacttcctgactaggatctcaggagctgggtgcgcaggctcaagcatgcaccctaagaggcaaactagtggcatttacctcatatatgaccttccttaggcacggcttgactggcagcggaaaaactcctccagtgaacacgtgcacaacttcagtaaaaacactgcacatgcgtcccctcccaagtgctgggcaggccctgtgcctgcgacagacgcccgaagaaactccgaggcggcgcacgtgaaccccggggccacggccatgggtaaaacccaagtaagggccacagcgcatggggcctacaaagtacccgcgagccccaaaaggggacaggacacatgagtatgcgctaaaactaaaccggagaaaaatgctgtggaacaagaccaaaagcgcgacaaatagcacctcgggacaacaccgtgcgacacgaaagtaagagaaaccacacagtagcaacaaacgcgtgatgaa

SEQ ID NO: 264 - DNA, 1862 bp, Homo sapiens
ttttttttttttggtttattgtacatgctttattaaaatggtacttgtatttacagtatctgcagaaagagtcccttccaaggcctcacacattcagacacatccatactgacacccactccacagccccatgcacccacaccagtgagatgtggagggtcagactcctaaaattaggcagctgttggggataagagttgatttgtttttcaatttttttgaaaacagaaaagcatgggggaatgcatttggccattacaatgctaattgagtttgtgtatattacatatatggcagttaacactgtaatattccttttacattctatatacacagaatgatatcaaggttttatggtcaacagaatattccaacttcagtcttaatgctgcttgtagtgatttctgaattcattataggggctttccctaaaaataattcaagtctatgttaagtgaaataaggcacaattaatattgatttgatttagggaaagggaaggaaagagaagggataaaaactggtttcaaatgatctttctgttggggaactagctctgacttaaacccacctgaaattccttctcctaatttccaaagatttctttataaagatatttttcttttccctgacaaagccaaaaagaaaagtttgggaattcacattttaatgtttcagtagcctgaacaactcaaattgatgtgtacccccacctcccctgatcaggtcgcctccctcacccatgttaaaataaaaacacagtatgtgacacaggagtcccttgatgtttcttgaggagatctgtacacttgagtagcaaatacatatctggttgtcttcaatatattttaaaaagaaagaaagagaaagaagaaaggaaagaaggaaaaaaggaaggaaagaagtaatattgtgactttcttgctctttaaaaaaatccctgtctccttcttttcaggatgatgaagccccactagacattacaaacaactgcaacaaatgagtttggcagcataaataatgtctagttattcaaatcttcatagtgagattaatttatcttgtacacaatttgttgaatgtttttcgcagcaggtgaatcaaacccaaagactccggacagtctgtgaaagggagtaagaattgcagttctgaaggcccctgactttggttgtttacaaagttcaatcctgtttattgtgatccttggtatcttcttcatctgtatattctgatggttcttctcctggttttaggagtctgcctacataatcatatttttctttaaactgcatttcccattctcgaacactctccatttgtactgcattcaaatctgagagatcatcatattcatctctaagtgcatctttatctaggcaaaatgtggccagtcctctggaggcatccctaccagcaaatattccatatggacccgccgggccgtagaacttgctgcctttggtcacgtcgaagactttcccattgaccgcgagcaggatgcgcgggttgcgggagccgtcgtactggcgcagctgctccaagctgaagtcccgcttcttcatgcgaggcagagaggtggcggggctctcctcgcccgccccggccccggcccccagaccccgccgcccccagcgcacccacagccggtaggcccccagcagcaccagagccaccagcgccacgttcagcagcatttccccgccccccgtcagaagcgccaacgccgccgccgcccagcctcccccttccgctgccgctcccgcgtcgcctggactctcgctgccgccgtcgttgctgctctcgctgccactccccagggtgcctagcttcacgtccccatcaccagccgccatcaccgg

SEQ ID NO: 265 - DNA, 2212 bp, Homo sapiens
agccccctgcccctcgccgccccccgccgcctgcctgggccgggccgaggatgcggcgcagcgcctcggcggccaggcttgctcccctccggcacgcctgctaacttcccccgctacgtccccgttcgcccgccgggccgccccgtctccccgcggcctccgggtccgggtcctccaggacggccaggccgtgccgccgtgtgccctccgccgctcgcccgcgcgccgcgcgctccccgcctgcgcccagcgccccgcgcccgcgccccagtcctcgggcggtcatgctgcccctctgcctcgtggccgccctgctgctggccgccgggcccgggccgagcctgggcgacgaagccatccactgcccgccctgctccgaggagaagctggcgcgctgccgcccccccgtgggctgcgaggagctggtgcgagagccgggctgcggctgttgcgccacttgcgccctgggcttggggatgccctgcggggtgtacaccccccgttgcggctcgggcctgcgctgctacccgccccgaggggtggagaagcccctgcacacactgatgcacgggcaaggcgtgtgcatggagctggcggagatcgaggccatccaggaaagcctgcagccctctgacaaggacgagggtgaccaccccaacaacagcttcagcccctgtagcgcccatgaccgcaggtgcctgcagaagcacttcgccaaaattcgagaccggagcaccagtgggggcaagatgaaggtcaatggggcgccccgggaggatgcccggcctgtgccccagggctcctgccagagcgagctgcaccgggcgctggagcggctggccgcttcacagagccgcacccacgaggacctctacatcatccccatccccaactgcgaccgcaacggcaacttccaccccaagcagtgtcacccagctctggatgggcagcgtggcaagtgctggtgtgtggaccggaagacgggggtgaagcttccggggggcctggagccaaagggggagctggactgccaccagctggctgacagctttcgagagtgaggcctgccagcaggccagggactcagcgtcccctgctactcctgtgctctggaggctgcagagctgacccagagtggagtctgagtctgagtcctgtctctgcctgcggcccagaagtttccctcaaatgcgcgtgtgcacgtgtgcgtgtgcgtgcgtgtgtgtgtgtttgtgagcatgggtgtgcccttggggtaagccagagcctggggtgttctctttggtgttacacagcccaagaggactgagactggcacttagcccaagaggtctgagccctggtgtgtttccagatcgatcctggattcactcactcactcattccttcactcatccagccacctaaaaacatttactgaccatgtactacgtgccagctctagttttcagccttgggaggttttattctgacttcctctgattttggcatgtggagacactcctataaggagagttcaagcctgtgggagtagaaaaatctcattcccagagtcagaggagaagagacatgtaccttgaccatcgtccttcctctcaagctagccagagggtgggagcctaaggaagcgtggggtagcagatggagtaatggtcacgaggtccagacccactcccaaagctcagacttgccaggctccctttctcttcttccccaggtccttcctttaggtctggttgttgcaccatctgcttggttggctggcagctgagagccctgctgtgggagagcgaagggggtcaaaggaagacttgaagcacagagggctagggaggtggggtacatttctctgagcagtcagggtgggaagaaagaatgcaagagtggactgaatgtgcctaatggagaagacccacgtgctaggggatgaggggcttcctgggtcctgttccctaccccatttgtggtcacagccatgaagtcaccgggatgaacctatccttccagtggctcgctccctgtagctctgcctccctctccatatctccttcccctacacctccctccccacacctccctactcccctgggcatcttctggcttgactggatggaaggagacttaggaacctaccagttggccatgatgtcttttcttctttttcttttttttaacaaaacagaacaaaaccaaaaaatgtccaaaaaaaaaa

SEQ ID NO: 266 - DNA, 1412 bp, Homo sapiens
gccctaccgccttcggcgcgaaggtggctggtgcgtaccgtcccgaaccctaggagccgaggtgagcgccgcgaagacccccgacattaagaagtggtgtccaccgcagcccccttaagccggataccctcccccaccccgaggagcaagcctgccttccgccacgcgccgcccgtcttccgcgcccgcgcagaacctcgcggctgtgcccgcctaaagccacgcccatcctctcttggccacgccctcagagactcctcccctgtcgcccagatcccacccgcaggaccccaaaacccaatgatcctgcagcagcccttgcagcgaggcccccagggaggggcccagcgcctcccgcgggccgccttgggggtgacttggggcctggacgccagctcccctctccgaggagctgtgcccatgagcaccaagcggcgcctggaggaggagcaggagcctctgcgcaagcagtttctgtctgaggagaacatggccacccacttctctcaactcagcctgcacaatgaccacccctactgcagcccccccatgaccttctccccagccctgcccccactcaggagcccttgctctgagctgcttctctggcgctatcctggcagcctcatccctgaggccctccgtctgctgaggctgggggacacccccagtcccccctaccctgcaaccccagctggggacataatggagctctgagtgctggtggacagtgcccctcccaccttccttcttccccacaacagaagagaccagcgactcccgcaaagggacaaggttcctccctctcctgcagagtaggcatctgggcaccaagaccttccctcaacagaggacactgagcccaacggagttctgggatgggaggggtgggagcatgggaagggaggcatcccacccccaagaagaactgaataaagattgctgagcaacaaacgcacaccacgcagcaagagagcagacgacgacacaacgccgaccgagagacaaagacagggtcgcccacgaacgcgcgagcacaacgacgggcccaggggcgcaacaccagacacgacgacccacagaccagcagcgcgacgagagggccggaccaccggggacggcgacgcaccaaacgagggccacccgaaacacacgcgaggacaaagcacgacggacaagcgaccccggccactccgcccccaggaccacgaaacacccccagcgcagcctgcacaacacccgaccccggccaccccgcccgagccgccaggcttgaccgcggaagaccgagcacgcggaagagcaacacacccaaaaggccgtggaccacccccgacccccgaccgacagcgaaggcacccacgcacgagcagaccacaccgcgggcaagcaccagcaccggaacacaacag

SEQ ID NO: 267 - DNA, 2743 bp, Homo sapiens
ctagtattctactagaactggaagattgctctccgagttttttttttgttattttgttaaaaaataaaaagcttgagcagcaattcatattactgtcacaggtatttttgctgtgctgtgcaaggtaactctgctagctaagattcacaatgttgaaagcccttttcctaactatgctgactctggcgctggtcaagtcacaggacaccgaagaaaccatcacgtacacgcaatgcactgacggatatgagtgggatcctgtgagacagcaatgcaaagatattgatgaatgtgacattgtcccagacgcttgtaaaggtggaatgaagtgtgtcaaccactatggaggatacctctgccttccgaaaacagcccagattattgtcaataatgaacagcctcagcaggaaacacaaccagcagaaggaacctcaggggcaaccaccggggttgtagctgccagcagcatggcaaccagtggagtgttgcccgggggtggttttgtggccagtgctgctgcagtcgcaggccctgaaatgcagactggccgaaataactttgtcatccggcggaacccagctgaccctcagcgcattccctccaacccttcccaccgtatccagtgtgcagcaggctacgagcaaagtgaacacaacgtgtgccaagacatagacgagtgcactgcagggacgcacaactgtagagcagaccaagtgtgcatcaatttacggggatcctttgcatgtcagtgccctcctggatatcagaagcgaggggagcagtgcgtagacatagatgaatgtaccatccctccatattgccaccaaagatgcgtgaatacaccaggctcattttattgccagtgcagtcctgggtttcaattggcagcaaacaactatacctgcgtagatataaatgaatgtgatgccagcaatcaatgtgctcagcagtgctacaacattcttggttcattcatctgtcagtgcaatcaaggatatgagctaagcagtgacaggctcaactgtgaagacattgatgaatgcagaacctcaagctacctgtgtcaatatcaatgtgtcaatgaacctgggaaattctcatgtatgtgcccccagggataccaagtggtgagaagtagaacatgtcaagatataaatgagtgtgagaccacaaatgaatgccgggaggatgaaatgtgttggaattatcatggcggcttccgttgttatccacgaaatccttgtcaagatccctacattctaacaccagagaaccgatgtgtttgcccagtctcaaatgccatgtgccgagaactgccccagtcaatagtctacaaatacatgagcatccgatctgatagggtctgtgccatcagacatcttccagatacaggccacaactatttatgccaacaccatcaatacttttcggattaaatctggaaatgaaaatggagagttctacctacgacaaacaagtcctgtaagtgcaatgcttgtgctcgtgaagtcattatcaggaccaagagaacatatcgtggacctggagatgctgacagtcagcagtatagggaccttccgcacaagctctgtgttaagattgacaataatagtggggccattttcattttagtcttttctaagagtcaaccacaggcatttaagtcagccaaagaatattgttaccttaaagcactattttatttatagatatatctagtgcatctacatctctatactgtacactcacccataacaaacaattacaccatggtataaagtgggcatttaatatgtaaagattcaaagtttgtctttattactatatgtaaattagacattaatccactaaactggtcttcttcaagagagctaagtatacactatctggtgaaacttggattctttcctataaaagtgggaccaagcaatgatgatcttctgtggtgcttaaggaaacttactagagctccactaacagtctcataaggaggcagccatcataaccattgaatagcatgcaagggtaagaatgagtttttaactgctttgtaagaaaatggaaaaggtcaataaagatatatttctttagaaaatggggatctgccatatttgtgttggtttttattttcatatccagcctaaaggtggttgtttattatatagtaataaatcattgctgtacaacatgctggtttctgtagggtatttttaattttgtcagaaattttagattgtgaatattttgtaaaaaacagtaagcaaaattttccagaattcccaaaatgaaccagataccccctagaaaattatactattgagaaatctatggggaggatatgagaaaataaattccttctaaaccacattggaactgacctgaagaagcaaactcggaaaatataataacatccctgaattcaggcattcacaagatgcagaacaaaatggataaaaggtatttcactggagaagttttaatttctaagtaaaatttaaatcctaacacttcactaatttataactaaaatttctcatcttcgtacttgatgctcacagaggaagaaaatgatgatggtttttattcctggcatccagagtgacagtgaacttaagcaaattaccctcctacccaattctatggaatattttatacgtctccttgtttaaaatctgactgctttactttgatgtatcatatttttaaataaaaataaatattcctttagaagatcactctaaaa

SEQ ID NO: 268 - DNA, 14770 bp, Homo sapiens
gggacaccatcatttgggtttttaaaagcttcagcttctccagcatctttgcattgtgaatatcttcctgcttctagtcaaagctttctctctagtgattggaatgctgctgtaagcctattagaggtgcctgaggatatcaccttttacaaggaagccgtgtgtgcttgagaggatctttttaaatgcattatggctcatgcagcctcacaattaaagaaaaacagggatttagaaatcaatgctgaagaagagcctgagaaaaaaaggaaacaccgcaaacggtcccgggatcggaagaaaaagtctgatgccaatgcaagttacttaagagcagctcgagctggacaccttgaaaaggccctcgactacataaaaaatggagttgacatcaacatttgcaatcagaatgggttgaacgctctccaccttgcttccaaagaaggccatgtagaggttgtttctgagctgctgcagagagaagccaatgtggatgcagctacaaagaaaggaaacacagcattgcacatcgcatctttggctgggcaagcagaggtggtaaaagtcttggttacaaatggagccaatgtcaatgcacaatctcagaatggtttcacgccattgtatatggcagcccaggaaaatcacctggaagttgtcaagtttcttcttgacaatggtgcaagccagagcctagccacagaggatggcttcacaccattggcagtggctttgcaacaaggtcacgaccaagtcgtttcgctcctgctagagaatgacaccaaaggaaaagtgcgtctcccagctcttcatatcgcggcccgcaaagacgacacaaaagccgccgccctgctgctgcagaatgacaacaatgcagatgtggaatcaaagagtggcttcactccgctccacatagctgctcactatggaaatatcaatgtagccacgttgctgttaaaccgagcggctgctgtggatttcaccgcaaggaatgacatcactcctttacatgttgcatcaaaaagaggaaatgcaaatatggtaaaactattgctcgatcgaggagctaaaatcgatgccaaaaccagggatggtctgacaccactgcactgtggagcaaggagtggccacgagcaggtggtagaaatgttgcttgatcgagctgcccccattctttcaaaaaccaagaatggattatctccattgcacatggccacacaaggggatcatttaaactgcgtccagcttctcctccagcataatgtacccgtggatgatgtcaccaatgactacctgactgccctacacgtggctgcccactgtggccattacaaagttgccaaggttctcttggataagaaagctaaccccaatgccaaagccctgaatggctttacccctcttcatatcgcctgcaagaagaatcgaattaaagtaatggaactccttctgaaacacggtgcatccatccaagctgtaaccgagtcgggccttaccccaatccatgttgctgccttcatggggcatgtaaatattgtatcacaactaatgcatcatggagcctcaccaaacaccaccaatgtgagaggagaaacagcactgcacatggcagctcgctccggccaagctgaagttgtgcggtatctggtacaagacggagctcaggtagaagctaaagctaaggatgaccaaacaccactccacatttcagcccgactggggaaagcagacatagtacaacagctgttgcagcaaggggcatctccaaatgcagccacaacttctgggtacaccccacttcacctttccgcccgagaggggcatgaggatgtggccgcgttccttttggatcatggagcgtctttatctataacaacaaagaaaggatttactcctcttcatgtggcagcaaaatatggaaagcttgaagtcgccaatctcctgctacagaaaagtgcatctccagatgctgctgggaagagcgggctaacaccactgcatgtagctgcacattacgataatcagaaagtggcccttctgcttttggaccaaggagcctcacctcacgcagccgcaaagaatggttatacgccactgcacatcgctgccaaaaagaaccagatggacatagcgacaactctgctggaatatggtgctgatgccaacgcagttacccggcaaggaattgcttccgtccatctcgcagctcaggaagggcacgtggacatggtgtcgctgctcctcggtagaaatgcgaatgtgaacctgagcaataagagcggcctgaccccactccatttggctgctcaagaagatcgagtgaatgtggcagaagtcctcgtaaaccaaggggctcatgtggacgcccagacaaagatgggatacacaccactgcatgtgggctgccactatggaaatatcaagattgttaatttcctgctccagcattctgcaaaagttaatgccaaaacaaagaatgggtatacgccattacatcaagcagcacagcaggggcatacgcatataataaatgtcttacttcagaacaacgcctcccccaatgaactcactgtgaatgggaatactgcccttggcattgcccggcgcctcggctacatctcagtagtggacaccctgaagatagtgaccgaagaaaccatgaccacaactactgtcacagagaagcacaaaatgaatgttccagaaacgatgaatgaagttcttgatatgtctgatgatgaagttcgtaaagccaatgcccctgaaatgctcagtgatggcgaatatatctcagatgttgaagaaggtgaagatgcaatgaccggggacacagacaaatatcttgggccacaggaccttaaggaattgggtgatgattccctgcctgcagagggttacatgggctttagtctcggagcgcgttctgccagcctccgctccttcagttcggataggtcttacaccttgaacagaagctcctatgcacgggacagcatgatgattgaagaactccttgtgccatccaaagagcagcatctaacattcacaagggaatttgattcagattctcttagacattacagctgggctgcagacaccttagacaatgtcaatcttgtttcaagccccattcattctgggtttctggttagctttatggtggacgcgagagggggctccatgagaggaagccgtcatcacgggatgagaatcatcattcctccacgcaagtgtacggcccccactcgaatcacctgccgtttggtaaagagacataaactggccaacccacccccacatggtgaaaggagagggattagcagtaggctggtagaaatgggtcctgcaggggcacaatttttaggccctgtcatagtggaaatccctcactttgggtccatgagaggaaaagagagagaactcattgttcttcgaagtgaaaatggtgaaacttggaaggagcatcagtttgacagcaaaaatgaagatttaaccgagttacttaatggcatggatgaagaacttgatagcccagaagagttagggaaaaagcgtatctgcaggattatcacgaaagatttcccccagtattttgcagtggtttcccggattaagcaggaaagcaaccagattggtcctgaaggtggaattctgagcagcaccacagtgccccttgttcaagcatctttcccagagggtgccctaactaaaagaattcgagtgggcctccaggcccagcctgttccagatgaaattgtgaaaaagatccttggaaacaaagcaacttttagcccaattgtcactgtggaaccaagaagacggaaattccataaaccaatcacaatgaccattccggtgcccccgccctcaggagaaggtgtatccaatggatacaaaggggacactacacccaatctgcgtcttctctgtagcattacagggggcacttcgcctgctcagtgggaagacatcacaggaacaactcctttgacgtttataaaagattgtgtctcctttacaaccaatgtttcagccagattttggcttgcagactgccatcaagttttagaaactgtggggttagccacgcaactgtacagagaattgatatgtgttccatatatggccaagtttgttgtttttgccaaaatgaatgatcccgtagaatcttccttgcgatgtttctgcatgacagatgacaaagtggacaaaactttagagcaacaagagaattttgaggaagtcgcaagaagcaaagatattgaggttctggaaggaaaacctatttatgttgattgttatggaaatttggccccacttaccaaaggaggacagcaacttgtttttaacttttattctttcaaagaaaatagactgccattttccatcaagattagagacaccagccaagagccctgtggtcgtctgtcttttctgaaagaaccaaagacaacaaaaggactgcctcaaacagcggtttgcaacttaaatatcactctgccagcacataaaaaggagacagagtcagatcaagatgatgagattgagaaaacagatagacgacagagcttcgcatccttagctttacgtaagcgctacagctacttgactgagcctggaatgattgaacggagtacaggagcaacaagatccctccccaccacttactcatacaagccattcttttctacaagaccataccagtcctggacaacagctccgattacagtgcctgggccagccaagtcaggcttcacttccttatcaagttcttcctctaatacgccatcagcttctccgttaaaatcaatatggtctgtttcgacaccttctccaatcaaatccacattaggcgcgtcaactacatcttcagttaaatccattagtgacgtggcatctccaattagatccttacggacaatgtcttcgccgataaaaactgtggtgtcacaatctccatacaatatccaggtttcctctggtaccctggctagagctccagcagtcacggaagctacgcccttaaaagggctggcatccaattctacgttttcctctcgaacctctccagtgactacagcagggtctcttttggagaggtcatcaattactatgacaccccctgcctcccccaaatcaaacattaatatgtattcctcaagtttgccatttaagtcaattattacatcagcagcaccgctaatatcttcacctttaaagtcagtggtgtctccagttaaatcacgagttgatgtcatttcatcagccaaaattacaatggcatcttctctctcatcacctgtgaagcagatgcctggacatgcagaggtagcattagtcaatggatctatttcccctctaaaatatgcatcatcctcaactttaattaatggatgcaaagccactgccacgttacaggaaaaaatttcttctgctacaaactctgtgagctctgtggtcagtgcagccactgacacagttgagaaagtgttttctaccacgactgcaatgccattttccccactcaggtcatatgtttctgcagcaccatcagcttttcagtctctaagaactccttccgcaagtgcactctatacatcccttgggtcgtcaatatctgcaactacctcatctgtaacttcatcaattataacagtgccagtatactctgtagtcaatgttttgccagaaccagcattaaagaaacttccagactctaattcatttacaaaatcagcagcagccttgctgtcacccattaaaacattgactacggagacacatcctcagcctcacttcagtcgaacttcatctccagttaagtcatctttgttccttgcaccctctgcccttaagttgtctacaccatcttctttatcttccagtcaggagatactaaaagatgtagctgaaatgaaagaggacctaatgcggatgaccgcaatactacagacagatgtgcctgaggagaagccattccaacctgaactcccaaaggaagggagaatagatgatgaagaacctttcaaaattgtagagaaagtaaaggaagacttagtgaaagttagtgaaatccttaaaaaggatgtatgtgtagataataaaggatcacccaaatcaccaaagagtgacaaaggacactctcctgaagatgactggatagaatttagttcggaagaaatccgggaagccagacaacaagctgctgcgagccagtctccatctctgccagagagagtgcaagtaaaagcaaaagccgcctccgaaaaggattataacttgaccaaagttattgattacctaacaaatgatattgggagtagttcactgacaaacttaaaatacaagtttgaggatgcaaagaaggatggtgagggaggacagaaaagagttttaaaaccagcaattgctttgcaggaacacaaactcaaaatgcctccagcctccatgaggacttccacctctgagaaagaattgtgtaaaatggctgattccttttttggaacagatactattttagagtctcctgatgacttttctcaacacgaccaagataaaagtcccttgtctgacagtggctttgaaacaagaagtgaaaagacaccttcagccccacaaagcgctgaaacgactggtcctaaaccactttttcatgaagttcccatccctcctgttattacagaaacaagaactgaagtggttcatgttatcaggagctatgatccctcagctggggatgttccccagacccaaccagaggagcctgtgtcacctaaaccttcacctacttttatggaattggaaccaaagcccaccacctctagtattaaagaaaaggttaaagcatttcaaatgaaagccagtagtgaagaagatgaccacaatcgggttttaagcaaaggcatgcgtgttaaagaagagactcacataaccacaaccaccagaatggtttatcattctccaccaggcggtgaaggtgcatctgaaagaattgaagaaaccatgtcagtccatgacatcatgaaggcctttcagtccgggcgggatccttccaaagaactggcaggtctgtttgaacataagtcggcagtgtctccagatgttcacaagtctgctgctgaaacctcagcccagcatgcagagaaggacaaccaaatgaaacccaaactggagcgtataatagaagtccacatcgaaaaaggtaaccaagctgagcccactgaagtcattattagagaaaccaaaaagcatccagaaaaagaaatgtatgtatatcagaaagacttatcccggggagatattaacctaaaagattttctgccagaaaaacacgatgcttttccttgttcagaggaacagggtcagcaagaagaagaagaacttactgctgaagagtcattgccttcttatctggagtcttccagagtaaacactcctgtgtcccaagaagaagatagccgccctagttctgctcaactcatatctgatgactcttataaaacattgaagcttttgagtcaacactcaatagaataccatgacgatgagttgtcagaactaagaggggagtcttacaggtttgctgagaaaatgcttctgtcagaaaagctagatgtgtctcattctgatactgaggaatcggttacagaccatgcaggaccccctagctcagagttacaggggtctgataagcggtccagagaaaaaatagccactgcccccaaaaaagaaattctctccaaaatctataaagatgtttctgaaaatggtgtaggtaaagtgtctaaagatgagcattttgataaagtgacagtgttgcactattctggcaatgttagtagtccaaaacatgccatgtggatgcgctttactgaggacagattagacagaggtagagagaagttgatatatgaagatagggtggacaggactgtgaaggaggctgaagaaaaactgactgaagtgtcacagttttttcgtgacaaaactgaaaagctaaatgatgaactgcagtccccagagaaaaaggcacgccctaaaaatggcaaagaatattcttctcaaagccctaccagtagcagccctgagaaagtgctactgacagaactgctggcatccaatgatgagtgggttaaggcaagacagcatggccctgatggacaaggcttccccaaggccgaggagaaggcacccagtctgcccagcagcccagagaagatggttctctcccaacagactgaggacagcaagtccacagtggaagccaaaggaagtatttcacagagcaaagcaccagatgggccccagtctggattccagctcaaacaatctaaactcagttccattagattaaaatttgaacaaggcacacacgcaaaaagtaaggacatgtctcaagaagacagaaagtcagatggccagtccagaatcccagttaaaaaaatacaggagagcaagctacccgtctaccaagtttttgctagagaaaaacagcagaaggccatagacctcccagatgaaagtgtatctgtgcaaaaagattttatggtattaaaaaccaaagatgagcatgcccaaagcaacgaaattgttgtaaatgattctggctctgataatgtgaaaaaacagagaactgaaatgtcaagtaaagcaatgcctgactctttttctgagcagcaggctaaagacttggcatgtcatataacctcagatttagcaactaggggaccatgggacaaaaaggtctttagaacatgggagagttcgggagccactaacaataagtctcagaaagaaaaactttcgcatgtacttgttcatgatgtaagagagaatcacattggtcaccctgagagtaaaagtgttgatcaaaagaatgaatttatgtctgtgactgagagagaacgcaaattgttaacaaacggctctctctcagaaattaaagaaatgactgtaaaatctccctccaaaaaagtcttatatagggaatatgttgtgaaagaaggggaccatccaggcggattgcttgatcagccttccaggaggagcgagagctcagcagtgtcacacattcccgtcagagttgctgatgagaggagaatgctgtcttctaatattcccgatggtttttgtgaacagtcggcatttccaaaacatgaactatcacaaaaattgtcccagtcaagcatgagtaaagagacagttgagacacagcactttaattctatagaagatgaaaaagttacctattcagaaatcagcaaagtttccaaacaccagagttatgtaggtttatgcccacctctcgaggaaaccgaaacctcccccaccaaatctcctgattctttagagtttagcccaggaaaggaatctccctctagtgatgtattcgaccacagtcccattgatggattggaaaaactcgcaccactagcccagacagagggagggaaagagataaaaactttacccgtttatgtcagttttgtacaagtggggaagcaatatgaaaaggagatacaacaaggaggtgtaaaaaaaatcataagtcaggaatgtaagacagtacaagaaaccagggggaccttttatacaactagacagcaaaagcaacctccttctccccaaggtagtccagaagatgatactctagagcaagtatcctttctagacagctctgggaaaagccctttaaccccagaaacacccagttcagaggaagtgagttatgaatttacatctaagacacctgactcgctcatagcttatataccaggcaaacccagcccaattcccgaggtttctgaggagtcagaggaggaggaacaggccaagtcaacctcccttaagcagactacagtggaggaaacagcagttgagcgtgaaatgcctaatgacgtgagcaaagactctaaccaaagacccaaaaataacagagttgcctatattgaatttccccctcctccaccactggatgcggaccagattgagtcagataagaagcatcattatctcccagaaaaagaggttgacatgattgaagtcaatctgcaagatgagcatgacaagtaccagctggctgaacctgtcattagagtgcagccaccttcaccagttcctcccggggcagacgtcagtgattcaagcgatgacgaatctatttatcagccagtcccagttaaaaaatataccttcaaattaaaggaagtggacgatgaacaaaaagaaaaacccaaagcttctgctgaaaaggcttccaaccagaaagaactggaaagtaatggatctggaaaagataatgaatttggccttggccttgattcacctcagaatgaaattgcccagaatgggaacaacgaccagtccatcacagagtgttccattgccaccacagcagagttttctcatgacacggatgccacagagatcgactctctggatggctatgacctgcaagatgaagatgatggcttgacagagagtgattctaaactcccaattcaagccatggaaattaagaaagatatctggaacacagagggcattctgaagccagctgaccgctcttttagccaaagtaaacttgaagttatcgaggaggagggaaaggtgggaccagatgaggacaagccaccttctaaaagttcttcatctgaaaagactcctgataagactgatcagaagtcaggggcccagttcttcacactggaaggcagacatcctgacagatcagtgtttcctgatacttacttcagttacaaagtagatgaagaatttgccactccttttaaaacagtagctaccaaaggtctagattttgacccttggtctaataaccgaggggatgatgaagtttttgacagtaaatcacgggaagatgaaactaagccatttgggctggcggtagaagaccgctctccagcaacaacccctgatacaacgccagccagaacgccaactgatgaaagtaccccaactagtgagcctaaccccttcccatttcatgaaggaaaaatgtttgagatgactcgcagtggtgcaattgacatgagcaagagggattttgttgaagagaggctccaatttttccagattggtgagcatacttctgaagggaagtcaggggaccagggggaaggggataaaagtatggtcactgccacaccacagccacagtcaggggacaccactgtagaaaccaatctagagagaaatgtagagacacctacagtggaacctaaccccagcatcccgaccagcggagagtgtcaggaaggcacatccagtagtggctccctggagaaatcagcagcagccactaacacctctaaagttgaccccaagttgcgcacgcctataaaaatgggaatttctgcatccaccatgaccatgaagaaagaaggccctggagaaataacagataagatagaagcggtgatgaccagttgtcagggattagaaaatgaaactataacaatgatttcaaatacagccaatagccagatgggcgttaggccccatgaaaaacatgattttcaaaaagataactttaataacaacaacaatttggattcttccactatacagacagataacattatgagtaatatagttctgacagaacattctgcacccacttgtaccacagagaaagataacccagtgaaagtctcatcaggaaaaaagacaggggtactacaaggacactgtgtaagagataagcagaaagttcttggagaacagcaaaaaacaaaggaattgatagggattaggcaaaaatccaaacttcccataaaggccacttcaccaaaagataccttcccaccgaaccatatgtcaaacactaaagcaagtaaaatgaagcaggttagtcaatccgagaaaaccaaagcccttactacttcttcatgtgtagatgtaaagtccagaattccagtgaaaaacacacccagggataacataattgcagttagaaaagcatgtgccacacaaaagcaagggcagccagagaaaggcaaggccaaacagcttccatccaagttgccagtaaaggtaagatccacctgtgtcactaccaccaccaccactgccaccaccaccaccactaccaccactaccaccaccaccagctgcacagttaaagttaggaaaagtcagctcaaggaagtatgtaaacattccattgaatattttaagggaattagtggtgagaccttaaagcttgtggaccgcctctctgaagaagaaaaaaagatgcagtccgagttgtccgatgaggaagaaagtacctcaagaaacacgtcgttgtccgagacttcccggggtggccagccttcggttacaacgaagtctgctagagataagaaaacagaggcagcacctttaaaatcaaagagtgaaaaggccggcagtgagaaaaggagcagtagaaggactggtccacagagtccatgtgaacggacagatatcaggatggcaatagtagccgatcacctgggacttagttggacagaactggcaagggaactgaatttttcagtggatgaaatcaatcaaatacgtgtggaaaatccaaattctttaatttctcagagcttcatgttattaaaaaaatgggttaccagagacggaaaaaatgccacaactgatgccttaacttcggtcttgacaaaaattaatcgaatagatatagtgacactgctagaaggaccaatatttgattatggaaatatttcaggcaccagaagttttgcagatgagaacaatgttttccatgaccctgttgatggttggcagaatgagacatcaagtggaaacctagagtcctgcgctcaagctcgaagagtaactggtgggttactagatcgactggatgacagccctgaccagtgtagagattccattacctcatatctcaaaggagaagctggcaaatttgaagcaaatggaagccatacagaaatcactccagaagcaaagacaaaatcttactttccagaatcccaaaatgatgtaggaaaacagagtaccaaggaaactctgaaaccaaaaatacatggatctggtcatgttgaagaaccagcatcaccactagcagcatatcagaaatctctagaagaaaccagcaagcttataatagaagagactaaaccctgtgtgcctgtcagtatgaaaaagatgagtaggacttctccagcagatggcaagccaaggcttagcctccatgaagaagaggggtccagtgggtctgagcaaaagcagggagaaggttttaaggtgaaaacgaagaaagaaatccggcatgtggaaaagaagagccactcgtaacagcgaacggtcagtcaaggatcataagtttttactgccagtattgagaaattcgtggaagaaatgtcagcaggaagtaaaaattcaccgagaagtgtgtgtgtgttcgctgcttccacacattaatggcatgattttttttatgcaaaaagaaaagaaaagaaaaccacccacattttaatttagcatgagccaatttacagagcatggaaatcactttcatttccggattggcgcgtgtgcaattagcaatgcagtgtatatacaagaagccatgctgttaacagtttatctcaagtaatttggtgtcatttacaaaaggaagaaattcttgccatcagaagggacagaaggagatggaatgatcaaatcacagagaaacactaaaattactaaatctacaacagctcgccttatttttcttggacccaaactgtcagggtataaacactatttgtttcttttttaaaacatcgatagttttgctgtaaataataacactgtataaattctaacagaaaaatagaataaaatgttgataaggcactgcctcttagaacacaaacagaatattgcaaatgcatttaacaaataggggtctcaagtgacttcaccctagaagaggagggagggattctgggtgggggtgactcttcactgattcttgtatattagcaattataatgtttgtatatgcaaaactgctagcttgattttaaaaaaaaacaaatctttaaaatctgctgcaaatttaaataattcccaaaatgaggaattctgtagttctgtgaaaaatttttttcttcagaatactaatattttgatgcatgtgtatcaccttattttgattaaatcttttccaattttgcaaacactacagtatactgcaacacaaaagattttatctgtaaacacaaagcccttcatctaatatttgttgctattgccaatttttcaatgaaatgacctaaaaacaacaaaaaaaaataacctatacggtagttgctttagggggtggggggatgctatctgttagtgcttaaaagggggtaaatgcttgccgctttagaggtggatggtgctcataaaaggccccagtcgggggtatttaaaaaggactgaacagaaatccttagctagtagaatggcagcacgctgtaaaattattactgtattgtgtactggctataagatgtagacacctttcagtaagccaatcatttgtaaccattctagcagtgtcatattaggttaataaggctgctgtgttttaaagggcatttttatttgggttttggtgaaattctttaatttgttgattatattcacataaaatcagcattcattgacacatagctctaatgacatatgtatgaaaaaccatacactggatgacctagtcgattatttaagcataaaataaattgtgttaaactcttcacct

SEQ ID NO: 269 - DNA, 3890 bp, Homo sapiens
taggcggtgcatcccgttcgcgcctggggctgtggtcttcccgcgcctgaggcggcggcggcaggagctgaggggagttgtagggaactgaggggagctgctgtgtcccccgcctcctcctccccatttccgggctcccgggaccatgtccgcgctggcgggtgaagatgtctggaggtgtccaggctgtggggaccacattgctccaagccagatatggtacaggactgtcaacgaaacctggcacggctcttgcttccggtgttcagaatgccaggattccctcaccaactggtactatgagaaggatgggaagctctactgccccaaggactactgggggaagtttggggagttctgtcatgggtgctccctgctgatgacagggccttttatggtggctggggagttcaagtaccacccagagtgctttgcctgtatgagctgcaaggtgatcattgaggatggggatgcatatgcactggtgcagcatgccaccctctactgtgggaagtgccacaatgaggtggtgctggcacccatgtttgagagactctccacagagtctgttcaggagcagctgccctactctgtcacgctcatctccatgccggccaccactgaaggcaggcggggcttctccgtgtccgtggagagtgcctgctccaactacgccaccactgtgcaagtgaaagaggtcaaccggatgcacatcagtcccaacaatcgaaacgccatccaccctggggaccgcatcctggagatcaatgggacccccgtccgcacacttcgagtggaggaggtggaggatgcaattagccagacgagccagacacttcagctgttgattgaacatgaccccgtctcccaacgcctggaccagctgcggctggaggcccggctcgctcctcacatgcagaatgccggacacccccacgccctcagcaccctggacaccaaggagaatctggaggggacactgaggagacgttccctaaggcgcagtaacagtatctccaagtcccctggccccagctccccaaaggagcccctgctgttcagccgtgacatcagccgctcagaatcccttcgttgttccagcagctattcacagcagatcttccggccctgtgacctaatccatggggaggtcctggggaagggcttctttgggcaggctatcaaggtgacacacaaagccacgggcaaagtgatggtcatgaaagagttaattcgatgtgatgaggagacccagaaaacttttctgactgaggtgaaagtgatgcgcagcctggaccaccccaatgtgctcaagttcattggtgtgctgtacaaggataagaagctgaacctgctgacagagtacattgaggggggcacactgaaggactttctgcgcagtatggatccgttcccctggcagcagaaggtcaggtttgccaaaggaatcgcctccggaatggcctatttgcactctatgtgcatcatccaccgggatctgaactcgcacaactgcctcatcaagttggacaagactgtggtggtggcagactttgggctgtcacggctcatagtggaagagaggaaaagggcccccatggagaaggccaccaccaagaaacgcaccttgcgcaagaacgaccgcaagaagcgctacacggtggtgggaaacccctactggatggcccctgagatgctgaacggaaagagctatgatgagacggtggatatcttctcctttgggatcgttctctgtgagatcattgggcaggtgtatgcagatcctgactgccttccccgaacactggactttggcctcaacgtgaagcttttctgggagaagtttgttcccacagattgtcccccggccttcttcccgctggccgccatctgctgcagactggagcctgagagcagaccagcattctcgaaattggaggactcctttgaggccctctccctgtacctgggggagctgggcatcccgctgcctgcagagctggaggagttggaccacactgtgagcatgcagtacggcctgacccgggactcacctccctagccctggcccagccccctgcaggggggtgttctacagccagcattgcccctctgtgccccattcctgctgtgagcagggccgtccgggcttcctgtggattggcggaatgtttagaagcagaacaagccattcctattacctccccaggaggcaagtgggcgcagcaccagggaaatgtatctccacaggttctggggcctagttactgtctgtaaatccaatacttgcctgaaagctgtgaagaagaaaaaaacccctggcctttgggccaggaggaatctgttactcgaatccacccaggaactccctggcagtggattgtgggaggctcttgcttacactaatcagcgtgacctggacctgctgggcaggatcccagggtgaacctgcctgtgaactctgaagtcactagtccagctgggtgcaggaggacttcaagtgtgtggacgaaagaaagactgatggctcaaagggtgtgaaaaagtcagtgatgctccccctttctactccagatcctgtccttcctggagcaaggttgagggagtaggttttgaagagtcccttaatatgtggtggaacaggccaggagttagagaaagggctggcttctgtttacctgctcactggctctagccagcccagggaccacatcaatgtgagaggaagcctccacctcatgttttcaaacttaatactggagactggctgagaacttacggacaacatcctttctgtctgaaacaaacagtcacaagcacaggaagaggctgggggactagaaagaggccctgccctctagaaagctcagatcttggcttctgttactcatactcgggtgggctccttagtcagatgcctaaaacattttgcctaaagctcgatgggttctggaggacagtgtggcttgtcacaggcctagagtctgagggaggggagtgggagtctcagcaatctcttggtcttggcttcatggcaaccactgctcacccttcaacatgcctggtttaggcagcagcttgggctgggaagaggtggtggcagagtctcaaagctgagatgctgagagagatagctccctgagctgggccatctgacttctacctcccatgtttgctctcccaactcattagctcctgggcagcatcctcctgagccacatgtgcaggtactggaaaacctccatcttggctcccagagctctaggaactcttcatcacaactagatttgcctcttctaagtgtctatgagcttgcaccatatttaataaattgggaatgggtttggggtattaatgcaatgtgtggtggttgtattggagcagggggaattgataaaggagagtggttgctgttaatattatcttatctattgggtggtatgtgaaatattgtacatagacctgatgagttgtgggaccagatgtcatctctggtcagagtttacttgctatatagactgtacttatgtgtgaagtttgcaagcttgctttagggctgagccctggactcccagcagcagcacagttcagcattgtgtggctggttgtttcctggctgtccccagcaagtgtaggagtggtgggcctgaactgggccattgatcagactaaataaattaagcagttaacactcaccacacaaaaaaaggggggcgggcaaaaaaaacccggagggccaagttaccggaccacgttcttggacaaggggcgcaaggggggcggaaaaagagagaggggcggcgtaacagccggcggggaaacggccccggcgcgggcgggacccccccggcggccaacgggaccacccaaagaaacccggggaaaaaaag

SEQ ID NO: 270 - DNA, 2206 bp, Homo sapiens
ataccagctgaagagcgacaagccgctggcagccgcggatctcaccgccgctcaggagatctgttggtaatctgaggatttttattctacgtcgtcttgacagatggaaaacctgaagtttttagaacttcagccataaaaatgggcagaattttccttgatcatatcggtggtacccgtctgttttcttgtgcaaactgtgatacgatcctgaccaaccgctcagaactcatctccactcgtttcacaggcgccactggcagagcatttctttttaacaaggtagttaacctgcagtacagcgaagttcaagatcgggtcatgctcactggccgccacatggttcgagatgtgagctgcaaaaactgcaatagcaaactgggatggatctatgagtttgccactgaagacagccagcgatataaggaaggccgcgtgatcctggaacgtgctctagttcgagagagtgagggctttgaggagcatgtaccatctgataactcttgaagatacagagagaaatccatcttttcccaggtctccttcactgaaaacaaaaatctacttacatacactgtcaccttagcatcagagtcggattaatgaactgcggaacaagaggttgtgagaatctaagatggaacctttctttctttctttctttttttttaaattttgtattttccatccaacagcagtgtgtagagagaatattatgcagatgccgttaattttttaccctatgtttacatcttgaggcagcagagtctgtctgcagctatgtggtgagctatgtaaggaaaaaaatctgggctgttagagtgaaaaagtgtgttttatgtcaattgtgaaaggaaaatgttaggagtatggtttttaaacttgggcttcattttaaacttttttttttaaacccagttatttcacttgatttgctagcttcagagaagagatccgaatctgtgcccagcgctaaaggctcagtgttagcatggcttgtgctggccggtgtgccatattcttgttggagatgaaccgtagcaccagagcccattcttccttgtcagtcttggcccaaagatgtcaccattcctagttatttgtcaccacataattggtgttgattggaaactttttctgagatgggacagaactgctgggttgtctttttccatgtaacttaagcatagtaatataaataaagtaatagttggatgcttttggtcctgtgttgcttttaaaaacaccttataaaagaggagagtatttgataagcaattttcatagtagtaaagttttttttcatctcttaaactaaattgaccatgcatataatattctttgtttaaatgaaagcatactgttgaaacccgcagtgttgcatttagaaaacagttgaacagaatgtcaatgtgcattcatgcaaaaaaacatttaatctgcatctgttttagaaaagggggaaatgaagcaacttgtctaaaaatactgctttacaaagcatttcagcctttccccctcagttttgcattgattttttgacaagtctgtagagcctaatagtttccatcaaaggcctagatctcttatttagcatttttttcagctcttctctcagaagttcagctgttgaaacgaaaactgtactttgtaccctcacatacaaagggatcaaatttgacctggtgttattttagccccaaatttatgacattacacaatattaaaatgtaaatgtttctttacccaaactacttctagatattctagtatttgcttctggtggaattaaatgacggtaaaattggctaattatttgaatgaatgaatggatggatgttttgcatgctcaatttctaggtcctttgtctagaaaggaaatttgcctcagttgaattagtgaaatatttctgtcgttgatattaaaagtgacttctgagtacagttaagttcctcctatttgccactgggctgttggttagaagcataggtaactgattaagtaggtatgatactgcatttgaaataagtggacacaaactatcctttctccaccatggactcaatctgagaacaacagcattcatttccattcatttccatactggcttttgattatatgcagattcctagtagcatgccttacctacagcactatgtgcatttgctgtcacaataaagtatattttgtcttgcaaaaaaaaaa

SEQ ID NO: 271 - DNA, 939 bp, Homo sapiens
tcatcagccagcagtgtcagcttctagttcaaccatcaatctaatggtgagcacagaaccattggctctcactgaaacagatatatgcaagttgccgaaagacgaaggaacttgcagggatttcatattaaaatggtactatgatccaaacaccaaaagctgtgcaagattctggtatggaggttgtggtggaaacgaaaacaaatttggatcacagaaagaatgtgaaaaggtttgcgctcctgtgctcgccaaacccggagtcatcagtgtgatgggaacctaagcgtgggtggccaacatcatatacctcttgaagaagaaggagtcagccatcgccaacttgtctctgtagaagctccgggtgtagattcccttgcactgtatcatttcatgctttgatttacactcgaactcgggagggaacatcctgctgcatgacctatcagtatggtgctaatgtgtctgtggaccctcgctctctgtctccaggcagttctctcgaatactttgaatgttgtgtaacagttagccactgctggtgtttatgtgaacattcctatcaatccaaattccctctggagtttcatgttatgcctgttgcaggcaaatgtaaagtctagaaaataatgcaaatgtcacggctactctatatacttttgcttggttcattttttttcccttttagttaagcatgactttagatgggaagcctgtgtatcgtggagaaacaagagaccaactttttcattccctgcccccaatttcccagactagatttcaagctaattttctttttctgaagcctctaacaaatgatctagttcagaaggaagcaaaatcccttaatctatgtgcaccgttgggaccaatgccttaattaaagaatttaaaaaagttgtaatagagaatatttttggcattcctctaaaaaaaaaa

SEQ ID NO: 272 - DNA, 1846 bp, Homo sapiens
gatcctggcggcctgggcggccgcaccatggactcgggaaccgaggagtacgagctcaacggcggcctgcctccgggcacacccggctccccggacgcctcgccggcccgctggggctggaggcacgggcccatcaacgtgaaccattacgccagcaagaagagcgcagccgagagcatgctggacatcgcgctgctgatggccaacgcgtcccagctgaaggccgtcgtggaacacgggccccagcttcgccttctatgtgcccctggtggtcctcatctccatctcccttgtgctgcagatcggcgtgggggtgctgctcatcttccttgtcaagtacgaccttaacaacccggccaagcacgccaagctggacttcctcaacaacctggccacgggcctggtgttcatcatcgtggtagtcaacatcttcatcacggccttcggggtccagaagcccttgatggacatggcaccccagcagtaggacacccaggaccctggatgctgcctgccctgcaactcagctgcccgaccccaggagtcgccatacctgtgaggtgtccacctccctgcacatggcactacccagactgccagagcccaggctggcctcatctgcaccatgtccccggaccagcccttgctctgactgcggccaagcaccacgcaggaggccactcttgtctctcagcagctgttcccaggaggcagctccctcctggcacatgggggctggccacaatagcccagagggtcagaactggacagctgcagagacctgtgcccagagaagggtctcgacccactcaaggacacacagcaggtccgtggatgggctggatgagtgaccagggccagcctctgtctcaggacattccagaaggacaaggagatgtctctccctctcccaaagcaccagcgtccctgcctcccgtgggccctgtccgggttgccctggtgaccccagcctctgtccacttcctaacccagggaccctgcacagccagaactgcctttggccctacggatggccactggctctggtctaaagtgcctgggcttggtggccatcaagagggagccagtcaggcctgtgagggccgtagaccttgtatataccctgcaccagcagtgaccgggcagagcccaaccccctccacgggggtcccagcacccacttttctaatcatgaatgaacaaagagcgtgggctttattgttcattcatgattagaaaagtgggtgctgggacccccgtggaggttcgtggctctgcgtgtcactgctggtgagggtatatacaaggtctacggccctcacaggcctgactggctccctcttgatggccaccaagcccaggcactttagaccagagccagtggcatccgtaggccaaaggagttctggctgtgagggtccctgggttaggaagtggacagaggctggggtcaccagggcaacccggacaggcccacgggaggcagggacgctggtgctttgggagagggagagacatctccttgtccttctggaatgtcctgagacagaggctggccctggtcactcatccagcccatccacggacctgctgtgtgtccttgagtgggtcgagacccttctctgggcacaggtctctgcagctgtccagttctgaccctctgggctattgtggccagcccccatgtgccaggagggagctgcctcctgggaacagctgctgagagacaagagtggccacctccctgcacatggcactacccagactgccagagcccaggctggcctcatctgcaccatgtccccggaccagcccttgctctgactgcggccaagcaccagcacga

SEQ ID NO: 273 - DNA, 1411 bp, Homo sapiens
ttttttttttttgctctgaaaacactttattacacaaattacattcagattctgaaaatagtgttctaacagtgtaaccatctaaaaataagacatcccaaaaacacaccaactgaagaaaatttaaaaaagaatttaaatagagacttttttatttccttcattgcaatataatgttagtgattttaaaaaaataggagatttagcagctttgtcgtcatgtagcacaaagtttctctttattgccacaggctaagaatgctgaacaggaaaggcaccaaagaaagacactggcaatgaaagtgctattgggaaaatactgtgttcaagcaaagaatggggttatttacatccaccaaaaagtctcaaaagtgtaaatgggcaaatcttccattgttagattagaattatgatggaaaaagaggacggtttctctagtctatgttcatataaagacaatggcactgttatgaacttttaggaaactcctcaactagaaacagaagccaacttaaccaaaacgaagtaaataaagtgtgtacagtcccacacagactagtacagtttacaattaaatacacagaactttaaacgtgctaaagggaaaggaatctgacattctgggtaaatcttactcaatctaaatcaaagcttggttttcaggaggaggaaggtgcgagcgcaggcagaggtgctgaatactcctcttctgattcacttccatcatcctctttctcttggtcactgccctcagtgctaagccggtcaaacccttttcgactgtagcccttacggcttgcaaagaaattaccaaggtttaagcctccacttccctttcctccaaaggcccttgattttttccaccgaataaatatggcaatggccagcaggacaaccaccggaataaccagaagggttgtaatgagaacaacaggcactcccgagcctggctctttgatcagtttctgtttctcttgcatcttctgcaattctgaggaggtgggtttgttctccattttggtttcaacaactgcctcggcttctttgatttcctggacctcaatgccagcctttttaactgatcgatgttccaatttctcagtcaaggtgaacttccacacggtgttggtatgagcatctccaatgtacacagtcccatcttcagatgcaacaatatcatgaggcatatcaaagtgcttgcgcactggcttgaagatgtctataatttccccattggaaaagttcatcacaaatccttgtacaggttcttggtccccaaaatgaggcttcccattcactgcaaagagcaagcctggtatatatgaaattgcaaatacatttcttccaaatgatgaatgcttaatctctctcacaaattctttggtgtcagttttaaaacactggatccgac

SEQ ID NO: 274 - DNA, 5371 bp, Homo sapiens
ttttttttttttcagattccaaagttctgtatttttcaaaataaagatcacacattgtttagagacaatctacacaagagttacaaaaaatagttgcccaggcataagcatacacaggtttgttaattatacacatatggttacaagtgtgcttgcaaaaaagttcattggaaatatacacaaggctctggaaatgtacaccgtgtagtgttacaattctatattcaaacaaggaaaattgacagtatgttacattcacttacaagtagacaaaatgcaaaatacagttcatcttctgtacaaaagggaagggcgattcacactttacaaggtgagaggggctctgattgtaaggaaagctcgggcaaggctagacttttgcacgtccttttgactgtcacaaaatcaaaacattacttttttaggattaaaaaaacactagtgagaactcaatcttgaataacatttagaaagaatctcgctatacttgagactagatgacaaataaaaccaagctatttttttctttttaaacattaactaggctgtataaagaacatttattccttcaaaagaaaaaaatttacttctggttgaaattacaatttacaatatacaacactatatgctacgaccataaaaggtgagaatatacactgaatgcacagggctggctaattctcttttcttaccaaaaaacgtgtttatgttgattcaaacttctccacatttacattacaggtatacaaatgtacaattgtacaatcaaaagtatgttcgactactagggtacattatagatacagattagacatcaaaacaagaaaatactacaaatttgtatatatgcaaagtctacaccaagtatacactatatatttatagaagcaagaccaaaagcagagttggatttttttttctcatgctaaataatcagattttacctttcaatgttaatagaaaaaaatccagtaggcagtaaacaatcacacccgcccagcctcaaaagacgttctgggtgctcgcatctcctcctcacgaacagccttcttcagcataatatagtctccaaaaaaggcattttttagaatttcataaacttaatgtcacaaactgaagctttagcaactctgaaacctttttcattatatatatatatatatatatatattttttataaacagtgttaaatgccagtttggggtcatttaactacaattcaaacttctcaggtttttttgtttttgtttgttttttactaaaatgaggaggtggggaagagctatttgcaaaacttgccggccaggcaaatgagctaaaaaccttttcctttttttcttttttttttaaagctttttttttttgttaaaccaaccaccctgaaagtttccacatgtgaaatatagatacaacagtgaacaaaatatgtggcctcccatgtacattggttacctatgtacaagtatcctatacaccagtaaaacagcagggcaattagtcaattaaaaaaaatagtacatgttatgtgtaataaaattaaatttacaaaggcttttccactcgtggatttgattccttttttggaggagggagtaatcctggagcaaccacttgcccgtctcagactctacactagaacatttctggttgctggttggatttgccagtgggccagtgaggtcagcgggaatgagggaacagcgggtgacactgcctcagatgataccattaggggggccacagatgggccctaagtcaacaccgttcttcatgtagtacttctccagcttggccagaatgtgcttgccataggtgtacttacgaagagttgcgatgtggggccggatcttatgcatgacgatcttccgctggcctggctccgccacgtcaatcatcttctggaccacgtagttggcatactggtccttcatcatggtgtataaggcactgtggggaccgtcgttcatggtgcacacctcatcgatgagcacagcgcgctccgtacgtgaggcgtgagtaacacacttctccacaacattgcttgcaaatttgtgctgactcaatacaagtacattgcctcggatttctgctacaattttgcttttatcctcaggacgaccgtgctccagtacatgttggattacataatttccatattgatcctgtacaagctgctctgtgtgctggtgaagctcctctaaaatagggagtgtctggtcagggagacagtgctccaggattctctgaatcactcggcagccataaggatgtgtggataaggcaaatacctgtcccttaaacgcatcgatgataaattgcaaagactggggctgtacacattcaatgcatttctgaaccacgtgattgccattctgatctttcacacacttcaagacatggccatctagttcccgaaccatctcattctgctggtctgaaggaataaactcaagagctttctggataacacggcagccatacatctgtagtgccaatgacaggacgtggcctcgaatccgttctgccaaagccagcttctgttcaagactgccaaattcaaagaacttctgaatgacgtaattaccaaacacatccaccatgagttggtaggcagcctggaggatttcattgaagacaagctggcgctcagctggtgtggcacgctccagtttcagctgaatgaatctggacccatgctggtcttgggaaaattccattatatgtccagcaatctcccgcagttgtaaattggggtaccggttgtttcgaaaatcttccaaaagcctgctcctgccagaaggcatgacatcagacattccatatcgcaaacgagaggaagagaaaagagtgctgctcgggctgaagaggctggaggcgctgcttgcactgcggtacttggcttcagcgcctggagcagcagagatgtatcttccactgccattcgtgagtcctcccaggtttaagcttgaagaggatccatgtgaagagagggaaggaggtggtgtctgtgaatgtcctggtccctgactagggagaggcatgcccacgggtccaggagaggaggaaaagctaaggccgttataaaaactgtgtccaatgggggtcaagctgctcgatgtcctcttataaaggtcactgctgccagtcagggagtcacggcgggagccactgccagtgttggagtttgcaactgctgttccaaaccctccaagggcggatcccagggtggcgccgagagaactgctacttccgaatcccaaggatgtgttggcaggctgggcagagccctgggagaagagggagctgctctgtgaattgctgttcagagagttgttgccgtagaaagaactggatgccaggttgttattgggctgctgctggggctggggctgaggctgctgtgttcctaaagggcgaaatggtccatttgttgttccagcaagaccaccagctgctccatttgctgaagctgcggctgctgcaacagctgcttgtgcagctgaggaactaatgatgactggggcaggagctacaagtcgaacaggagctccaagaccatttctcgcgcctgcattcactacaagggcaccagtttggtcatagtaagcagcaggagccaacaccggataacctggcatgcctgctgccagaccttgtccaaatgcaagggcagaattcactgctgcagctgccacaaggggatccgtttgctgtccctgctggttctggtttggggtcaaaggacgttggctggctcctccacggagaacctgctgctgtccttgctgagcctgtggggtggtctgttgattagctgaattagttgctgcagcggcagcggcagcttgctgctggaaaagactggcagggtagactccccagggagtaactccataatactggtgagggaccacagctgggcctagtgtcgctgctgcagccaatccagctgtgtaggggtccgtccctgggggagcagcgctgatgatgtatggattggggacaaacgcagcgggagctaaaccgatgtgcggctgatgagcagctgccagtgcatactgctgctgctgagcagctgtcaactgctggacagcaagcgcattaggtctttggaacagctgttgttgagaattgtagtcaaaaagtcccacagttgctgctgctgagtccacaggtacctgcgtgcctgaataatcaaactgaagaggctccatgcccacatgttccatggggtccaaggggacactctgggactccatgttggagaaatcctccacaggcttggcaccattggtgctggtcagctgggctaagccctcagaaccattctggtttggacccagaagatccacttcattagcagagttctggcaattaccaggggtacggctaaaatctttgacgtctgcatcaatcccattctgcactggtaaaccattggtcttgtccatcacatcaccctcctccttcaaatctcctagcttatctccatcaaacgtacccttgttcttcttttcacctttgtcgttttcatcactgtctgcatcccttgggccaaatcctccttttcttagacaggaatcgcccggggatgagctcaacacatactccaccatgctaacgcctagtcccccactctccgatcgtggggacagtacagaattgacctcactgttcacatggaaactctgaccaggtcttctctgcaccatgattggctgggaaactgaatgatctgatgttccccaggcactgtctcgccattgatcacccaggaatattccttttggtccatctttgctggattcatctgtttcccaaaactttttacctggcaagagctgctctcccatcgctcttccctccagagcaagtgcttgaaaatcatgattcagttcatccatggaacgcacctgatgttctgcatgaatgttatccccagtaggccatcgatgtttgctattattatagccgcctcctccacttcctcctcccccaagctgctcaccatgctgcctctgaaagaagtagtccaccatagcgtcgtcctgggaacggcctgcaactcctatagatcctgggacagggctggagtgagtcccagctgcaagagcctgatttgcagctggttgtggctgcgcttgcgaccctgttccagatgtcaaaacaacaggcatgttgggattagctggttcttgagggtgatgtttcaggtgggggctgaaagagtcctgccaaagcactgcttttctcttcaagacacatgcaacgctcattccaccaacacgggcggagcggtaggatgaagatggatttcagccccccgatcttctctctctggcgctctcgctcccccttacctttcaccccc

SEQ ID NO: 275 - DNA, 1056 bp, Homo sapiens
ttttttttttttgtttcaaaaagtttattgtaaaattcaaagcttcaacagcagcatcctttagaaaacgaagcattgcccggatccgttttgaaaaagcagcgcagtcggctaagtccttcacgctcctgcaactgtaccaagtccagggcgccgctccttcctgccgagcgcaggctgctgagtcacgcctgcccggccagtctgtccttcctggccctgaggccaacgtcctagcctaggccttcctgggcgagcagccgctccagacacttgcagagtcctcagctcggaccagcctggccctgccgccaccgggcccctcctcgggaggccgcgcctcctcgctctccaggcgccccccccgcctgccagtctccacgccgcactcgggcaccctcggagggcccctccacagagccagccgcgctctaggcgccccggggcgtcaccacgtcgatcagaccaaggtccccgccgggctgtcactcggggagggtgatgctgggcacccagtcgttaacgctgcggctctcctcgcaaaacaggctgagcttctccaaggcgggatccttccaggcgtcctcgttggggttcgaaatgaggatgcagtgcaggtcgcccggcgcacccgcctcctcgccggcgcccacgatagccgccagccgctgcacatcgcccacgcgcactatgtcgatgtcgttctcgcagcagaaagcctggatcagcgtaaaatggatctgcagcgcgatgtcgccctcgtcctcctcacccgcagccagcacacagaaggtcacattgtcggggtccacgttcaagactttggctgactcgtagacgccggcagtgaggcagccctgacgctgcgccgacagcagcaactcatgcagcgctttcccggcaccctgcatcctggctgtgctttccggaactgtgtcctggccgcggacttcttccagagtcatagtgcgatcaaccagcagctagttatccacaagcggagagcgcggaggggacgcgggcgaacacactgacagccagagctcagcacggcgc

SEQ ID NO: 276 - DNA, 2530 bp, Homo sapiens
agagcttcaggccagaagataatccaacatgaggcctgaaagaaacttgggccagaaaatctccagggtacctgcccgccgaagtcccttccgaggactctcctgagccagtggctgagacatgcacatccatggtggaagctccaggtctgggcagccctctccctgcagtcacagactatgcccactaggaacacccacctgggacaaagcctggccacagtcagagagcaggacggctctcaccaagcccctcaggtggctccccgccgctgaccctgtgctgcgtggcacaggcttccccaacgccctgccacatttggcttcctccaagcaggctatgtgcttaggatgagatgtggctacttttagcaaacaacactagagtggcttcagcccagccacggtgacttctcgctcccataagagctcaagagggagaggtgatctccctccccagccactggggaccccagttcctgttgcctattctgccactgtcatcttcctgcaccacctcatggtcctggatggctgcacaggctctagccgtcatgcccctattccagctaggagaaagggggaagcataagtggcaaggagaagcaccctccccttcttcttttttttttaattgctctatacatttattattagctattattaatgcagaaccaggggacaaaaagctcacaaacactctacacaatttcacaagacacattgcaggggaaaaagtgactgagatggatcaacagtatgctagggtcttggtggactcattcctaggggaggtggacctctaattcctggtggagggggtctcattcctggagggggcatgcctactggtgtccctcgagcagagggaagcccaattggtgggcccgtgggtggcctcataccaggttcagaagctccaagtttaactgtggacattggatctgggggaacggcagtcgtgaccgtgggcaagagtagcaagatgctgccacacacggaccacagaatgagacgtatcctacaagatggccgagtcttcattggcaccttcaaggcttttgacaagcatatgaatatgatcccctgtgattgtgatgagttcagaaagatgaaactaaagaatgcgaagcaaccagcacgtgaagaaaagcgggtttcgggcccctccgcttctaaagaagcttgctgggggcgccacactcactgccattgctcagagcttggttacacggcccggccacaccaggccacacagagacaagaagcgcaatgtgctggcaaagactcttaccggaggagaaggggagaatggctgtctttgccaaatagcccgtcacgaacgtacccctgctgggcccccgcaagtgcaccaaccgactcgaaagtcccagagagggctggcgggcaaggacctgagtctccagccacccctgcaggaggagcccagggaccctcgcatccctgataaggaagcaggtggcgtgccctgctgtgaccccgaaacagcctgtagtctcaccctccatttccacgagactctaagtctgccgcttttgcagcaaaagcccagtgctgggggtgagcgtgtggggagtgtgggagacgggctctgacccggccaccctgggcagctgtgctcacgcagcacccccgccgttcccagctggacttcacctggcaggacagccaacaggcctcaccgtggcctccgtcccgggggtcgtgcatgggggactgggccagcccgagcagtgggacatgctgccttcctaccctgctccacctgccacaaacacaaactggaatgttctcagccacctccagacttcacaccctttgggctttggggcacagaggtcgggctgccctggggagaggagggagagaaggaggcttcgagagagcacggacatgagtcagacctgaaataaagcaaagccacaccgccccggaccctgcagccgcagagatgttgatgcctaagaagaaccggattgccatttatgaactcctttttaaggagggagtcatggtggccaagaaggatgtccacatgcctaagcacccggagctggcagacaagaatgtgcccaaccttcatgtcatgaaggccatgcagtctctcaagtcccgaggctacgtgaaggaacagtttgcctggagacatttctactggtaccttaccaatgagggtatccagtatctccgtgattaccttcatctgcccccggagattgtgcctgccaccctacgccgtagccgtccagagactggcaggcctcggcctaaaggtctggagggtgagcgacctgcgagactcacaagaggggaagctgacagagatacctacagacggagtgctgtgccacctggtgccgacaagaaagccgaggctggggctgggtcagcaaccgaattccagtttagaggcggatttggtcgtggacgtggtcagccacctcagtaaaattggagaggattcttttgcattgaataaacttacagccaaaaaaccttaaaaaaaaaa

SEQ ID NO: 277 - DNA, 5506 bp, Homo sapiens
ttttttttttttgtaataaagacactgcttttatttagtttgatatgtttctttacagaatgcagaaaacacatcttaaaatcatatagaaggaaataaaaacacatcagtggttggtgaacacttgaatgtgagattggctctccatctcacagagtccaacggccatcaccagcccagcgctcaggggagcaggctgcctgcaaaggcattgttgctgttgttattctgttcactgccccatcgcctccagttgctatggcaacaggccattctgggccagccacgtctctgcatggcagtgcccaatggtggagttgctaggggcgacggagctgtttggaaggcctttcaaagccctcacctggaacattgggaattgtttatttttttgatgaggtcatcagaaataatctcaccaggtcagatcccacttgtgctcctgtctctggggcaccagggaaactctgacttggaggcatgagcccagtcaccagtggtccactgagcccgcatttacaggctcccccacaggggcactgctcactccagagtaccccctggggactggggcaggggagaggggctgggccctgtgggagaaggcgcaaggggaaatgccctctggagagcagtaggacagagacctctccccccctcctaccagccctcccctcctgaggcagcacacacaaatcctctgcaaaacagtcgatatggcttagaagtagctgctctgtgtgcaaagggagcctgggtccacccacccaccctcaatcagggaatggatacattattgcgaaaggcattcctccctaaaaagtacccaaaataacgcttcagacatcaagaaaagtcatgctcaaaatggtttcttccacaggaggagaatcgaagcagagtgggcgcccctgagtcatgggacagagatgcagatggacggacggatgttctgctaaaaaaggcaaaagaaccccagtgtaattccagaatttaaaccattaggaaaagtagggggaaaagaatcaaaacaagcaaagccgtcagttccatggaatcaacacttaagagctcgtacaaactgctgtaagcatcaccattttaaatcttttttttaataaaacaatttgaggctgtataaaaactttagtaaaaaattagctttgagagctaacagatttttattatgaactattgctggcactcctccccagccgccagaccttttccagtagttcaggcccaagctggactggagtgccagagaaaagggatggggtgggtcggggcaggactgtggactgttaggacaaagcggccaaggtcaagtgaggaaagagcatcacatgacataaaaatattgcatcttcaccaaaatgtcccccactgagtgtttcaaaaaaccgtgatattccttttaggaggaaaaaaaaaaacaatgcacagaaaaagggtaaaacaaaataggttgatgtggtggagacctttgacctcccaggtgcccccacaagcagttggcccaccctggagcaccaaagttgggggccacagccaccactgcctcttggagtccctttttcatggaaatgaagaccccttggtcgtgggccactagtgtacatgggctggaagtggggatgtccatggcccaagagacccctccagcttccagcccctggcaacagcgggagagcaaacccagcaccagggacttggcgtgagccagggccgggaggcccccaatcaggctctggggtatcagagcaaccaagttgacgtagtgtgaaaaaatagtattcctttgataaaaaatactgtcccttggtcttctctaagtttgaaacaccctgggagcttatttttagcaaagcaattccccatacccacccaaaaattatacatacaagtttaggtaaacagcagattaaacgtaaaaacttaaccttaacttctgaaagtcctttgaatttaatctttagttactgttttccatgttacatcctgcagctagacacacgtgaatagaaaaaacagtacagttagtgttaaaggcaaaacgcagagagccagggggccgcccggcactgcctgcgagttcattcatggttcctcggtccctccacctccactccacatggtgctttcagagccagccatcaaaaatgaagcgaagagttctctatgaacaaaccaaaagctgttaggcaaaaaataaaaataaaaaagtccccaaagtctctccagctgctttggggtttgggaggaccagagagggcgggcttgtccaggcccctgtgtcagtgtgtgctaggtcaggtgtcggctcccggtgggcaatggtctgcaggccaccggtctccacagacaacaccatgtcgtctccagggccctgccctaccctgcctccacccaggcgcttgcgggttaaggtgggacatagggaggaggtgaccggtatggggtcatgttcttgggacgggagcccttgccctccatgggtactgtgaagggcggtgggggctggtagggaggcgcattgggatcctcatcccgcaggggcgtgtactctcccatggtgtcctggttcagaggagtggtctcgggcacactctggttggggtactcaggagggggtaggggagccttctcctcctgcagaatgagtggcatgctggaggagggtgggggcttggagtcgtccagttcgtctgcaaagatgataggcacccccttcttgatgaaggtggcctggtcctcaagggtaagcttgcccttccgcttcttgcggtagcagatcatggcaatgatgccagcaatgagcaggatggctgcgaccaccacggccggaatgactgtgtgcaggtagacatcatcctcactgctcttctcagggtccctgtcaggcacttctgtgggcggcgcctctgagggcactctcctgggtggtaccacagggataaactgtaggtgccgacaactgccagagcccgtcacagtgatgcttgtggccttaaagtcaggctctagggcgttggagaaggcaggccgaggttttccatcatcctcagcgatccggcggctcagcccagcgatctgctccttggggcagggctccaagggcagtgtgttgttggtccattccaccacgatggagccccgggtgatattctgcagggtgatggtgctacagtttcggtctccaaaggcgaaggccagtttctttaccaaggcaatcttcttgtggatgtcattcaacaccagtgccgggtcacccacaaacttggccttgaaccttgcaggagccctatccccttgggggcgcctgtggacgtggatctcgaaggcatccacagccgacaggccccccttgtctgtggcatgcatgaaatactcgtgtttgcccacgtggctgctgtcgggaaggccatacatgagctggctgttgctgttgaactgtacccaggacttctcgcccaccagctgctgctcccgcagtttcagggtcagcttcagcttgtcagtggtggtgtcctcatggtcatagaaagtgtctgacgggatcttcacctcaaagtaggtgccaacccaggcatctaccctgtcaatatggttcttgagctctgggcgctggttgggttctccgccacggggcactccactggtggtggtgcgaatacgagtaggcggtgaggcagtttccaatctggtgatggaaactttggtggtgacccggggcactggccggggtgtccgtggtttcttggttggcctgcgagtcgtggtggtggtggagtcagttgaaggcgttgctggttttggtgtggatactcgtggcttcttggtggtggttgtgggaggggtagcaactgcagtaggctccacatagccaggaatggtcatcgttgggcgaatctggccaggaactgtggtgccagcttctgacacccgagtaggctggatggggcctagggttggggtttgaataatggcgcctcgagtccggatggtgaccgtgggtttcccaggaacaggatccctgactggaggagccatggtctctgttggaggagcaatggctggagatgtgggggttggcacgatcctggatgggggctcctggatagccgtggttgggggcccaatggcagtgacaggtgtgggtgtagcatggatctgcctccggacgcgtttgggaagagggggcttcttattggcgatgtgccaacccaccacagggtagccaagctgagcagacattgcgccctccctggcaggggcctctacaccatgaatgtcaggcacactgttctggttcagggagcagcccagcttccaggagagaagggccccattctccaccaccttttttggatttcccgggccagccatgaaggccgacatgtcaaatagtctgttattcaccaccggcactaatttcatgttgtgaagctctacttctgagaagctccgcatcctgtgcaggaggtcaatcctttgctttggggtcatcttggtgaggtcggcatccaaaatcaccgtcaaaacagtcacaggttcatccgcagcacaggcagatgataccacctcaccagggtctggggaggctgtcctcaccgactgcagatcactgtggtcttcagggtagacctcgatggagaacacactggaggtctgggggatgtggctcccgttggcccccagccgtgtagcgctcactgaaatgtaatgcacacccttatcagtgtcaagggggaggccctccagggtgtggctctgtgagtcccagtgcagccaagatggcaaagcctccttccctgccgctgataccttgatgatatctccactggaggcaatcaaatctgttggaatggtcactcgaaatgagcgcccgacgacagccgtgccatcaggaatgccaaccactgtgggaacagcctcgtggaggtctgagagcactgagtgcatggatgcctcaagctggttttcccagtccctgacagcctctgagggttcactgggccagtgggactgagccataaccacagagagcaggaggagaaaggtcctcccccagaggggcagcagcagcgagaggcccacagacatcctcatcccaggtccaagtttgctcaagtcgatagtcttgctaagtaaggaagcaagtgacttggtcccagagctgggttctcaccctctgcacacctgctccatcccggagcacacagagcccagcgccggcgggaggaccgcggcaggtgttcgctcctcctggccccaggacgccgccaccgccgctccccggggattcggcgcgaagctgccgccgccgccaccgccaagcctaagaggcgcgagcgccgcgccgcagccttcgcgcgagcacgtaccgggcggtgagagggcgctgagcgcaagggcggggcgcgcggccggagcctagcaaccgcctgacacgcgagtgttgcagccaatccagcggccagctccgcgcggcgccgactggccc

SEQ ID NO: 278 - DNA, 2770 bp, Homo sapiens
aattcgcggccggctcgacctgaacctcagccgcgccgggaggcgagcccgttggcgaggggcggggcagatggcgagggagcggggcgagctgctttttgaggctgcgcactcgcatggccccacctcgcaggtccacttccggcgccgcggctgttccgggcggagaccgcttgtgctggagtcggagttgtaacgctccactgactgatagagcgaccggccgaccatggcgcccggagtggcccgcgggccgacgccgtactggaggttgcgcctcggtggcgccgcgctgctcctgctgctcatcccggtggccgccgcgcaggagcctcccggagctgcttgttctcagaacacaaacaaaacctgtgaagagtgcctgaagaacgtctcctgtctttggtgcaacactaacaaggcttgtctggactacccagttacaagcgtcttgccaccggcttccctttgtaaattgagctctgcacgctggggagtttgttgggtgaactttgaggcgctgatcatcaccatgtcggtagtcggggggaaccctcctcctgggcattgccatctgctgctgctgctgctgcaggaggaagaggagccggaagccggacaggagtgaggagaaggccatgcgtgagcgggaggagaggcggatacggcaggaggaacggagagcagagatgaagacaagacatgatgaaatcagaaaaaaatatggcctgtttaaagaagaaaacccgtatgctagatttgaaaacaactaaagcgctccagcacatcagtcccgacgcttcctgtgaggtgcacgctccgcagcccagcccagccgggagaccacgtggccattgcggtctcctgaccttggccagtgaacctgccagccttccaggacaggcggccggagagctgcccctgaaggacagtcctctcgtcttgcagactggtgaccttctattccctgttcatctctgtttctagatttagtcacttgaaataagaaatctttggggtttgggctttttttatactcttctcagtttgtgaaacgctaactgcacacgaagccgcctgacggcacccagcgctgtggctgtcattctcccagggcagaaccctgcgtttctctctgtccactaacaagcttcacacgcaacacagggaagtcggtttgacttttgtcatgaggagaactgaccagccctcatcattccccataaaaccacggacagcgtctgtgtgcgcatcttgagtcttcacacctgttgactcacacggcttttgctgatgacacggggctccagtacacagtctgataaggacttaacgtccctaacctcaattgtattaaatagcattggggaatagctaaacctttttaaaaaaatttattggattttcctccctgcttaaaagatttcaccagaaaaccttcatataaaaattcaggccctttttggacaatttttaaaatttgtatctttactagaacatgagaatctttttcccttggaagcttgaattataaatgtggtgtttggcctgcctcagcagcaccagttgactgctcgtgtgccagcggtgtggggaggacggggcaggacgctgcagctctctccagccctgttggcatcctcagtgcctgcaggcctctcgctgcctgttgggctgtctggggggtggccatttagggatcgtggggacggggtccaccccaagaagaaagaaaggcccgtccacaggcccggctctgggccacgtgccccggaagcaggtgtgtccagagtcagctgagggctctccccacaccacccagcaggcgctggtgctccttctgcctcatgggaccagtccagcttccagccgctctggctcgagggtggtctgagcacttccttctgagtgggcttctctgggagctctccagtggcactgctggacctgcccacgtttctgtaaaatcaggatacgtggctttagtaagcagaccaagcgcttcgtggcagggaaagcagcgtgcggggaagtcactgaaaagtgctgcctaaggaagtttggaaatagtccccgttccagattgccttgaattttaaaacattttgctttgggaaagtaggtcagcagcacctaagatcaaggatgcgttccattttcacacttcacagtcatgaaaactgagaagactgtcttcagcgtgaactaaagttcacaggcagatcactgatccagaacacttcaagaactcgtcaaacagctcgataagcctttttgactgtgtacatctgtaccgggaataacattcctaggctgaaatttccacaaagaatagaacctgtacccagttcttcaggctgatttccctgacctcttgggcatttgtatttgtagtaaagtattgcagagattcctaagtattttatagcagccatcaaaattggactttgtattgtttattcataaaagacacttggtaatagacttcagtgaactctgtatgaatgcagtagtgtgcgtgcaaaatccgcttcctgagcgtagggtgctgagctggcgctagggctcggttgtgaaatacagcgtagtcagcccttgcgctcagtgtagaaacccacgtctgtaaggtcggtcttcgtccatctgcttttttctgaaatacactaagagcagccacaaaactgtaacctcaaggaaaccataaagcttggagtgccttaatttttaaccagtttccaataaaacggtttactacctgcgaaaaaaaaaa

SEQ ID NO: 279 - DNA, 1393 bp, Homo sapiens
agtatggcagaggaaggaaccagtgatagtaacactggctcggagagcaacagtgcaacagtggaggagccaccaacagatcccataccagaagatgagaaaaaagaataagtgttgccttgttttgtgtgttctaaatactttttttaatgaaaaaatgttttttggttttaatggtgttacgtggtttgtgtattaattttttttcttgtccatatcacaccaccaaaggcttttggaccatttagcatcatgagcctaatggctcagtcagtcacctttcttaagtgttgtgaagatggctcttttctttggatcttgtttctagccctcaactgctgaaagcctcagaatttagattaattgagaaaacacccacctcttttagagaattatcctttgatgctgcagaatctactcttacaatgccttcctacagctcactggggtgcttaccaaagccatagctttaaaccttcccagtccccatcagtagcttcctgaaagtctcctctcttgtttacttctgcaaagggtagcttcttaaaaacgtgatcatgtatgagtatgtatttgttcacttacccttttttacttttaatcaatgtcagataccaagagttgtgttaagctgagtgtagtgtgtaactaactacacttggatcttactgatccagaaatagtccccatagttagagtagttacttatgaagtggttattaaagtgaacacagcacatatacattatctatactgctttttgttatgattaatactgggtatgttctggtaaatccatccttattgtatagaaaaaaaattacttttttaccaggttttccaaagacagaatagatcacaaagctcaaggaatttaatattcttgtaatggactagataattcaaactgattagcccattccagaagaaaacacagctgggaattaagttaatccacttgaaattgttttacaataatcagaacatccaaacctcaagggctcaggatcccatagaccagagcccacctttttgataaacttagttaaagttctggaggactagaaagcaagaatcgtttgtgacacaataaggcttcccaaaaactagaatagatttttactgaatagtggtatatctgatggtattatgttcttaaaggtcaaatgtactagcacacaactgaaactctctacaacaaaaaaggggggggggtttaaatttcttgagggggccaagttaggttaccagtttttgtaaaggggcccaaaggaggattaaagcacggaggcgggttaaaggtggagggaacggctgggattggaagacctttgggggattgcacactcagatagctggataataggttgtgaaagattcggggagagcgata

SEQ ID NO: 280 - DNA, 930 bp, Homo sapiens
ttttttttttttccaaggagtgggaaggttttaatgagcatcccagagggaccaggggatacaaactccaaatccagcctttatatcatcattatttcaagcaacaggaggaggctcagccttgcttagctcattcccagatgaagaggcagctggagggaagtccctgaaagtgcctctctacccagcagaggggctaagggaaagtggagaggtctctgctgctgctgctgctgctgctgctgctgttgctgctaccactgccaccaagagcagggagacctcaagcaccaagctgacctttggaggtcaggacggacccagaatcaggcaggaatttggcaggaacatcagacattggaaggttagatgagactgaacaggtgagaaaactcttagggtccccagacagcattgagatctcacagaggggccccaagggcctgcgactccaggagctgagaccccccagggagggaggtacctctagactgagacactcacaaagggaccccagttcagcaagggtcagaggaaggtctggagggagaagagagtaaagggccctgggtgggcaggaggctgaggagggagcctggggagagcaccaggtcggggcatcaggccagtgcctggaaggtgtggccaaaggggtctctagctgctgctctgctgctcctgctcatgggatgagtttggcgatggggccggtgatgccgcctatcaaggtccaggtactcatcgaagctgatgcgcccgtcatgattggcctcccaggttctggatgagcttatccgcagctttccggttccctgtgttcgacagcatgtgggttcagctctttcctggagcatctcgcggaaagctgctcttgctgatcttgttctgaccggctgttcttgacccttcttgttgaacttttcccccgaa

SEQ ID NO: 281 - DNA, 8910 bp, Homo sapiens
agctcacagctattgtggtgggaaagggagggtggttggtggatgtcacagcttgggctttatctcccccagcagtggggactccacagcccctgggctacataacagcaagacagtccggagctgtagcagacctgattgagcctttgcagcagctgagagcatggcctagggtgggcggcaccattgtccagcagctgagtttcccagggaccttggagatagccgcagccctcatttgcaggggaaggcaccattgtccagcagctgagtttcccagggaccttggagatagccgcagccctcatttgcaggggaagatgattcctgccagatttgccggggtgctgcttgctctggccctcattttgccagggaccctttgtgcagaaggaactcgcggcaggtcatccacggcccgatgcagccttttcggaagtgacttcgtcaacacctttgatgggagcatgtacagctttgcgggatactgcagttacctcctggcagggggctgccagaaacgctccttctcgattattggggacttccagaatggcaagagagtgagcctctccgtgtatcttggggaattttttgacatccatttgtttgtcaatggtaccgtgacacagggggaccaaagagtctccatgccctatgcctccaaagggctgtatctagaaactgaggctgggtactacaagctgtccggtgaggcctatggctttgtggccaggatcgatggcagcggcaactttcaagtcctgctgtcagacagatacttcaacaagacctgcgggctgtgtggcaactttaacatctttgctgaagatgactttatgacccaagaagggaccttgacctcggacccttatgactttgccaactcatgggctctgagcagtggagaacagtggtgtgaacgggcatctcctcccagcagctcatgcaacatctcctctggggaaatgcagaagggcctgtgggagcagtgccagcttctgaagagcacctcggtgtttgcccgctgccaccctctggtggaccccgagccttttgtggccctgtgtgagaagactttgtgtgagtgtgctggggggctggagtgcgcctgccctgccctcctggagtacgcccggacctgtgcccaggagggaatggtgctgtacggctggaccgaccacagcgcgtgcagcccagtgtgccctgctggtatggagtataggcagtgtgtgtccccttgcgccaggacctgccagagcctgcacatcaatgaaatgtgtcaggagcgatgcgtggatggctgcagctgccctgagggacagctcctggatgaaggcctctgcgtggagagcaccgagtgtccctgcgtgcattccggaaagcgctaccctcccggcacctccctctctcgagactgcaacacctgcatttgccgaaacagccagtggatctgcagcaatgaagaatgtccaggggagtgccttgtcacaggtcaatcacacttcaagagctttgacaacagatacttcaccttcagtgggatctgccagtacctgctggcccgggattgccaggaccactccttctccattgtcattgagactgtccagtgtgctgatgaccgcgacgctgtgtgcacccgctccgtcaccgtccggctgcctggcctgcacaacagccttgtgaaactgaagcatggggcaggagttgccatggatggccaggacgtccagctccccctcctgaaaggtgacctccgcatccagcatacagtgacggcctccgtgcgcctcagctacggggaggacctgcagatggactgggatggccgcgggaggctgctggtgaagctgtcccccgtctatgccgggaagacctgcggcctgtgtgggaattacaatggcaaccagggcgacgacttccttaccccctctgggctggcggagccccgggtggaggacttcgggaacgcctggaagctgcacggggactgccaggacctgcagaagcagcacagcgatccctgcgccctcaacccgcgcatgaccaggttctccgaggaggcgtgcgcggtcctgacgtcccccacattcgaggcctgccatcgtgccgtcagcccgctgccctacctgcggaactgccgctacgacgtgtgctcctgctcggacggccgcgagtgcctgtgcggcgccctggccagctatgccgcggcctgcgcggggagaggcgtgcgcgtcgcgtggcgcgagccaggccgctgtgagctgaactgcccgaaaggccaggtgtacctgcagtgcgggaccccctgcaacctgacctgccgctctctctcttacccggatgaggaatgcaatgaggcctgcctggagggctgcttctgccccccagggctctacatggatgagaggggggactgcgtgcccaaggcccagtgcccctgttactatgacggtgagatcttccagccagaagacatcttctcagaccatcacaccatgtgctactgtgaggatggcttcatgcactgtaccatgagtggagtccccggaagcttgctgcctgacgctgtcctcagcagtcccctgtctcatcgcagcaaaaggagcctatcctgtcggccccccatggtcaagctggtgtgtcccgctgacaacctgcgggctgaagggctcgagtgtaccaaaacgtgccagaactatgacctggagtgcatgagcatgggctgtgtctctggctgcctctgccccccgggcatggtccggcatgagaacagatgtgtggccctggaaaggtgtccctgcttccatcagggcaaggagtatgcccctggagaaacagtgaagattggctgcaacacttgtgtctgtcgggaccggaagtggaactgcacagaccatgtgtgtgatgccacgtgctccacgatcggcatggcccactacctcaccttcgacgggctcaaatacctgttccccggggagtgccagtacgttctggtgcaggattactgcggcagtaaccctgggacctttcggatcctagtggggaataagggatgcagccacccctcagtgaaatgcaagaaacgggtcaccatcctggtggagggaggagagattgagctgtttgacggggaggtgaatgtgaagaggcccatgaaggatgagactcactttgaggtggtggagtctggccggtacatcattctgctgctgggcaaagccctctccgtggtctgggaccgccacctgagcatctccgtggtcctgaagcagacataccaggagaaagtgtgtggcctgtgtgggaattttgatggcatccagaacaatgacctcaccagcagcaacctccaagtggaggaagaccctgtggactttgggaactcctggaaagtgagctcgcagtgtgctgacaccagaaaagtgcctctggactcatcccctgccacctgccataacaacatcatgaagcagacgatggtggattcctcctgtagaatccttaccagtgacgtcttccaggactgcaacaagctggtggaccccgagccatatctggatgtctgcatttacgacacctgctcctgtgagtccattggggactgcgcctgcttctgcgacaccattgctgcctatgcccacgtgtgtgcccagcatggcaaggtggtgacctggaggacggccacattgtgcccccagagctgcgaggagaggaatctccgggagaacgggtatgagtgtgagtggcgctataacagctgtgcacctgcctgtcaagtcacgtgtcagcaccctgagccactggcctgccctgtgcagtgtgtggagggctgccatgcccactgccctccagggaaaatcctggatgagcttttgcagacctgcgttgaccctgaagactgtccagtgtgtgaggtggctggccggcgttttgcctcaggaaagaaagtcaccttgaatcccagtgaccctgagcactgccagatttgccactgtgatgttgtcaacctcacctgtgaagcctgccaggagccgggaggcctggtggtgcctcccacagatgccccggtgagccccaccactctgtatgtggaggacatctcggaaccgccgttgcacgatttctactgcagcaggctactggacctggtcttcctgctggatggctcctccaggctgtccgaggctgagtttgaagtgctgaaggcctttgtggtggacatgatggagcggctgcgcatctcccagaagtgggtccgcgtggccgtggtggagtaccacgacggctcccacgcctacatcgggctcaaggaccggaagcgaccgtcagagctgcggcgcattgccagccaggtgaagtatgcgggcagccaggtggcctccaccagcgaggtcttgaaatacacactgttccaaatcttcagcaagatcgaccgccctgaagcctcccgcatcgccctgctcctgatggccagccaggagccccaacggatgtcccggaactttgtccgctacgtccagggcctgaagaagaagaaggtcattgtgatcccggtgggcattgggccccatgccaacctcaagcagatccgcctcatcgagaagcaggcccctgagaacaaggccttcgtgctgagcagtgtggatgagctggagcagcaaagggacgagatcgttagctacctctgtgaccttgcccctgaagcccctcctcctactctgcccccccacatggcacaagtcactgtgggcccggggctcttgggggtttcgaccctggggcccaagaggaactccatggttctggatgtggcgttcgtcctggaaggatcggacaaaattggtgaagccgacttcaacaggagcaaggagttcatggaggaggtgattcagcggatggatgtgggccaggacagcatccacgtcacggtgctgcagtactcctacatggtgaccgtggagtaccccttcagcgaggcacagtccaaaggggacatcctgcagcgggtgcgagagatccgctaccagggcggcaacaggaccaacactgggctggccctgcggtacctctctgaccacagcttcttggtcagccagggtgaccgggagcaggcgcccaacctggtctacatggtcaccggaaatcctgcctctgatgagatcaagaggctgcctggagacatccaggtggtgcccattggagtgggccctaatgccaacgtgcaggagctggagaggattggctggcccaatgcccctatcctcatccaggactttgagacgctcccccgagaggctcctgacctggtgctgcagaggtgctgctccggagaggggctgcagatccccaccctctcccctgcacctgactgcagccagcccctggacgtgatccttctcctggatggctcctccagtttcccagcttcttattttgatgaaatgaagagtttcgccaaggctttcatttcaaaagccaatatagggcctcgtctcactcaggtgtcagtgctgcagtatggaagcatcaccaccattgacgtgccatggaacgtggtcccggagaaagcccatttgctgagccttgtggacgtcatgcagcgggagggaggccccagccaaatcggggatgccttgggctttgctgtgcgatacttgacttcagaaatgcatggtgccaggccgggagcctcaaaggcggtggtcatcctggtcacggacgtctctgtggattcagtggatgcagcagctgatgccgccaggtccaacagagtgacagtgttccctattggaattggagatcgctacgatgcagcccagctacggatcttggcaggcccagcaggcgactccaacgtggtgaagctccagcgaatcgaagacctccctaccatggtcaccttgggcaattccttcctccacaaactgtgctctggatttgttaggatttgcatggatgaggatgggaatgagaagaggcccggggacgtctggaccttgccagaccagtgccacaccgtgacttgccagccagatggccagaccttgctgaagactcatcgggtcaactgtgaccgggggctgaggccttcgtgccctaacagccagtcccctgttaaagtggaagagacctgtggctgccgctggacctgcccctgcgtgtgcacaggcagctccactcggcacatcgtgacctttgatgggcagaatttcaagctgactggcagctgttcttatgtcctatttcaaaacaaggagcaggacctggaggtgattctccataatggtgcctgcagccctggagcaaggcagggctgcatgaaatccatcgaggtgaagcacagtgccctctccgtcgagctgcacagtgacatggaggtgacggtgaatgggagactggtctctgttccttacgtgggtgggaacatggaagtcaacgtttatggtgccatcatgcatgaggtcagattcaatcaccttggtcacatcttcacattcactccacaaaacaatgagttccaactgcagctcagccccaagacttttgcttcaaagacgtatggtctgtgtgggatctgtgatgagaacggagccaatgacttcatgctgagggatggcacagtcaccacagactggaaaacacttgttcaggaatggactgtgcagcggccagggcagacgtgccagcccatcctggaggagcagtgtcttgtccccgacagctcccactgccaggtcctcctcttaccactgtttgctgaatgccacaaggtcctggctccagccacattctatgccatctgccagcaggacagttgccaccaggagcaagtgtgtgaggtgatcgcctcttatgcccacctctgtcggaccaacggggtctgcgttgactggaggacacctgatttctgtgctatgtcatgcccaccatctctggtctacaaccactgtgagcatggctgtccccggcactgtgatggcaacgtgagctcctgtggggaccatccctccgaaggctgtttctgccctccagataaagtcatgttggaaggcagctgtgtccctgaagaggcctgcactcagtgcattggtgaggatggagtccagcaccagttcctggaagcctgggtcccggaccaccagccctgtcagatctgcacatgcctcagcgggcggaaggtcaactgcacaacgcagccctgccccacggccaaagctcccacgtgtggcctgtgtgaagtagcccgcctccgccagaatgcagaccagtgctgccccgagtatgagtgtgtgtgtgacccagtgagctgtgacctgcccccagtgcctcactgtgaacgtggcctccagcccacactgaccaaccctggcgagtgcagacccaacttcacctgcgcctgcaggaaggaggagtgcaaaagagtgtccccaccctcctgccccccgcaccgtttgcccacccttcggaagacccagtgctgtgatgagtatgagtgtgcctgcaactgtgtcaactccacagtgagctgtccccttgggtacttggcctcaaccgccaccaatgactgtggctgtaccacaaccacctgccttcccgacaaggtgtgtgtccaccgaagcaccatctaccctgtgggccagttctgggaggagggctgcgatgtgtgcacctgcaccgacatggaggatgccgtgatgggcctccgcgtggcccagtgctcccagaagccctgtgaggacagctgtcggtcgggcttcacttacgttctgcatgaaggcgagtgctgtggaaggtgcctgccatctgcctgtgaggtggtgactggctcaccgcggggggactcccagtcttcctggaagagtgtcggctcccagtgggcctccccggagaacccctgcctcatcaatgagtgtgtccgagtgaaggaggaggtctttatacaacaaaggaacgtctcctgcccccagctggaggtccctgtctgcccctcgggctttcagctgagctgtaagacctcagcgtgctgcccaagctgtcgctgtgagcgcatggaggcctgcatgctcaatggcactgtcattgggcccgggaagactgtgatgatcgatgtgtgcacgacctgccgctgcatggtgcaggtgggggtcatctctggattcaagctggagtgcaggaagaccacctgcaacccctgccccctgggttacaaggaagaaaataacacaggtgaatgttgtgggagatgtttgcctacggcttgcaccattcagctaagaggaggacagatcatgacactgaagcgtgatgagacgctccaggatggctgtgatactcacttctgcaaggtcaatgagagaggagagtacttctgggagaagagggtcacaggctgcccaccctttgatgaacacaagtgtctggctgagggaggtaaaattatgaaaattccaggcacctgctgtgacacatgtgaggagcctgagtgcaacgacatcactgccaggctgcagtatgtcaaggtgggaagctgtaagtctgaagtagaggtggatatccactactgccagggcaaatgtgccagcaaagccatgtactccattgacatcaacgatgtgcaggaccagtgctcctgctgctctccgacacggacggagcccatgcaggtggccctgcactgcaccaatggctctgttgtgtaccatgaggttctcaatgccatggagtgcaaatgctcccccaggaagtgcagcaagtgaggctgctgcagctgcatgggtgcctgctgctgcctgcctgccttggcctgatggccaggccagagtgctgccagtcctctgcatgttctgctcttgtgcccttctgagcccacaataaaggctgagctcttatcttgcaaaaaaaaaa

SEQ ID NO: 282 - DNA, 3330 bp, Homo sapiens
ttttttttttttgccttaacaaaaataatttattccacacacctcccaaggcagggggtagcgtgggaatcaagcatgtgtaaggcactgcccccgccagacccttctaacttctgcacactggaaggtgaaacctggagagagaagacactcccctccctagcttctacctggcaccctccaaagatgagcattcatcttggagaccaaaataaaaaaggacaaaagaccaggctcagagggagcagagctcaatggggggaagtgaaagcagccatcttctcctgcagctaagccagggcaaggcactagagacccacatccttcccatgccaccaactcgtcaggtcccaccaagcaagccactcaccctacagcccagcaaccatggcttgcctcacctgggagaccagcacgacttccagaagcttccaaaccccaccctgaagccaaaccccacccaggaggtctgaggagctggaggctggccaggcatagagggcccggggtggtccttcctcccagggtgcaaaggcttcttcattgtccggaagggagcagggtgggcggagccccagcagctagtgaggagttccattccagcccacccagctgggggaccctcctctggcttcacttgccccagttgagggccaagaccaagcaggagagactgaggctccagtgagaatgaggcaggacttcaaataagctgaaaaacaggaatgtggtgctaagaggccagggactgagctgccctatgcccactgcccggggctgccctccctgcacagcaggggaacctggaccctgctcctgtcttttgtgtcaaaggagctctctgtcctagcaaccccaagaagcttcactggagcaactcgttttcctgaatttcccacacttctaggccagacaaggagcaaggggtgggaggggagggaatggggtcagggggcttgaggtgcctagagatggcagctccctctcccgcctcctccccaggtggttcaggctgcagggtggccagcatggcccttcagggcccttatcttggcctggaagtaggtgtacatggccagcaggcccatgaaggacagggaatagagccccacacagaggctgatgtccaggtaagagaagccccctcccagcacctgcagccactggcctcggccccgtccagctcgggcctccagctggccctcagggatgtcgaccagctgcttggagctgcggcccacgcgcctgacctccaaagggccccagaggcggttcttctcagccctggactcagccagcaatgcagcccctgtgtctcgcttgctcaagtgccactgcccaagcggctgctcctgctcattcctctgaagctctgccatgtgctcaggaggctcctggcctggtgcagctctgaggccagggtgcagcttcgggggtcgacttgcctcaggtccctcagccggcacatgtggggtggtgtttgtgggggacttcatcatctcaggcttcccagggtccagagttgaattccggctttccagctccagggctcccatcgccagctctggggcggctgccacattctgcacatccctccgggcagctgacccagctgcagggaagtccaggatgatgttgcttggggagaagtgggccttgaggaagttgagggtggcttccacgtcccacacgggcacatccaggcgttcattgtggcaggcagaacaaagttcacggggtggccactgcaccttggggaactgggggtcctcgctgggggcacctgcaaggcgagcattgaccctgttgtggctagaccagagccagaggacagcggcgttgggactccccacccggtgcatggaggcagcagccatctgctcgaagtggctagcgcagtctcggcagccgaagaagtagtgcacgtagcctcggatggctgggaggacctccttggccttggctgcttcctgtgagtggtctacattttgatccgagctgcctgcacagtctagaagtggaagaggacccacagggagcagggaaagccccggaaatgcggctcactcccctggcagccaatccagttcaccttcttggcaagaacggcaccctctttcctgtcgtccagggcagttttaaagaaactgtagggaattttatttctcttctgcctcttgagccattcattcacggagtgcaggaagttctggactaagggccggccagggaaatacttggccagcactgccacaaactttttcagggccacccaggcgctgcccttccaggaccgggaacctgcccacttctatccgcaggatgtagtgcagtgcagattccaggtcagccatgtagatcttggagcgatctgccaatttccaaacagtgggagctatcttgttagcagtggttggtgcaactgtggtctgggcagcctccctggtgagcccagagagtctctgcaggtaagcggtatagaaggacctggattccatgagcacggggactcgggagacagagccattccggaacagcaggtagcaagaggggaagtcggtgacaccaaactttctcaccacattggcctctgtgttcacgaccctcgcgcaccgccacgcctttgtgctgggacaggtccagagccacctctctacccaggtaggagcctcccttttcaaagatcagagccaggtactcttcgttatttctcgcaaagaatccatcaatctcctccagcttggcaggctccagtgggggacaggctgggggccacgtgtcatgatgggactccagggcgtcaatgagcctctcccgcagcgtctgcacgtcagcaccagccactggaaatactgctcccgagccgttcttggtaaaggccttgaagaacctcacagtcgggaagccagggatgttgaagtctctgcagactgcactgttggtctcctcagcacagtccagggcggcgagatacagggccggcctccagcgtttgacgtcttcggccagcgccttccacgtcggggcgaaggcgatcgagtggccgcaccaggaggcgaagaactccacggcccaggcgctgcgggagcccagcaccgcgccgcgcaccgtgtccgcctgcagcagcgtcagcgggtcggaaggcgaatagagcgccgaccgcggggccgcgttagcgccgggaaccgcgagcagccacagcagcagcagcagcagcgacggcggcggcccggagccgctgttgcacctcctcatcctcggcgctgcgctcaccaccacacgcaagcaccggatgagtcgggtcccggcgccgcggcaccgcctgcctcc

SEQ ID NO: 283 - DNA, 1443 bp, Homo sapiens
ggagcggtggggtcggcgtgagctggttgagggtgcgggtgttgtcgtgcgggtgctctggtgtggcgcgcggtgcgcgccgggtgtggggtcgtgggggtcggtcgggtgtgtggcggctggggggtgtgtgtcggcgcgctggttgtttgattggccgactgtgtgggtccgttcggtaggagggtgtgggtctgggtggggtgctctctggggggttgttttgtgtcgccgccggtgtttgttgtggtttggtgggttgggtgtgtgtgggtgattgtcggttgtgttgttttaccatatgcttatgtttattgtacagtcacaagttacatgttgtaaatcaagcagaacactgtaccagttttcactaactcaaatcaagttagcaaattacaaattttagaacagattcattttctgtctcacccaatgtgggtgaccacaaagatatttactttctatgttattaggtagcaaattaatttgatatactacacagcttccaagttaccttaggatatttcaaagtgtttcaaaactggtaaagaataattcatttccagcctgaaatacaatgcagaatggaccatttaggggtaaataacctcacttaatcactctttcctgctaacaaaaataatacaaatatttgtttatattaggcttactaaattaatgacaactttgaaattatctagatttggttacattgttatattgcacttgagaacaatgacaaaaaacatcaaagattcagtacctctcccaagaagttcattatatatcagaaattaaaatgaaatataagcatatattgcatgctgcatatttctatcgttcaaaccagccaaccaacaaactaaaaggaatactctccaaaacactgagtattaagtaatttcatctgccttttttgatcctacaatcatttttcaaattttaggtgtttttctttaaattattcatcaaactactacatatacaagctatccaagaatgcaaacaaggtgacattgagatgggtagtggctgcacataggtattccaagaacgactcattcttctccaccaagctcatcattacattttgcaacttaggaagatctgccaacttacaaattctgtttgccttacaaaaatcgctgatctattatatacaatacttttatcacacaaatctctcccttagggtcatgattcactatcaaaaatctttcacagccctcttaagccagtaaagtctcttttattaatacttgagttttctttatggaaatgtaagtgttaatgagaattaactatgaataagtagtttcataacacaggtagaatgatggcaataatattttgactaattgtctttacctttcagattcagaattacagtgataatcgttaagagaaaagagaaacagaaaaaatgactcacatgtatttttc

SEQ ID NO: 284 - DNA, 2773 bp, Homo sapiens
gtgacggggactgcggccacaggcaggaaggcgctcctctcctgccccgccgacgcccggccagcccgcttcgccctgacctgtttcctcatgactgcccccggccctgctgccgacggacgtcgccccggcgtccggatttaacacggaaacccggaatcggaggccgcgcggggaggaggagggcgacccggtcggtcctgcgaccctctcggcccggctcggcgcctcggcgggagccatgacctcgctgacccagcgcagctccggcctggtgcagcggcgcaccgaggcctcccgcaacgccgccgacaaggagcgggcggcgggcggcggcgccggcagcagcgaggacgacgcgcagagccgccgcgacgagcaggacgacgacgacaagggcgactccaaggaaacgcggctgaccctgatggaggaagtgctcctgctgggcctcaaggaccgcgagggttacacatcattttggaatgactgtatatcatctggattacgtggctgtatgttaattgaattagcattgagaggaaggttacaactagaggcttgtggaatgagacgtaaaagtctattaacaagaaaggtaatctgtaagtcagatgctccaacaggggatgttcttcttgatgaagctctgaagcatgttaaggaaactcagcctccagaaacggtccagaactggattgaattacttagtggtgagacatggaatccattaaaattgcattatcagttaagaaatgtacgggaacgattagctaaaaacctggtggaaaagggtgtattgacaacagagaaacagaacttcctactttttgacatgacaacacatcccctcaccaataacaacattaagcagcgcctcatcaagaaagtacaggaagccgttcttgacaaatgggtgaatgaccctcaccgcatggacaggcgcttgctggccctcatttacctggctcatgcctcggacgtcctggagaatgcttttgctcctcttctggacgagcagtatgatttggctaccaagagagtgcggcagcttctcgacttagaccctgaagtggaatgtctgaaggccaacaccaatgaggttctgtgggcggtggtggcggcgttcaccaagtaactctgctcggggtgaaccattctcctttctctcaagtaaaccagtagtttttcttctgttgacttctggttttctgtaatttgtactttcccacactataattggcttctgttttacaaaatggtgggtggctttttcttttttgtacgtgtacaggattctgctggtacgagaggccttcctctttctgtttttaaaaaaagttttactgccatattggcattccattccctgttgccatcctcactgttacctgttttgggtttctggtctactttgactttcaaagtacctccagcctcctcatacgcacagcttttggatgacctcagcttgagtttctccatatgtgcatgtacatctagcattctgcctacagttcagacagaagtcacaaaaaggccttcaactcaccaaaggtaaatatctgtatctattaggacattttttacatagacttcagttgagatgtatacttagcaaaattatttttaaattgaaacagcacagtaaatacttaatataaaatgtcccttggattttgcttcccatgtaaatctattgtattattacacttgttataattttaactataaaggtccaattgtttcacagagccagtttgggatgggctgcattccatttatgctgtatatagtttgaattatatataaattaccccttcttctggccacccctgctcccatcttagtattttgcaagatctaatcagttgtacacctggtgcccctcgcttgcttcaatcatggttatttgatggcaaaatcgacctcttgtcgctgaaggagagagaaaagatgtgtgtctgattggtcctgggattttttgagctgtgccatttatggtactctttgcctatgcatcccctttttagattttttttaaattttatcttactgtttttataatttctattgggaagaggcttgtgaccagtaccaatcttgagtttctttttctgtccacaagtaaattaatatctgctctgaaatgtcatttatctactcacacattcttggggaaaaaaatcaaatgtcagtcctagcagatgttgcatgtaaattggtagcaagtaatgattacaacccagaggattaagaattttgtaacagaaagctctatgttttaattttttatatacaattaggataattagcattgtcagactataaacctttgctttttaaagtttatttttactatttctttatcactttattgtatcatcaccattggtttcataatgtaaatactatatgttgaacaaattaaatgtcaaaattttttattaccatagtccatgttaatagtggggctttcaggtgtttagagattttttttgttgttgttaacattcattgcaaaagtactagatggtgtataactctagagttgaattttaagggattccctaatatgtatactatctttttatctgaagtaataaataaacaatgatcttgttacaaacactaactcacttcccaacaacaaactttttgggcccactgcccccgaaaagttttcaaacccttgttggggccggggccacaggtaggacagggccacgggggtccagggaaccccggccagctctggggtggttcccccaaa

SEQ ID NO: 285 - DNA, 4529 bp, Homo sapiens
ttggcccgtgcgtggggctggggtggagggcgggacagaggggctgggcccaggcaaagcttctgtcgctgctgctgcggaggccgaggacaggacgtgggctgggccgggcagtgccggactcggaggagcaggaggcgaggtccgccggagctctgaacccccgctgctctgccgcgcggtgaccccgcgccccggcgccgtccgacccgtggctgttccgagacgattggtgggggcgcggcggcggcggcggcggctgttgggggtggggagacgcgcggcgaggagacgagcgaggtcagcgagtttgagggaggaccgcgagccgctgccgccgtcatgtccgaggactcgagcgccctgccctggtccatcaacagggacgattacgagctgcaggaggtgatcgggagtggagcaactgctgtagtccaagcagcttattgtgcccctaaaaaggagaaagtggcaatcaaacggataaaccttgagaaatgtcaaactagcatggatgaactcctgaaagaaattcaagccatgagtcaatgccatcatcctaatattgtatcttactacacatcttttgtggtaaaagatgagctgtggcttgtcatgaagctgctaagtggaggttctgttctggatattattaagcacattgtggcaaaaggggaacacaaaagtggagtcctagatgaatctaccattgctacgatactccgagaagtactggaagggctggaatatctgcataaaaatggacagatccacagagatgtgaaagctggaaacattcttcttggagaagatggctcagtacagattgcagactttggggttagtgcttttttagcaactggtggtgatattacccgaaataaagtgagaaagacctttgttggcaccccttgttggatggcacctgaagttatggaacaggtccgtggttatgatttcaaagctgatatttggagttttggaattacagcaattgaattggctacaggggcggctccttatcataaatatccaccaatgaaggttttaatgctgacactgcagaacgatcctccttctttggaaactggtgttcaagataaagaaatgctgaaaaaatatggaaaatcatttagaaaaatgatttcattgtgccttcaaaaagatccagaaaaaagaccaacagcagcagaactattaaggcacaaatttttccagaaagcaaagaataaagaatttcttcaagaaaaaacattgcagagagcaccaaccatttctgaaagagcaaaaaaggttcggagagtaccaggttccagtgggcgtcttcataagacagaggatggaggctgggagtggagtgatgatgaatttgatgaagaaagtgaggaagggaaagcagcaatttcacaactcaggtctccccgagtgaaagaatcaatatcaaattctgagctctttccaacaactgatcctgtgggtactttgctccaagttccagaacagatctctgctcatctacctcagccagctgggcagattgctacacagccaactcaagtctctctcccacccaccgcagagccagcaaaaacagctcaggctttgtcttcaggatcaggttcacaagaaaccaagatcccaatcagtctagtactaagattaaggaattccaaaaaagaactaaatgatattcgatttgaatttactcctgggagagatacagcagagggtgtctctcaggaactcatttctgctggcctggtcgacggaagggatttagtaatagtggcagctaatttgcagaaaattgtggaagaacctcagtcaaatcgatctgtcactttcaaactggcatctggtgtcgaaggctcagatattcctgatgatggtaaactgataggatttgcccagctcagcatcagctaaaccacaaccctggaagaggcggcctaaggagattccacacatgcgtatctctgttgcttctattggcctaaacccactactgccaaagaacccagcaacaaacctcccggctaggagctttagaagtctttatgttcttcctgccatcattcctccttttcccacagggaaagaaaagttggatcactagtggccagcatccccagagttccgttagtaaacttacttcatatgtcccctgtcttcctccatctgagaagtggcccatgtgcttcaaggcccaggagggagatctgtcagctcattcttgccttactccaatgatggcccaggtggaaaagtagcagctgtatcgggcttcctcatcctgcctgttcccccacacctgccaggatatggacatcttgggatatctctttaccactgaagtagaattgattgttcagctggagcccagagaatttaatttaatgttttttctttgtacctgatgtgaattctagcaacctttgttaggaaaaagcacagcctcagatggaggcagcctaaactgtgttcttgttttgttcatggtgtttctaagcgttttgctgaagctgctctcaggcacccccttcttcattgctctctccagaaagggttgctagccttaacttcagctggtgcaaaacatctgactgtagccgaacttcagccatcagatccttcaaagtggaactttggattgtttttacagacaacatcgagtaatggcttgtaaatgtgaattttgccagaggtggtttttgaacaggaaaatcataattcatatcattggagaagtatttattttcaaatatcaaattgaagaaaaactcaatcctcccatgaaaatcagttcgcctggcctccaagtcgtgaggaaatgggtatgcaaggctgagatttctacagcaataaaggagacacacactgggccagagaggcctgccttctgcctgctctcctgcactgaccctttggagggggtctctgtgtgctgaagctaactcaagatggaaagtgaaaccacatgtgccgtgacctttaggttttatgagtagacagtgttcatttgattttctacagaaataatataaattattctttaggtttaaaaaagagcactcataatgcaatatgtgaataatcagtgaggttgatttttcttttttcctaccgtttcatagtctttgtctaactgctagtaaccctaccgagttttatatatgagtgggatactcaatctggccttaaaaagatacacaaagatgggctgtgggtccctggaaagggggagagttgccctttacagaatcactcgagccctttccagcactgttggtctgatgaacaaggttgttttaccttattttctcttggaacatatctgaaaaccttccccacaaataacttgtcacaccttttgtttcattctgagtctttagttttagtcatgggctttcttcacctgctctaggtgcaaaggcatgttgggaaagagatggatgttggggaggaagagaggagatggatttcagttgggagttaggaggagagtaggtgagatgatcagacaccggagttcaacgtcccagcagtcttggtaaaaggagggagcctgctgagccaggagggagaaaagaagattgaccagcttgctagaaaaatacttagcttttctttttctttttttgtggaggggggacggagaggaacaaggatggggaggtaggaatgaggtatagaaaagagatagcatcttctttggcacaagactagtggcttaccgcttaccttagagttttgttttttttttttcaaacccatcaaaatctacttatttatgaatccaaggggtggcagcatcactctgttctagcattctttgtggagatggtctggtgcctagctgggagtgagcagcagcccatcccctgttcactttctctagcccatcattacctgtgaactgcagtggggcagtcatggcaaatagaattgggctggggtttctccttcttttcagttcattgtttgccctgctaggaattagaagacagacaccatgtcccaggacagtgttacttcttctgcatgatgtgtggtagactccctttgctggcttgtgcagtgatactgagaaaatacatgaacagaaactgcccaggtggaacagcacgtaacctagtgagtgactgtactcctttctaggaatgctgattcagagtgcacctctttgactaggtcccaggatccccttgtccctggagtagggactaactatagcacaaagtaatatgtgccaatgctatttgtgaaatgtttggtctttctaaacgactaaaggatttgttgggtttttgcttaagttttgaaccaaatcctagagccagctgataatatttaataatctggaggagagaataatgatgtaccaataagtggagattcctccttatgatgtatgctaggttatggaagatgtaaaatattcaactttttcctcctttttttggactttgtattttactgcatgttttcttcatttttaatcaataaagagtaaattgtcaaaaaaaaaa

SEQ ID NO: 286 - DNA, 2842 bp, Homo sapiens
ggtttccagaagcgctgccgccaccgcatcgcgcagctctttgccgtcggagcgcttgtttgctgcctcgtactcctccatttatccgccatgataagtgccagccgagctgcagcagcccgtctcgtgggcgccgcagcctcccggggccctacggccgcccgccaccaggatagctggaatggccttagtcatgaggcttttagacttgtttcaaggcgggattatgcatcagaagcaatcaagggagcagttgttggtattgatttgggtactaccaactcctgcgtggcagttatggaaggtaaacaagcaaaggtgctggagaatgccgaaggtgccagaaccaccccttcagttgtggcctttacagcagatggtgagcgacttgttggaatgccggccaagcgacaggctgtcaccaacccaaacaatacattttatgctaccaagcgtctcattggccggcgatatgatgatcctgaagtacagaaagacattaaaaatgttccctttaaaattgtccgtgcctccaatggtgatgcctgggttgaggctcatgggaaattgtattctccgagtcagattggagcatttgtgttgatgaagatgaaagagactgcagaaaattacttggggcgcacagcaaaaaatgctgtgatcacagtcccagcttatttcaatgactcgcagagacaggccactaaagatgctggccagatatctggactgaatgtgcttcgggtgattaatgagcccacagctgctgctcttgcctatggtctagacaaatcagaagacaaagtcattgctgtatatgatttaggtggtggaacttttgatatttctatcctggaaattcagaaaggagtatttgaggtgaaatccacaaatggggataccttcttaggtggggaagactttgaccaggccttgctacggcacattgtgaaggagttcaagagagagacaggggttgatttgactaaagacaacatggcacttcagagggtacgggaagctgctgaaaaggctaagtgtgaactctcctcatctgtgcagactgacatcaatttgccctatcttacaatggattcttctggacccaagcatttgaatatgaagttgacccgtgctcaatttgaagggattgtcactgatctaatcagaaggactatcgctccatgccaaaaagctatgcaagatgcagaagtcagcaagagtgacataggagaagtgattcttgtgggtggcatgactaggatgcccaaggttcagcagactgtacaggatctttttggcagagccccaagtaaagctgtcaatcctgatgaggctgtggccattggagctgccattcagggaggtgtgttggccggcgatgtcacggatgtgctgctccttgatgtcactcccctgtctctgggtattgaaactctaggaggtgtctttaccaaacttattaataggaataccactattccaaccaagaagagccaggtattctctactgccgctgatggtcaaacgcaagtggaaattaaagtgtgtcagggtgaaagagagatggctggagacaacaaactccttggacagtttactttgattggaattccaccagcccctcgtggagttcctcagattgaagttacatttgacattgatgccaatgggatagtacatgtttctgctaaagataaaggcacaggacgtgagcagcagattgtaatccagtcttctggtggattaagcaaagatgatattgaaaatatggttaaaaatgcagagaaatatgctgaagaagaccggcgaaagaaggaacgagttgaagcagttaatatggctgaaggaatcattcacgacacagaaaccaagatggaagaattcaaggaccaattacctgctgatgagtgcaacaagctgaaagaagagatttccaaaatgagggagctcctggctagaaaagacagcgaaacaggagaaaatattagacaggcagcatcctctcttcagcaggcatcattgaagctgttcgaaatggcatacaaaaagatggcatctgagcgagaaggctctggaagttctggcactggggaacaaaaggaagatcaaaaggaggaaaaacagtaataatagcagaaattttgaagccagaaggacaacatatgaagcttaggagtgaagagacttcctgagcagaaatgggcgaacttcagtctttttactgtgtttttgcagtattctatatataatttccttaatttgtaaatttagtgaccattagctagtgatcatttaatggacagtgattctaacagtataaagttcacaatattctatgtccctagcctgtcatttttcagctgcatgtaaaaggaggtaggatgaattgatcattataaagatttaactattttatgctgaagtgaccatattttcaaggggtgaaaccatctcgcacacagcaatgaaggtagtcatccatagacttgaaatgagaccacatatggggatgagatccttctagttagcctagtactgctgtactggcctgtatgtacatggggtccttcaactgaggccttgcaagtcaagctggctgtgccatgtttgtagatggggcagaggaatctagaacaatgggaaacttagctatttatattaggtacagctattaaaacaaggtaggaatgaggctagacctttaacttccctaaggcatacttttctagctaccttctgccctgtgtctggcacctacatccttgatgattgttctcttacccattctggaattttttttttttttaaataaatacagaaagcatcttgaaaaaaaaaa

SEQ ID NO: 287 - DNA, 972 bp, Homo sapiens
ttttttttttttaccattctatcttgtgccagatcttcacagctgtgacatggtttaaattccataatccatccccaagaggagcccacccaaagcaaaaatcaaatttatccatcatcatcagatgatccatccacagactatatcttaacctgatacagtcatcatattgtagtttttggaagggctcgttctgcccaagagaagttcctccttacagctgattcggctgtctaccatttgcacgttggtgctgttttgagtgctacctcctgctggtgaggcttcatacagcacacagatggagccatcctctccaattctgtaggacacttcataggggtcaacccagagtgtgagttcacttgggagaagcctgaacagctcctgactgctcagtccaatccgctgtgctgcctgtccaatcagaggatccattttatggttgatgcgaatacaacggtaacccgatcccttgcatggcttttctgggaaccagtgatgtttataatgttctgccagcagctcctgcaggctctggctgaaggtctgcagctgtcgctcgctcgtgagccccttggtgcggagaaacttggagatgaaggacacggcggcggcgatctcgcctatcatggtggcggcccgggtgtagaagggatgcatgggggcggcgtgcgggggcggcccggggcggccggggctcggcggcgcggccccgacggcggagcaaccaccccgggcttcctcaccgggcggaaggctgagaggaagagagggcgtgaggggcggacgactacttttgtctttctttctttagactaaaaaagttattttcgagacaggaggcggcaggagagaggaagagacgagcgatggcggcctggtcacatcgctcggacctccccagctgcctccgcctccagctccgcagcattcgaagatctcaatagctgcatttccagctccgagagg

SEQ ID NO: 288 - DNA, 427 bp, Homo sapiens
aggtaccggtccggaattcccgggtcgacgatttgtgcttatcattttggttattacctgttctgaagcaactatacttctttgctatttccacctatgtgcagaggattatcattggcaatggcgttcgttccttacgagtggctttactgcagtttatttcttaatctatgcagtacactacttcttttcaaaactgcggaatcacgggaacagcaagcacaattctgtactttggttataccatgacaatggtttggatcttctttctttttacaggaacaattgccttctttgcatgcttttggcttgttaccaaaatatacagtgtggtgaagcttgactgaagaagtccagtgtgcccagttagaacagacataaattacactcttcatcaacaaagacctgtttttgtgactgccttgag

SEQ ID NO: 289 - DNA, 3829 bp, Homo sapiens
ttttttttttttataatcagtttaactttattttaagcttctattacattgtaattaataataatatactaagttaagccagtttaactgtctagcaaaatgcatttcattttaaaattggatattgggagacttggcaaatgctgtgagattacttagtaaagttaagtatgatgtatatatagaggggaccagctcaccctcataggttagtgctgaaggctcaggaacagtctcaaaggcttagaaatgtggttatatagaccagagcattccattctgattttgcccccagtatacttatcactgttcattttttgctaagaatcacagtctactgacctaaatcacaccctagacatatcagagggaaattctgaccataaatcagccttgcaaatacatagcaggcagccttctctgtagtagccttggaacataatacaaatgatgtcagcatcctctgtggttgggtcagaactagcactggctatttgcaaggctgagtccatattacccttcagcacctgagtgccaagctgaggtctcaacatgggtgatgtgaaggacaagagagaatcagtggctgcagtccttctatatatctggtcactagatccgccagcttcttcaacttgttgggcttattatatctctgaaaggggacctgaacctgcatcattctgcaaaggagatgattcctgagagatgggtgaaatataatcactaactaaagagataaattcttcactttacttcctagtattgcatcccagaaagggttaaagtaagggatattggctcctgctgatcaggccacagtgtgacacattctataaaatgcatcacaaaactacattattcaatagacttgagtgttgcacctgctttcttatctccttgtaggtggttaagtttcccacaaatgcaatttgttaatatggggccacctcttctaacaaggtaaatctaaaatttggcaggcatttgcttggctgcaggtgcaaaatgaaagatctttttctggctttgccaaaaataaaaattatgttgtgctctagtcctgggaaaaatattctcacatggagggtagaacctgaccccgagaaaggggactggaattctagagcccaaatcatgtgctattattcccaaaaggctgagtggggaatctgaagtcttgttttaaatgaggccaggtattgagcaaatctccctggtaagagagcccactgatatttggagatgtagccatttgtgatgataaatgatgactgttactcttatgagctatgagagcttaattaaagctaatgcttagcactctttggaaggtggagagattaaaaactaacttccttgccgaatagcctgggtttggaaaagcatgtttttgaaatatgtgggatctccactctggggccctctgcagtcctgtctgggtcttcacacctaagtcaaagcaagagctatttttgcgttagaatttccttagccaagactacaagaggccaaatgccagggttcatctcagcttcctgtgcattcacatggaaggtcgtctttgaatctgcacgtccagctcgccatacacatgtctcagggagtcactgctcatgctggctatcagcttccgatgcccagagacccagggccggcacacttcttcccactgcacggtggagttgggccggatttcacggaacatcttcttcattggtcttgttactccaggaccatccaggtgtacccagacatttcgcagggtttcttttaaaggattggtaaactgaactgtcacagtcatgtcagaaccaactacctgagtgccacggaccttgatgatgatctcagggatggttagcacggtggacttttgcttggccagaacatccctggtctcattgatgcgagctgtgacaaagaagtgcagggacgcttgttccagcagctgacccatgtactcgccggcttggatcagcaccgcctctttcttgaaggacaagggctccagcgtcacgtcgaacgtctccttcttgaactctgccttcgggaccccggtgtagaaggtgatgttggctgagagataagctgtgatggtgtaacggttgtggctgttgttccggaaggtgatggagagcttgaagtcttttcccagcacagcattttccacttcaaagtccatgtcaacgttggaccttgatttcatgacaccttctgtgttgaggggctttttagctccgtacatcagggcagtttctagggccaatctctcttcttcttgaccttcttggaatttgtaagtatcagtaatatccatcatgccatctcctccaatttgtttggtcacaattaatttcccaatgtgggtggcatccacattttccaccacatgagtgccatctttcttagctgtaatgtaaatgaggtcgctgttgacctctgcaaaaacaaaaggtgcatcaaattggaagcagacatggccgtgcttgatggcttgaaccgaggcggggccacaccgatacatgccatcgctattttcctggggggtgctgtccacagcttgccagcctccaaatccaacaggaaggtcaggccttgtcatccatgcttcattccagcagtggtagttccacactgaatccttggtgagtttggaattcacgttcccatcttcttccaggaagatgtccatttgcaaattggcatcattatcatgggcagagaaataattggtaacaattcttgctggtattccaaggcatcgtaaaaatgtgttaaagacaccagcaaaaacccagcattggccataccggactggattctcagagctccggtattccaatagaatgtcaacgcttccagtccaggccgatggggggacgccataggcatagatattgtcccaggatccaacgaggacaccttcgtcatctttggcattcaccattgcagaccccacacggctgactttgatgggattccctcttccagagaggtccatttgtgctctgtccatcacatacaggcaagtgtccaggatgccatcttcaaactgaccatagctccagcttctggtcttgatgtcattgacctctccataaaaaattaccccgatgtcattcaggacatactcttctctttctttctcattgtccagatacacagcatcatcttcacaccaaggattgaagagaatgtacgtgtctgtttctgggtttcgactggttcgaagtacgccatagggagtccagacagcaacatacatgcggaatttccccacaatacatttgggggaagactggatggacagccgcacagacctgtcctctctcatgacaatcttggccccccactttccactttgtaactctgagactataggcactgggatgtaggttcccttgttctcctgtgggtagcgaccaatgacgtattccaccctgaagagatcccttctggggtcatatggacgactgaggtcaatctgcacatagaaagactgccctctgcggacaatcagcttgttgttttcatacttgtcagtgtggtggtccaccttgttagtgtcccatctctccttgaacaggtgaacgctcgtgacattaagaaactcttgcaggttgacgccccggggcaccacgccctgaagctccactgtgggcaggtcatcttccgctgcattagagttattgggtggaactgctcttctgcctccaaaggcggtcctggaagtttctgacatttttgactttacaaggtcctgcaggcgctcccctccagaggtgccctcgcgtgggcttgctctgtgcgcctcggggacttcctc

SEQ ID NO: 290 - DNA, 1208 bp, Homo sapiens
cgggggctttggggagatgtgtgagaagtgccccacctgcccggatgcatgcagcaccaagagagattgcgtcgagtgcctgctgctccactctgggaaacctgacaaccagacctgccacagcctatgcagggatgaggtgatcacatgggtggacaccatcgtgaaagatgaccaggaggctgtgctatgtttctacaaaaccgccaaggactgcgtcatgatgttcacctatgtggagctccccagtgggaagtccaacctgaccgtcctcagggagccagagtgtggaaacacccccaacgccatgaccatcctcctggctgtggtcggtagcatcctccttgttgggcttgcactcctggctatctggaagctgcttgtcaccatccacgaccggagggagtttgcaaagtttcagagcgagcgatccagggcccgctatgaaatggcttcaaatccattatacagaaagcctatctccacgcacactgtggacttcaccttcaacaagttcaacaaatcctacaatggcactgtggactgatgtttccttctccgaggggctggagcggggatctgatgaaaaggtcagactgaaacgccttgcacggctgctcggcttgatcacagctccctaggtaggcaccacagagaagaccttctagtgagcctgggccaggagcccacagtgcctgtacaggaaggtgcctggccatgtcacctggctgctaggccagagccatgccaggctgcgtccctccgagcttgggataaagcaaggggaccttggcgctctcagctttccctgccacatccagcttgttgtcccaatgaaatactgagatgctgggctgtctctcccttccaggaatgctgggcccccagcctggccagacaagaagactgtcaggaagggtcggagtctgtaaaaccagcatacagtttggcttttttcacattgatcatttttatatgaaataaaaagatcctgcatttatggtgtagttctgagtcctgagacttttctgcgtgatggctatgccttgcacacaggtgttggtgatggggctgttgagatgcctgttgaaggtacatcgtttgcaaatgtcagtttcctctcctgtccgtgtttgtttagtacttttataatgaaaagaaacaagattgtttgggattggaagtaaagattaaaaccaaaaaaaaaa

SEQ ID NO: 291 - DNA, 5687 bp, Homo sapiens
ggccggctgggcgcgggcgactgctggcgaggcgcgtgggaccttacgctggttccccttcgtctcctctcccggcccgggccactagagagttcgctgacgccgggtgagctgagcctgccgccaagatgccggcctattttcagaggccggaaaatgccctcaaacgcgccaacgaatttcttgaggttggcaaaaagcagcctgctctggatgttctttatgatgttatgaaaagtaaaaaacatagaacatggcaaaagatacacgaaccaattatgttgaaatacttggaactttgcgtggatcttcgcaagagccacttggcaaaggaggggttataccagtataagaacatttgtcaacaggtgaacataaaatctctggaggatgttgttagggcatatttgaaaatggcagaggaaaaaactgaagctgctaaagaagaatctcagcagatggtcttagatatagaggatctagataatattcaaactcctgagagtgttctcctaagtgctgtaagtggtgaagacactcaggatcgtactgacagattacttttaactccatgggttaaattcctgtgggagtcttacaggcagtgtttggaccttcttagaaacaattctagagtagagcgcctgtaccatgatattgcccagcaagctttcaaattctgcctccaatacacgcgtaaggctgaattccgtaaactgtgtgacaatttgagaatgcacttatcgcagattcagcgccaccataaccaaagtacggcaatcaatcttaataatccagagagccagtccatgcatttggaaaccagacttgttcagctggacagtgctatcagcatggaattgtggcaggaagcattcaaagctgtggaagatattcacgggctattctccttgtctaaaaaaccacctaaacctcagttgatggcaaattactataacaaagtctcaactgtgttttggaaatctggaaatgctctttttcatgcatctacactccatcgtctttaccatctctctagagaaatgagaaagaatctcacacaagacgagatgcaaagaatgtctactagagtccttttagccactctttccatccctattactcctgagcgtacggatattgctcgacttctggatatggatggcattatagttgaaaaacagcgtcgccttgcaacactactaggtcttcaagccccaccgacacgaattggccttattaatgatatggtcagatttaatgtactacaatatgttgtcccagaagtgaaagacctttacaattggcttgaagtagaatttaacccattaaaactctgtgagcgagtcacaaaggttctaaattgggttagggaacaacctgaaaaggaaccggaattgcagcagtatgtgccacaactgcaaaacaacaccatcctccgccttctgcagcaggtgtcacagatttatcagagcattgagttttctcgtttgacttctttggttccttttgttgatgctttccaactggaacgggccatagtagatgcagccaggcattgcgacttgcaggttcgtattgatcacacttctcggaccctgagttttggatctgatttgaattatgctactcgagaagatgctccgattggtcctcatttgcaaagcatgccttcagagcagataagaaaccagctgacagccatgtcctcagtacttgcaaaagcacttgaagtcattaaaccagctcatatactgcaagagaaagaagaacagcatcagttggctgtcactgcataccttaaaaattcacgaaaagagcaccagcggatcctggctcgccgccagacaattgaggagagaaaagagcgccttgagagtctgaatattcagcgtgagaaagaagaattggaacagagggaagctgaactccagaaagtgcggaaggctgaggaagagaggctgcgccaggaagcaaaggagagagagaaggagcgtatcttacaggaacatgaacaaatcaaaaagaaaactgtccgagagcgtttggagcagatcaagaaaacagaactgggtgccaaagcattcaaagatattgatattgaagaccttgaggaattggatccagattttatcatggctaaacaggttgaacaactggagaaagaaaagaaagaacttcaagaacgcctaaagaatcaagaaaagaagattgactattttgaaagagccaaacgtttggaagaaattcctttgataaagagcgcttacgaggaacagagaattaaagacatggatctgtgggagcaacaagaggaagaaagaattactacaatgcagctagaacgtgaaaaggctcttgaacataagaatcgaatgtcacgaatgcttgaagacagagatttattcgtaatgcgactcaaagctgcacggcagtctgtttatgaggaaaaacttaaacagtttgaagagcgattagcagaagaaaggcataatcgattggaagaacggaaaaggcagcgtaaagaagaacgcaggataacatactatagagaaaaagaagaggaggagcagagaagggcagaagaacaaatgctaaaagagcgggaagagagagagcgcgccgaacgagcaaaacgcgaggaagagctacgagagtatcaggagcgggtgaagaaattagaagaagtggaaaggaaaaaacgccaaagggagttggaaattgaagaacgagaacggcgtagagaggaagagagaagacttggcgatagttccctttctagaaaggactctcgttggggagatagagattcagaaggcacctggagaaaaggacctgaagcagattctgagtggagaagaggcccgccagagaaggagtggagacgtggagaagggcgagatgaggacaggtctcatagaagagatgaagagcggccccggcgtctgggggatgatgaagatagagagccctctcttagaccagacgatgatcgggttccccggcgtggcatggatgatgacagaggccctagacgtggtcctgaggaagataggttctctcgtcgtggggcagacgatgaccggccttcctggcgtaacacagatgatgacaggcctcccagacgaattgccgatgaagacaggggaaactggcgtcatgcggatgatgacagaccacctagacgaggactggatgaggacagaggaagctggcgaacagctgatgaggacagaggaccaagacgtgggatggatgatgaccgggggccgaggcgaggaggcgctgatgatgagcgatcatcctggcgtaatgctgatgatgaccggggtcccaggcgagggttggatgatgatcggggtcccaggcgaggcatggatgatgaccggggtcccaggcgaggcatggatgatgaccggggtcccaggcgaggcatggatgatgaccggggtcccaggcgagggttggatgatgatcgaggaccttggaggaacgccgatgatgacagaattcccaggcgtggtgcagaggatgacaggggcccttggagaaacatggatgatgatcgcctttcaagacgtgctgatgatgatcggtttcccagacggggtgatgactcaagacctggtccttggagaccattagtcaagccaggtggatggagagagaaagaaaaagccagagaggagagctggggtccacctcgagaatcaaggccatcagaagaacgtgaatgggacagagaaaaagaaagggacagagataatcaagatcgggaggagaatgacaaggaccctgagagagaaagggacagagagagagatgtggatcgagaggatcgcttcagaagacctagggatgaaggtggctggagaagaggaccagctgaggaatcttcaagctggagagactcaagtcgccgggacgatagggatagggatgaccgtcgccgtgagagggatgaccggcgtgatctaagagaaagacgagatctaagagacgacagggaccgaagaggacctccactcagatcagaacgtgaagaagtaagttcttggagacgtgctgatgacaggaaagatgaccgggtggaagagcgggaccctcctcgtcgagttcctcccccagctctttcaagagaccgagaaagagaccgagaccgagaaagagaaggtgaaaaagagaaggcctcatggagagctgagaaagatagggaatctctccgtcgtactaaaaatgagactgatgaagatggatggaccacagtacgacgttaagtctcaagataatggatttaaactggtgtcttaaataggtttgatcacattcaaggattattatacttgtgcttcaaccaatctaaattggattctttaatgttgtttcaccataacacaaaaagcatgaacttgtattaatcctatataatagattgatcatgcaccatatccacaggaggttggaaaaaccatgccattttctggaatttaagggtgttgcattatttcatcaatcatttgttgacaaaaaagaaaaactaaaaaataaatttaaaatgtgaaccttcaggtattgagtaacacctttatcttggtatagaactgatacttttttttgattttgaaatatctgataataatttggaatgaagtaaggttctgttaaaatatatttgaagaccctttaaagcagtgaatctgaaacaattttcacacccttaagtggttgatacgtacctattttaggtattttgaggtatttaccataaactaaatttagaaattttttagattcacttgaagtaaacattacaaacattggatacggtggggttttctttagattttacttgagagaaggtgagtacaaagcaatttgcagttgttgtaatgacaagattactgcgcaagtgtgaatccaaacagtatagcttttaaattttaaagcatttggtaaattatcgctgagtttttttctgttgccaatagcaaactgcttttccattaatggagaattcatgcctttcaagcattttaaatatgacaatatttataaatgtatggtttggaggaatcgtttaaattctctttcctaattttctttcttttgaagatagattctttcaacaagtaatttgtagtaatgactgtgttgacttcaattttggagcgcagtagctatgttaaagatgaactatttggtctcattgaagccaacacagaacttgctgctgtgttttttcttcagtgataaataaaatacttacagaaacacacaaaacacccacaccgaacacacaccccacccccaagcaaaacaaaaacaagagggggacaacacacagaaactctcacaaagagacacaaagatagggccacccctctagcaccaggaggccccatatagaggactaacaagcgagcaagcggcgcgataacaacagcacacagacacaaacacgccacagcccggcaccctcatacagaccacaacaaacacaacgcagggcgagcacacaaaagcaaccgacaccgacacccgcagaagatacagacacaccgaagggaaacacaaacaacacaccaagcgaggatccgcgtcacacaacaccagacatccacccgaccacacacgaaccctcacacaccaagcgcaccgcaaaatacaccacgcagccaccaaaacca

SEQ ID NO: 292 - DNA, 3129 bp, Homo sapiens
agtttttgggcctcgtgcttcgtggtgggagacccaggtcgaggtccgggtggggccggtgaggggttgggcgtcgggaggtgttggctcgggcctcttcgcgtggccggtgacgccttggctcccccgcaggtccggccgtagcacctccgcgccgtcgccatgtcgcggtttttcaccaccggttcggacagcgagtccgagtcgtccttgtccggggaggagctcgtcaccaaacctgtcggaggcaactatggcaaacagccattgttgctgagcgaggatgaagaagataccaagagagttgtccgcagtgccaaggacaagaggtttgaggagctgaccaaccttatccggaccatccgtaatgccatgaagattcgtgatgtcaccaagtgcctggaagagtttgagctcctgggaaaagcatatgggaaggccaaaagcattgtggacaaagaaggtgtcccccggttctatatccgcatcctggctgacctagaggactatcttaatgagctttgggaagataaggaagggaagaagaagatgaacaagaacaatgccaaggctctgagcaccttgcgtcagaagatccgaaaatacaaccgtgatttcgagtcccatatcacaagctacaagcagaaccccgagcagtctgcggatgaagatgctgagaaaaatgaggaggattcagaaggctcttcagatgaggatgaggatgaggacggagtcagtgctgcaactttcttgaagaagaaatcagaagctccttctggggagagtcgcaagttcctcaaaaagatggatgatgaagatgaggactcagaagattccgaagatgatgaagactgggacacaggttccacatcttccgattccgactcagaggaggaagaagggaaacaaaccgcgctggcctcaagatttcttaaaaaggcacccaccacagatgaggacaagaaggcagccgagaagaaacgggaggacaaagctaagaagaagcacgacaggaaatccaagcgcctggatgaggaggaggaggacaatgaaggcggggagtgggaaagggtccggggcggagtgccgttggttaaggagaagccaaaaatgtttgccaagggaactgagatcacccatgctgttgttatcaagaaactgaatgagatcctacaggcacgaggcaagaagggaactgatcgtgctgcccagattgagctgctgcaactgctggttcagattgcagcggaaaacaacctgggagagggcgtcattgtcaagatcaagttcaatatcatcgcctctctctatgactacaaccccaacctggcaacctacatgaagccagagatgtgggggaagtgcctggactgcatcaatgagctgatggatatcctgtttgcaaatcccaacatttttgttggagagaatattctggaagagagtgagaacctgcacaacgctgaccagccactgcgtgtccgtggctgcatcctaactctggtggaacgaatggatgaagaatttaccaaaataatgcaaaatactgaccctcactcccaagagtacgtggagcacttgaaggatgaggcccaggtgtgtgccatcatcgagcgtgtgcagcgctacctggaggagaagggcactaccgaggaggtctgccgcatctacctgctgcgcatcctgcacacctactacaagtttgattacaaggcccatcagcgacagctgaccccgcctgagggctcctcaaagtctgagcaagaccaggcagaaaatgagggcgaggactcggctgtgttgatggagagactgtgcaagtacatctacgccaaggaccgcacagaccggatccgcacatgtgccatcctctggccacatctaccaccatgctctgcactcgcgctggtaccaggcccgcgacctcatgctcatgagccacttgcaggacaacattcagcatgcagacccgccagtgcagatcctttacaaccgcaccatggtgcagctgggcatctgtgccttccgccaaggcctgaccaaggacgcacacaacgccctgctggacatccagtcgagtggccgagccaaggttctgctgggccaggttctgctgctgcgcagcctgcaggagcgcaaccaggagcaggagaaggtggagcggcgccgtcaggtccccttccacctgcacatcaacctggagctgctggagtgtgtctacctggtgtctgccatgctcctggagatcccctacatggccgcccatgagagcgatgcccgccgacgcatgatcagcaagcagttccaccaccagctgcgcgtgggcgagcgacagcccctgctgggtccccctgagtccatgcgggaacatgtggtcgctgcctccaaggccatgaagatgggtgactggaagacctgtcacagttttatcatcaatgagaagatgaatgggaaagtgtgggaccttttccccgaggctgacaaagtccgcaccatgctggttaggaagatccaggaagagtcactgaggacctacctcttcacctacagcagtgtctatgactccatcagcatggagacgctgtcagacatgtttgagctggatctgcccactgtgcactccatcatcagcaaaatgatcattaatgaggagctgatggcctccctggaccagccaacacagacagtggtgatgcaccgcactgagcccactgcccagcagaacctggctctgcagctggccgagaagctgggcagcctggtggagaacaacgaacgggtgtttgaccacaagcagggcacctacgggggctacttccgagaccagaaggacggctaccgcaaaaacgagggctacatgcgccgcggtggctaccgccagcagcagtctcagacggcctactgagctctccactctgtttcccgcctgggccatccaaccttgaagtcctaaaccacacctcagtcactaaaggtctgtttaaagttgttctggttgattgcttgttgccacaaaggtgtgttgagcccattcatttgctgattatacttctgagctgctaccacatgacagacacaaggctcagatgaagaggtgaattaaacacgttcctgacctcaaaaaaaaaa

SEQ ID NO: 293 - DNA, 5253 bp, Homo sapiens
ttttttttttttgctttctttaaatctttatttaaaagtccatgctaataatgtgtttacatttttacagttacattatgatagaaactgttggattttttaaatatctaaaacaatggcccactgaagaaaggaacaattaactctttaattaattccttaggataaatacccagaaatttaacagctagggcagacttctaatacaataccgaaagtccttccaaaaaccaagtggttgccaacttatgtcccttagcattataacattcttgagccaatagtgtaaaaatacgctgacaattttataggcaaacattactcaaggtatcttactttccacttattactaaagtaattaacccctaaatagatgctcctcaacagtgggactacatcctggtaaacctatcataagttgaaactatcaagttgaaatgcatttagtacccggataaacctatcataaagttgaaaatttgtaaattgaaccagtgtaaatcagaggccatcttacttcatactcatgaagcaactatagtgggatatttttcaacttacgagatagcctaggcttgttgaaacactgtcctaatttactggctctctggtaattaagtcataaatggtcaaacatcaaattctagaaaagcatatatttaaattctcatcactataattcagaatgactggtttacaaaaatatgttcatagtatttgggtaataactgtggtgattgtctcaactggcaagctaagtggaatgccttaaagaatctatccaagattagttggcaggcatttccagtgttggtaaatcaaaggcccacgaaggtatgctgagccttgatagcacaaccttgcttaggactttgcctcaactaacatactttttagtttggcaagttacctgaccctccaggtaactcatttttctccatagtctgctacttacaagattgtcatatttttgtaatctagaagcaattatagaggatattttattagactttacaaatgacaactgcataaaacagaaaccagtttcatgatctagtttagggagtatgtattttatacaactcataatcctttacaaatagaaaaaaatcagtaatacactgaatcaacttgaagaatcttcagcataaagttcaacaaagtcccttagatgcaatttcttttggatttacagcaacactttttgttatgttgtatgtcttgtaaattccaataagtctatccgaaatctcaaacatattatttcgaagagaaattattatgaactgtgcattttttgtttgttcatatatataaaatgcaacaatggacacatttttaaaatcaagggctgcatcaatctcatccatgaagtaaaggggagtgggcttgtagtggtgaagagcaaatactaaagccaatgaactaagtgttttctctcctcccgaaaggttgaagatctttttccaacttttcttaggtggtcgaacactgaacatgattccttcagagaaaggatccaagctgtctacaagctcgagttcggcgtcccctcccaaagtaagcatttggtaattttcctttaatttatttgttattatataaaaacctgccataaattcattaagcctttgtttccgaagatcttcatatgcctgtctaaaactgtctctttcataagtaattttgtccaattctgctacccgttgcaaatacaattcttccttctttttatactctgcgatggcaccgaggtttggtttcatttcatgacaccgggcttccaaaagtgcaatttgatttgttatagaatctggattcttgatcgcttcaagatcctctgggcttagaaccgaaatctcttcaataggattatcttctataggatgcagtgatatttttgaaatctctttgtgccaatattttattttagaattatgttcagcaatgtgaccatctatttgttcaagtttcaacttaatactaagtgcatctttttgaagagcatgttcattttcttgaataacttttaattcttgaagcagattgcgatgttctttctggatctctggtaaggattcctctgcagcatttgtattctttacgacctctgctgctttgtcctcaagacttttcagctctgctgttaggtcatccacctctttctcagtatcttttatttctttctctgtacgcaagacagagtcttgtgccttttgaaggtttctgtcagcagtcttgattgctacttgggctttagtaatagcagaagcacattcatctaattgcttatttattttatcaagtttgtcttgttgggccttgagtttatgattattgatttctacgatggtattgtgtaagcgtttaacctcagcttctactttaccagctttctcagccacagcatcatattctgttttgaaagcactaacgttttcttctagcaatttctgcttttttttgtcaggggctgtagcaagtacattagcttcaagttccttaacttggacattcaaatattcttcttgctctattaaacgctggatgcttgcagtaaatttttctagtgtgttcctcatttctcgttcactatgccgtaacttaactactctttcttcaagttgtactttctgttcttggatttgcattgcttttttagagtcgttttgcaactgtgattccattttgtttacctcttcttcagagatttcaataacaagtgaggaacccattcttcctttcattactttgcttccaccaccagtcattgtacctgactgttctatgatttgtccctgtaaagttaccactctccatcttctatctttttgatatgctactcttgtggcttgatccaagttgtcagctactaaggtatctcgtaaagcaaaataaaaagcttggcgaattttctcatcttttacttttactaaatcaaataaacgaggagtattttcaggagtttgaatttcggtcatctttttcgcccatacagccatcttatctaaacctataaaggttgcaactccaatattttgtcttttaaggaagtttacacattcttgggctatatcaatagaatcaacaacaatgtagtccagtgcatgacaacaggatgatatagccacgtcgtatttttcatcaatggctcctaagtcccccaatcttccatatattcctggaatcctgccagattttttttcttgaattattgcatcaaggactttccccctacttcgattcattgctaatgagctctttgcttcttcaactttttgaaagagatcatgaaccaaacttttaaagtttgtttcttcttgtgtaagtttttgaagttctttttctttctcctttaattcttgttcagtttgagggagttttccttctatatctctgattgcagctttcctttctttgagagtctcagaagctgcaattagagcttccttagccttagttaattgagacactgcagtattatgacgactgagatagatatcaagttctgactgggctacatccatctttgaacgtgcttcatttaccgatttgctgaaacccataagttctttctctcgactttctttttctttctgaagcccttgtgtttcctgtttaaggctatccataacttcctttaattttttttcttctttctctttttccttctcgagggcattgtttctggttgttgtttcattaatgatattgttactcttggcaggtatacttttaaattcttcaaccttttctttatctttttgaagttgtttctccagttttttggctttactcgtggcatgttttaacttttctctaacttgaacatcttccaaatctagctgtgtaaatttttctttattctcctcaataaattttgtaattttattcagtttcttttctgtatcttttacatctttattcttagctttcatttcatttgatagtatattgctcttctcattaatttctttggtatcttcatgaattttttccttttgagtttccatttcagcaattcgtttctgcaactcataaatataatattgacaaacatgattcttttttctaaatatttcattttccaaggtaagaaattcgatagctatgtttttctctccttctaaggcatccttttccttttccaccatctttaccctgtttaacttatctcctctgtgttcatttaatatttcaactctccgacacaagactttaataggttcatttagccgtccacaaccaattatatcttctaaatattcaagcataccctcatcgtgttcagtctggccttttggtttcatcatagcaatttgttcaacttcaccctgtaaaattaaaaatctattatggtccaagtcaattccatggcttcgaagaagatttccaacatccttaaatgtctttttctttccacttatgtgatagacagaagtattatctctgcaggccgttctggatacatagaaattactgttaggaatgacttcataatcatccccttccttatcaattatcttttgaaaatgaacttctactgtacaactctgaatgtccttgtgttcatcagaattatgtattaatactgagagttttttagatcttattttttgtgctcgatagccaaacacaaaaagcatagaatcaataacattggatttgccactgccatttggcccgataatacaggaaaagcgcttatggaaaggtcccagaattttctccccagcataggatttgaagttctggtttacaatatgagttatcataagccgaggagctccagcttcattggtcattgctggaggcgggggaggaggaatgctgttcaaaatctcttctaaacttctattatcaagttcctcacttgcagtctctgcggcggtggctgggctctccgtgcggccggacggcggctcaggctccgcgtcgctgctggcgccgtcaggggacggcggcggcggcccttcctctctgcgccgggcagtggagggctgggtgcctttacggggcatggtcgctggggccgggggacagccgggagcaagtcagcccgcgggccgctacaccgcgcccgccccacccggggaaatctcggtccaccggcttccgagagccccgcttaacactccgcttagaggcagcgggacttcgggaagggagccatcgaaagacacgagtggcaagaaggcaggactggtttcttaacaagacctatgtaagtgggaaaatctagacgtgcctgag

SEQ ID NO: 294 - DNA, 2482 bp, Homo sapiens
ttttttttttttgtagcttattttcctttattatcccaaaatatctgtgtgaatgggacaatgtcgcaaaacaaggcagaaatctgtagccaagtacgtctcactcagaggaaagaactgattggacagaaggcactagaaattgcattttgttgggttacatgtaaacaggaaatggggggaaagattcacaaaagagaaaggaacttgcaccatcatttcattgccacatcctaaggatgaagaatggcctcactcactgctgatgctccacctatagcttacattgtagtgtaaactgtacctgatggctaaggagacaaatacccacgcagcagcaatgcaggagggcatgaaaaggaattgagattgatctaagcccgcaggtcctctttccctcacagctcccaagggcatcttgtttggcagtgccttgtaaatgcactgctcgtcaactggttagtgaaaaagtcaaatcctaaaatgcgtggtgaatacattttgtttctgtcatgctcttcaatcagatgacttggatgggtccgggggtggagggacgtaccacatcaggcctgtcttcttaggtgatgacagtgggtgcagtgcgtcccgtcctctcctgcagctgggacactttcagagcaatggaaataaggggggccaacatgacctgggggtcctggttaatcttggcaacgtccttctcatagctatcgatgtacagccgaatggtggccccggcactcccagtgccgctcagtcggaagacgattcgagaaccatctgtgaaaatgaggcgcaagccctgatttcttgaaatgcttccatccactgggtcgctgtattcaaagttatcggccttctccacagtgtaaactttgtcatttgctgagaactgcttccccacaaaggagcgatcaaacatcagggcctccaagtccttcatcattttgtttgcgccctcagcttccacctcctcgtaatcatacctggtgaagaaattccggccatacttttgccaatgatctttgagaatgtcctccacactctgcttgcgggtggctaggatggagagccaggcaaggacagcccacagtccatctttctcacggatgtggtcagaaccggtcccgaagctctcctccccacaaagggacagtttgctcgcgtccatcaaattcccaaaaaacttccagccagttggggtctcatacaaagcaatctttgtagcactagccacccggtccagagcaccactcgtgggcatgctccgtgcaaagccgcggaccccagtctgctggaaatacggaatgctgaagatgttggcagcaatgacagccacagagtctgaagggttcacaaagaacccatgcttgcccagaatcatgtttcgatccccatctccatcaaaggcagccccaaaatcatgctctcctgacttcatggtctccaccaggtcagctgcataggtgaggttggggtcagggtggtggcctccaaagtcctccagaggaacgcagttaactgccgagttcgcaggggcaccgagttcttcacagaggatcttctttacatacggtcccacaactccatgcatagcatcaatacagatcttcagtcggtttggcccagaaagtagttctttcagtgcactgaaatcaaagatgcttctcagcattgtagcataagcttctaccgaatccacaatttccactgtgaagggtttgaacttattttccaagtcaaactgctgctttcccagaacaccaaggtctactttcaggtcagggcaaactgcatattcttcaattgtcttgctgatttggaaaattttatcagttattgcttctggagcaggacctccattagaaatattgaatttgattccaaaatctccattggggccccctgggttgtgactggctgtcagaatgatcccaccaatggctttgatttttctaatgatgcaggatacagcaggggtggagaggattccattctgtccgataaccaagcgaccgatcccgttggcggcagcgatgcgagcgatgagctggatggcctccttcatgtagaaccggccgtccccgcccaccaccagcgtggcctcctgccgctgcgccggctccacggtggagatgatactctggatgaagttctccgcgtagttggcgctgctctggaacaccttcacccgcttccgcagcccgctcgtgcccggcttctggtcctggtacgcctgggtcttaactgtcacgatcttcaccatggtggcgacttgctgccgggggtcagagcggcggacttggctggcggaggggcggccggctgaggctgcagctgctctggggtgagggcacggcgggtgggggctacgccgcactctaggccggcgtttggccctcctccttaaagggacaggggacagggccctccctccgcgccagcccacctcctggcaggtccggcgggaggggaaagg

SEQ ID NO: 295 - DNA, 4351 bp, Homo sapiens
gccggttggggcggcgggcgcggggcggggcagggggcggggcgctgacgtcgcggcgcggcccgcggccagcggcccggtgaggcggggaggcggcggccggtcggcccggcccagcccagcccgcagctgcggcggcgctcagagttggttcctgaccgccttctgccgcggccgggtttgtcaccaggtcctggggtctgcaccggctcggccagacctcgccccccgcttctccgccatggccctggtgcggggcgcggagccggcggcggggccttcccgctggctgcccacgcacgtccaggtgacggtgctgcgggcccgcgggctgcggggcaagagctcgggagcgggcagcaccagcgacgcgtacacggtgatccaggtgggccgcgagaagtacagtacgtcggtggtggagaagacgcacggctgtcccgagtggcgtgaggagtgctccttcgagctgccgccgggggccctggatggcctgctgcgggcgcaggaggccgacgcgggcccggcgccctgggccgcgagctccgccgccgcctgcgagctggtgctcaccaccatgcaccgctcgctcatcggcgtcgacaagttcctgggccaggccacggtggcgctggacgaggtcttcggcgcaggccgcgcccagcacacgcagtggtacaagctgcactccaagccaggcaagaaggagaaggaacgcggcgagattgaagtcaccatccagttcacgcgcaacaacctgagcgccagtatgtttgacctgtccatgaaggacaagccaaggtctcccttcagcaagatcagggacaagatgaagggcaagaagaagtatgatctggaatctgcctctgccatcctcccaagcagcgccatagaggatcctgacctgggcagcctgggcaagatgggcaaagccaaaggcttcttcctccgcaacaagctgcgcaagtcgtccctgacccagtccaacacctcgctgggctcggacagcaccctgtcctcagccagcgggagcttggcctaccagggacctggcgccgaactcctcacccgctcaccaagccgtagcagctggctgtccactgaagggggcagggactctgcacagtcccccaagctgttcacccataagaggacctacagcgatgaggccaaccagatgcgagtggctcctcctcgggcccttctggaccttcagggccacctggatgctgcctcccgctcttcgctctgtgtcaatgggagccacatttacaatgaggagccccagggccctgtgcggcaccgcagctccatctcgggctcgcttccatcctctggctccttgcaagctgtctcttcccggttctccgaggaggggcctcgttccacagatgacacctggcccagaggcagtcgtagcaacagcagctcagaggcagtgcttggacaggaggagctgagtgctcaggctaaagtcctggcccctggggccagccaccctggagaggaggagggggcccggctaccagagggcaagccagtccaggttgccacacccatagtggcctcctctgaggctgtggcagagaaggagggagcccggaaggaggaacgcaagccccggatgggtctcttccaccaccaccaccaaggcctaagtcggagcgagttgggtcgccgaagctctctgggggaaaaggggggtcccatcctgggggcctccccacatcactcatccagtggggaggaaaaggccaagagtagctggtttggcttgagagaagccaaggacccgactcagaaacccagtccccaccccgtgaagcccctcagtgccgcccctgtggagggcagccccgacaggaagcagtcccgctccagtctgagcatagccctgagcagtgggctggagaagctcaaaacagtcacatctgggagcattcagcctgtgacccaggccccccaggctggccagatggtggacaccaaaaggctgaaggactcagctgtgctggaccagtcggccaagtactaccacctgacccacgatgagctcatcagcctgctcctgcagcgggagcgggagctgagccagcgggacgagcatgtgcaggagctggagagctacatcgaccggctgctggtgcggatcatggagacctcacccacgctgctgcagatccccccgggcccccccaaatagccttcctcaccctacccccaggagggttggcatggacctattgctgcctgccctctctcctcctgaactctctcatctgcagtggggcatcgtctgtcttgccttgtcactccttgctcctctccctcctgcctcaactggggctgctggaagggggccctctggattccctttggaggcatcaggttctgtgcacaacttgtgtgtctttgggagccctgggtctttcccacctgcctgttttcatatccctcagctttgggggccccagggaattggaactcttcccccaagacagagcaggggtgaactgtagcttgatgcagtaatctgggacaagactggttgctagcacatactttattatcccccaaggatggtcagccatttcttcccacagccaaagccccatccccttcatttccctccagtccctggaggggcttctagtattactgggacaatgaccacgctgcctgtttgtctgtgagttacgggcaaccagcctcttcagcctcacacccattcccctgagagcaagaagcctgtgtggtctgggccagtctctgccatgtcctgagtctgcttcagtctggagctgtttgtggggcgagtgccatgtggacagtggtggatgatgtgtgtgcttcaggctgctccctgacccctctgacctttccacgagtgtcacatgggaatgtgtggggcgcaggggcgggtgcggagagagcacctttttgcttttcgagctcttgaccacctccaatgtgtaggtccctccaggctggggcttgggactgcttatgatttggggatcaagcctccatgtctattcttgttgcctgtccagatgccaaaactctgtgttgctgcagggtttgaacttttggaaaccaattaaaatgtgcctttggtgggcggggtcaagagcccctggatgtcgacctctcccgctgtgtggcgtccccctcccacctgttgaatacatagggatggctctctcagggccctgggaatgggaatggacagcactgctgtgggctgttcccttcccctaaagttaatctcttggtctggccaagttgctgctccctcaaccttcctgctgtcttcccctccctcaaccccaataggaggatcccaggataaacactgctgggcaggcgggcaggcaggcctggggctgccctgctcactctcattgtctggcctcaggacttagccatactagaccagtcagcttgcctggaagagggaggtcccactatgcctttgggagacacctatacttaggaaaaagcctttgttgtcctcccatccatccattaagctgctatctcagcctgtcccttctgccccaggggcttgcctggcttggctgcagtgcactttgaaatgaagtatctgtcctttggcccagcccctggtttgcttgtagaaaacatggtaggcttccccaaggcatctgcagggaactttggcagcttggggcaccctgaattagcaaaaatggggggtgatgaggtgctgaagaaggatacttaacagcttagtgaggaggcaagagctcctctgggaccaccacttcttcaggagagggcctgtgggcttgcttttggaaggcctcaggcagacacgtgccctctgggtgatgtctgtctgctgccaggatggagcagaggagcgccacacatggaggaaagcccctgtaacgttacctaccttaaactccactcatcaaatctgagaaaagtatccactggtccccagggtttcagtcatgcttttgggggtcattgggtattagagaagtaagtatcttttctgagagagggggagtcaccccccctactggggattcctctgggctttattcactcccagccctggccctgacctttgtgggcctccctaatgcccagggcatggatggcttcagaggagtttttgaatcgaagcccagggtccttgttgatgtttcttctccgagccacacttggaggaaagttgcaggtgggttgggcagggagcaggcatggttctgctttgctgtttgtcttcctagttaaggctctttataaagagcttgttcttcatgttttaagcactttatgaagaataaaacattcatgtactgcaaaaaaaaaa

SEQ ID NO: 296 - DNA, 3663 bp, Homo sapiens
tagacctcagcttcctctgtcaccatggtgccggctcggctgggcccggcggtcgccatggtaactggggcgggtcgcagggtcctggcaggctgggcgcatgcgcgcggggactacaagccgcgccgcgctgccgctggcccctcagcaaccctcgacatggcgctgaggcggccaccgcgactccggctctgcgctcggctgcctgacttcttcctgctgctgcttttcaggggctgcctgataggggctgtaaatctcaaatccagcaatcgaaccccagtggtacaggaatttgaaagtgtggaactgtcttgcatcattacggattcgcagacaagtgaccccaggatcgagtggaagaaaattcaagatgaacaaaccacatatgtgttttttgacaacaaaattcagggagacttggcgggtcgtgcagaaatactggggaagacatccctgaagatctggaatgtgacacggagagactcagccctttatcgctgtgaggtcgttgctcgaaatgaccgcaaggaaattgatgagattgtgatcgagttaactgtgcaagtgaagccagtgacccctgtctgtagagtgccgaaggctgtaccagtaggcaagatggcaacactgcactgccaggagagtgagggccacccccggcctcactacagctggtatcgcaatgatgtaccactgcccacggattccagagccaatcccagatttcgcaattcttctttccacttaaactctgaaacaggcactttggtgttcactgctgttcacaaggacgactctgggcagtactactgcattgcttccaatgacgcaggctcagccaggtgtgaggagcaggagatggaagtctatgacctgaacattggcggaattattgggggggttctggttgtccttgctgtactggccctgatcacgttgggcatctgctgtgcatacagacgtggctacttcatcaacaataaacaggatggagaaagttacaagaacccagggaaaccagatggagttaactacatccgcactgacgaggagggcgacttcagacacaagtcatcgtttgtgatctgagacccgcggtgtggctgagagcgcacagagcgcacgtgcacatacctctgctagaaactcctgtcaaggcagcgagagctgatgcactcggacagagctagacactcattcagaagcttttcgttttggccaaagttgaccactactcttcttactctaacaagccacatgaatagaagaattttcctcaagatggacccggtaaatataaccacaaggaagcgaaactgggtgcgttcactgagttgggttcctaatctgtttctggcctgattcccgcatgagtattagggtgatcttaaagagtttgctcacgtaaacgcccgtgctgggccctgtgaagccagcatgttcaccactggtcgttcagcagccacgacagcaccatgtgagatggcgaggtggctggacagcaccagcagcgcatcccggcgggaacccagaaaaggcttcttacacagcagccttacttcatcggcccacagacaccaccgcagtttcttcttaaaggctctgctgatcggtgttgcagtgtccattgtggagaagctttttggatcagcattttgtaaaaacaaccaaaatcaggaaggtaaattggttgctggaagagggatcttgcctgaggaaccctgcttgtccaacagggtgtcaggatttaaggaaaaccttcgtcttaggctaagtctgaaatggtactgaaatatgcttttctatgggtcttgtttattttataaaattttacatctaaatttttgctaaggatgtattttgattattgaaaagaaaatttctatttaaactgtaaatatattgtcatacaatgttaaataacctatttttttaaaaaagttcaacttaaggtagaagttccaagctactagtgttaaattggaaaatatcaataattaagagtattttacccaaggaatcctctcatggaagtttactgtgatgttccttttctcacacaagttttagcctttttcacaagggaactcatactgtctacacatcagaccatagttgcttaggaaacctttaaaaattccagttaagcaatgttgaaatcagtttgcatctcttcaaaagaaacctctcaggttagctttgaactgcctcttcctgagatgactaggacagtctgtacccagaggccacccagaagccctcagatgtacatacacagatgccagtcagctcctggggttgcgccaggcgcccccgctctagctcactgttgcctcgctgtctgccaggaggccctgccatccttgggccctggcagtggctgtgtcccagtgagctttactcacgtggcccttgcttcatccagcacagctctcaggtgggcactgcagggacactggtgtcttccatgtagcgtcccagctttgggctcctgtaacagacctctttttggttatggatggctcacaaaatagggcccccaatgctatttttttttttttaagtttgtttaattatttgttaagattgtctaaggccaaaggcaattgcgaaatcaagtctgtcaagtacaataacatttttaaaagaaaatggatcccactgttcctctttgccacagagaaagcacccagacgccacaggctctgtcgcatttcaaaacaaaccatgatggagtggcggccagtccagccttttaaagaacgtcaggtggagcagccaggtgaaaggcctggcggggaggaaagtgaaacgcctgaatcaaaagcagttttctaattttgactttaaatttttcatccgccggagacactgctcccatttgtggggggacattagcaacatcactcagaagcctgtgttcttcaagagcaggtgttctcagcctcacatgccctgccgtgctggactcaggactgaagtgctgtaaagcaaggagctgctgagaaggagcactccactgtgtgcctggagaatggctctcactactcaccttgtctttcagcttccagtgtcttgggttttttatactttgacagcttttttttaattgcatacatgagactgtgttgactttttttagttatgtgaaacactttgccgcaggccgcctggcagaggcaggaaatgctccagcagtggctcagtgctccctggtgtctgctgcatggcatcctggatgcttagcatgcaagttccctccatcattgccaccttggtagagagggatggctccccaccctcagcgttggggattcacgctccagcctccttcttggttgtcatagtgatagggtagccttattgccccctcttcttataccctaaaaccttctacactagtgccatgggaaccaggtctgaaaaagtagagagaagtgaaagtagagtctgggaagtagctgcctataactgagactagacggaaaaggaatactcgtgtattttaagatatgaatgtgactcaagactcgaggccgatacgaggctgtgattctgcctttggatggatgttgctgtacacagatgctacagacttgtactaacacaccgtaatttggcatttgtttaacctcatttataaaagcttcaaaaaaaaaa

SEQ ID NO: 297 - DNA, 1725 bp, Homo sapiens
ctttttttttttttttttttttttttttttttttttttttttattagtgaaagtgcatacactttattatgtacattgttggaaagggaggccacctggagaaacttctgcactggcactgtgttcctagagctccttctatgcgtccctcccaagtgatttaatttcagctgattggactacgaattcacaaggcagaaaagtcaaggtcatttggtatctggagacaggagaactcaaggaaccaaaagcactgttactctaagtctcagaaaaggttttcagtcaggatatggaggctcctggtcctcaagggtgaaccacttcacacaacagataaaaccatcattttaaaattcaaaatgtaagtgcaacttgagtttaagttgcactgctccatacctctaataaactcagctaggagccaggatacatggtagttcaaggcttcctaaaataagcttgaaattggggtacaggggaagggacatccattggctggatggacagagtggttgagctaaagagagctataaaggctcgtgctgggaaagaaagctgttatgcttagacttctctaggtgaactcagagtctcaaagaggaaatgttacaaatgtcacccgccagctttctggccagtaagcagaatgccaggttgctcagattcacagacatttgcaaaacagaagatgtctcctaatattatagactaagaatttgttgtccagaggagctgaccagttcctctttcagcatcaatatacatgatagaagaatgactaggtaaatttaaaaagacctacatctatatagatattgtaagtttgacagtatctgcccaagatcattagacactatatagtcaatatactgtgaattccttatactatgtaatgaatgggtttgtaatcaacatatttcacagtgtaccacagttaacagcatgcagatagtaaaatataatggtttcctgaagttatctcttaaaaaagtattttagtccttcagctattcaaatagatatataacaattgcatatagaacgtagagaaaattttattaaaaaattaaaactatttaaaacctgatatatgaaaataggcaacagtgagaaaaaagtcacttttgtgacaaatatttagctggtttgaaagacagaacaaggaggaatcatttactcataaagaaggctccaaataagttaaaacatggatgtatttttaaaatgaccactctagtagtgaatttaaaagtcttttaagggttagagtaatgtttttcattagtcttggctatttcctctagttctgacaagtacacaagaaaatggctactctcaagtaaggattattctgaaacacggctggatttagaaaataaatgaacattagggaaatttcaattaattaagactctccaaaccagggtggtagctcagcctgtaatccagcactttggaggcagaggtgggtggatcacctgaggttaggagttcgtgactagcctggccaacatggtgaaaccccgtctctactaaaaaacaataataataatacaaaaattagctgggcatggtggcatgagcctgtaatcccagctactggggaggctgaggcaggagaatctcttgaacccaggaggcggaggttgcagtgagccgagatcatgctattgcactccagcctgggcaacaagagtgaaactccatctcagaaaaaaaaaa

SEQ ID NO: 298 - DNA, 3500 bp, Homo sapiens
ttttttttttttatggctgttatgcttttaatggaagcagatacaaaattcatcaatgcaaaagaatgttttacatactcattaacatagtgattaatgtaaattatattttgacttgtaaaatacagtgtgtttggcctcaagaaactacagagctgcaactcaagataactggaaaggctccttacattgtttttgcccaccacctttatataatactcctaaatgatatctggggagggaattaaaaaataatacaaagctcttttcagctgtggttcaaagaactctagtgaagctgtatggcaatgacattttgggaccatgaagtttccccagaagtatttccggtaagaggcagttaagaagcttaatagtttcaaagtctggaaagcagcaaagatatcttagagaaaacattataaaccccacttctctcctacacagacattttaaagcatggacgtaactttaaggagactgagaaaacatcagtagttttcacaaagcttcaatgaacaccccaaggcacaagtgttgaaaacggcctgttcactaaaacgtcacttttggaggtacaggtatgctgtgcttgcagtgagaggatgactttatccctacttaaaagcaccaggtgtcaagctcagcttccatttacacaggatgcaccaattatccctatgatagtgactgtttcaagtactatactacatttccaacatgtcttttgcctatttgcttagtcggtactggggttcttttaagccccgtaggtctgtagaatattttaaaaggctagaattacctcaaaaatagtcttgaaataatactgagtccttctaaagagctcactggatattttaataacatttacagaaagacaaaatttgcagtagctgagtttaagtgaagaataatgtagaactaacgtgggctaaaatgtttcataattaatgtcaaaaattgccaagattattaatatatattttggtaatcactattgaccaggttaatttttttgtgcaaaatacactatgtattaatagaacaggaaaataattatttcagaccactaacaaaagaaaacccacagcaagagaagcatctgtagggcaattaaacgttagggaagtttactagctttagaatacatcaatatacttcgataaacaagagtgttttaatgtacttttagtaacgacccaatctaaggagccttggaggcttgtgaaaaagacgtccacaaagatgctgcatttctagtgtggggtgaattaaaatacttctgtaagaaggagggaactgaatcacctcagcatgaataaacagcatttttcttttaaacagtaactcataatctgatgactcactttgctttactagttcaaaattaggcaggagaagaactaagctaattggtcagacccagaaacacaaagatttggcaagctgcagtcactcagctcatgatgtgtgataatcagcagaaaggctgctcaactcttgtccattccttcacatctgtagaggagttcgatataaccacttctctttatcaactttaagctgcatacaggcaaagagatcacaaactgcagggaggccataatggtctggggggaagttatgttcctcctgtagaggtgaattaagtaatacttcctgggccttctttcgaagcagccacttgtcttctccagaagataactggctgaggttgcccatcttctttcctggcaggacccagtcagctgtgttaaaggaacaccaggaagtattcatggggcttttaaacttctgtttgccagctctgtcttcagtaccaggcacttccttgggacttccttctttgtatgggggcctgataagccactccgacaaggggctgttctttatgacttggaaggaatcagcaattctagaaggagtcattgcctttggtgctttagtttgttctattacttcttttctaggacagagccacatattcagggaatctttatgcttctcaggctcaggtttgggttccacaggcatcccatttttatcctttccttctttcttcagaagccacttatacagagcctccttctcacaattctcatcacacacacactctgcaaagcttgtgcagggctcattggctctgcacacctcctctaccttacatgggtcctgatggttctggacaagccaatcctctgtaaccatgctgggggtggacaatggtttcttggcctccaagtggtcattcaggcacttcagattgcccaggttttcaatctccacacctttgggctggtttccctgacagttggtacaggagtcagtcttgacaagccaatcattcacattataggactggaataagagcttaaacttctcactggtttcacgactgccattctcaggcttccgcagcttatgggattcctggggagtcactagccaatctgataggtccatctcatcttgatcaggaagctcttgatctccaaccttttccatttcaatggagaaagaactagtagtggaatggctgttacacttttgataacttgatttttcactcttgaggagccagttttctaagccctttaggtttcccccgacattattgaagaaattgcaggctctggaagaagtctgactgttctccaaggtctgcttttgggtaagccagtcctgggggtcggtgctgggtatgtaaggagcttgataaccactggcaggtttgcttccaaggagccattcgctgaaagggacagctacaataccggatgctgacttctgctctggcatggagatacagcctctcttctccaggaagggcccaatatttgctgaactagcatgagccatcaagtgctcaggaatttgaatggttttgagagacccaaatgtggtgatggtctggcgcagagtaattgtgtcagcttcaaagagcaggacagttgaatcttcaggcttaagggtcaaactgcccagtctctccaggcacacagagacttgattggctagatctttgttttgggtacactccagttgatgagtaagacaattgaactggcccaataacgagtagagctgctgagcctgctgttgaagtgtctcctctttaagctgataaataaggtccacctgttcatacagccatacctcacggcttctaagacattccaggtgacggcttatgcaactgtgaatctgagctttgacctctcgcaagttatctttaatttgctgttcagcccggagaactccaccaatagcaagctccaagtccctccgtgcatcactacacctcaaaaggggttctctattactggagctgccactctggtcttggaaggtattcattctcctcactgctcctcacaggccaggtcaccgactcaccagctgcccggcaagcgacaggctgctttacccctgacccgagtgcgaaaggtccccgagcccgggcctcgtcccgcccacgcgtcacacggcaactccag

SEQ ID NO: 299 - DNA, 2600 bp, Homo sapiens
ggcacgaggggagagaccacactgccatgcctccctctgggccccgaggaaccctccttctgttgccgctgctgctgctgctcctgcttcgcgccgtgctggctgtccccctggagcgaggggcgcccaacaaggaggagacccctgcgactgagagtcccgacacaggcctgtactaccaccggtacctccaggaggtcatcgatgtactggagacggatgggcatttccgagagaagctgcaggctgccaatgcggaggacatcaagagcgggaagctgagccgagagctggactttgtcagccaccacgtccgcaccaagctggatgagctcaagcgacaggaggtgtcacggctgcggatgctgctcaaggccaagatggacgccgagcaggatcccaatgtacaggtggatcatctgaatctcctgaaacagtttgaacacctggaccctcagaaccagcatacattcgaggcccgcgacctggagctgctgatccagacggccacccgggaccttgcccagtacgacgcagcccatcatgaagagttcaagcgctacgagatgcttaaggaacacgagagacggcgttatctggagtcactgggagaggagcagagaaaggaggcggagaggaagctggaagagcaacagcgccggcaccgcgagcaccctaaagtcaacgtgcctggcagccaagcccagttgaaggaggtgtgggaggagctggatggactggaccccaacaggtttaaccccaagaccttcttcatactgcatgatatcaacagtgatggtgtcctggatgagcaggagctggaggcactcttcaccaaggagctggagaaagtgtacgacccaaagaatgaggaggacgacatgcgggagatggaggaggagcgactgcgcatgcgggagcatgtgatgaagaatgtggacaccaaccaggaccgcctcgtgaccctggaggagttcctcgcatccactcagaggaaggagtttggggacaccggggagggctgggagacagtggagatgcaccctgcctacaccgaggaagagctgaggcgctttgaagaggagctggctgcccgggaggcagagctgaatgccaaggcccagcgcctcagccaggagacagaggctctagggcggtcccagggccgcctggaggcccagaagagagagctgcagcaggctgtgctgcacatggagcagcggaagcagcagcagcagcagcagcaaggccacaaggccccggctgcccaccctgaggggcagctcaagttccacccagacacagacgatgtacctgtcccagctccagccggtgaccagaaggaggtggacacttcagaaaagaaacttctcgagcggctccctgaggttgaggtgccccagcatctgtgatcctccgggaccccagccctcaggattcctgatgctccaaggcgactgatgggcgctggatgaagtggcacagtcagcttccctgggggccggtgtcatgttgggctcctggggcgggggcacggcctggcatttcacgcattgctgccaccccagatccacctgtctccactttcacagcctccaagtctgtggctcttcccttctgtcctccgaggggcttgccttctctcgtgtccagtgaggtgctcagtgatcggcttaacttagagaagcccgccccctccccttctccgtctgtcccaagagggtctgctctgagcctgcgttcctaggtggctcggcctcagctgcctgggttgtggccgccctagcatcctgtatgcccacagctactggaatccccgctgctgctccaggccaagcttctggttgattaatgagggcatggggtggtccctcaagaccttcccctaccttttgtggaaccagtgatgcctcaaagacagtgtcccctccacagctgggtgccaggggcaggggatcctcagtatagccggtgaaccctgataccaggagcctgggcctccctgaacccctggcttccagccatctcatcgccagcctcctcctggacctcttggcccccagccccttccccacacagccccagaagggtcccagagctgaccccactccaggacctaggcccagcccctcagcctcatctggagcccctgaagaccagtcccacccacctttctggcctcatctgacactgctccgcatcctgctgtgtgtcctgttccatgttccggttccatccaaatacactttctggaacaactggctgagcccaataaagacctgtacgtaaccttcacccgcctcacagacgaaaatcagccgacatcccaaaatgagaagcggagacacaatcgctgggaaacacatgccacggccaacaaacctgtaaacgcacccccaatgcgactccaactggagacaactccggcgaccccacctactgaagacccaaaagaaagcgaaaccctacagacggtcacaagagaagcacaccaaaagcgaccaccacgcccttgctggcgacaacctctccctcaaaccacaggacgctacatataactcatcctccaccatccgaccctagcgcacaaccgtcacaag

SEQ ID NO: 300 - DNA, 3485 bp, Homo sapiens
ggcggagatcgcgtctctttcgctccgtgtcccgctgctgctcctgtgagcgcccggcgagtccgtcccgtccaccgtccgcagctggtagccagcctgcccctcgcctcgactccctttcaccaacaccgacacccacattgacacctccagtccggccagccgctccactcgttgcctttgcatctccacacatggcgtcctccgcgcagagcggcggctcctccgggggacccgcggtccccaccgtgcagcggggcatcatcaagatggtcctctcagggtgcgccatcattgtccgaggtcagcctcgtggtgggcctcctcctgagcggcagatcaacctcagcaacattcgtgctggaaatcttgctcgccgggcagccgccacacaacctgatgcaaaggatacccctgatgagccctgggcatttccagctcgagagttccttcgaaagaagctgattgggaaggaagtctgtttcacgatagaaaacaagactccccaggggcgagagtatggcatgatctaccttggaaaagataccaatggggaaaacattgcagaatcactggttgcagagggcttagccacccggagagaaggcatgagagctaataatcctgagcagaaccggctttcagaatgtgaagaacaagcaaaggcagccaagaaagggatgtggagtgaggggaacggttcacatactatccgggatctcaagtataccattgaaaacccaaggcactttgtggactcacaccaccagaagcctgttaatgctatcatcgagcatgtgcgggacggcagtgtggtcagggccctgctcctcccagattactacctggttacagtcatgctgtcaggcatcaagtgcccaacttttcgacgggaagcagatggcagtgaaactccagagccttttgctgcagaagccaaatttttcactgagtcgcgactgcttcagagagatgttcagatcattctggagagctgccacaaccagaacattctgggtaccatccttcatccaaatggcaacatcacagagctcctcctgaaggaaggtttcgcacgctgtgtggactggtcgattgcagtttacacccggggcgcagaaaagctgagggcggcagagaggtttgccaaagagcgcaggctgagaatatggagagactatgtggctcccacagctaatttggaccaaaaggacaagcagtttgttgccaaggtgatgcaggttctgaatgctgatgccattgttgtgaagctgaactcaggcgattacaagacgattcacctgtccagcatccgaccaccgaggctggagggggagaacacccaggataagaacaagaaactgcgtcccctgtatgacattccttacatgtttgaggcccgggaatttcttcgaaaaaagcttattgggaagaaggtcaatgtgacggtggactacattagaccagccagcccagccacagagacagtgcctgccttttcagagcgtacctgtgccactgtcaccattggaggaataaacattgctgaggctcttgtcagcaaaggtctagccacagtgatcagataccggcaggatgatgaccagagatcatcacactacgatgaactgcttgctgcagaggccagagctattaagaatggcaaaggattgcatagcaagaaggaagtgcctatccaccgtgttgcagatatatctggggatacccaaaaagcaaagcagttcctgccttttcttcagcgggcaggtcgttctgaagctgtggtggaatacgtcttcagtggttctcgtctcaaactctatttgccaaaggaaacttgccttatcaccttcttgcttgcaggcattgaatgccccagaggagcccgaaacctcccaggcttggtgcaggaaggagagcccttcagcgaggaagctacacttttcaccaaggaactggtgctgcagcgagaggtggaggtggaggtggagagcatggacaaggccggcaactttatcggctggctgcacatcgacggtgccaacctgtccgtcctgctggtggagcacgcgctctccaaggtccacttcaccgccgaacgcagctcctactacaagtccctgctgtctgccgaggaggccgcaaagcagaagaaagagaaggtctgggcccactatgaggagcagcccgtggaggaggtgatgccagtgctggaggagaaggagcgatctgctagctacaagcccgtgtttgtgaccgagatcactgatgacctgcacttctacgtgcaggatgtggagaccggcacccagttggagaagctgatggagaacatgcgcaatgacattgccagtcacccccctgtagagggctcctatgccccccgcaggggagagttctgcattgccaaatttgtagatggagaatggtaccgtgcccgagtagagaaagtcgagtctcctgccaaaatacatgtcttctacattgactacggcaacagagaggtcctgccatccacccgcctgggtaccctatcacctgccttcagcactcgggtgctgccagctcaagccacggagtatgccttcgccttcatccaggtgccccaagatgatgatgcccgcacggacgccgtggacagcgtagttcgggatatccagaacactcagtgcctgctcaacgtggaacacctgagtgccggctgcccccatgtcaccctgcagtttgcagattccaagggcgatgtggggctgggcttggtgaaggaagggctggtcatggtggaggtgcgcaaggagaaacagttccagaaagtgatcacagaatacctgaatgcccaagagtcagccaagagcgccaggctgaacctgtggcgctatggagactttcgagctgatgatgcagacgaatttggctacagccgctaaggaggggatcgggtttggcccccagccccgctcacgccagtccctcttcctctgccgggagggtgttttcaactccaaaccccagagaggggttgtagattgggtccagctttgcttcagtgtgtggaaatgtctcgtggggtggcatcggggctgcggggtggggaccccaaggctttctggggcagacccttgtcctctgggatgatgggcactgctatccacagtctctgccagttggttttatttggaggtttgtgggctttttttaaaaaaaaaaagtcctcaaatcaggaagaaacatcaaagactatgtcctagtggagggagtaatcctaacacccaggctggccgccagctggcacctgcctctatcccagactgccctcgtcccagctctctgtccaactgttgattatgtgatttttctgatacgtccattctcaaatgccagtgtgttcacatcttcgctctggccagcccattctgtatttaaagcttttgaggcccaataaaatagtacgtgctgtctgcagcccttattgatcaaaaaaaaaa

SEQ ID NO: 301 - DNA, 3672 bp, Homo sapiens
acatgtgcatatttcattccccaggcagacattttttagaaatcaatacatgccccaatattggaaagacttgttcttccacggtgactacagtacatgctgaagcgtgccgtttcagccctcatttaattcaatttgtaagtagcgcacgagcctctgtgggggaggataggctgaaaaaaaaaagtgggctcgtatttatctacaggactccatatagtcatatataggcatataaatctatgctttttctttgtttttttctttcttcctttctttcaaaggtttgcattaacttttcaaagtagttcctataggggcattgaggagcttcctcattctgggaaaactgagaaaacccatattctcctaatacaacccgtaatagcatttttgcctgcctcgaggcagagtttcccgtgagcaataaactcagcttttttgtggggcacagtactggatttgacagtgattccccacgtgtgttcatctgcacccaccgagccaggcagaggccagccctccgtggtgcacacagcacgcgcctcagtccatcccattttagtctttaaaccctcaggaagtcacagtctccggacaccacaccacattgagcccaacaggtccacgatggatccacctagtcccaccccagcctttttctttcatctgaacagaatgtgcatttttggaagcctccctcactctccatgctggcagagcaggagggagactgaagtaagagatggcagagggagatggtggcaaaaaggtttagatgcaggagaacagtaagatggatggttccggccagagtcgatgtggggaggaacagagggctgaagggagagggggctgactgttccattctagctttggcacaaagcagcagaaagggggaaaagccaatagaaatttccttagcttccccaccatatgtattttcatggatttgagaggaaagagaggaaaatgggggaatgggttgcaaaatagaaatgagcttaatccaggccgcagagccagggaaggtgagtaaccttaggagggtgctagactttagaagccagataggaagaatcagtctaaactggccatgctttggaagggacaagactatgtgctccgctgcccaccttcagcctgcaatgagggactgaggcccacgagtctttccagctcttcctccattctggccagtccctgcatcctccctggggtggaggatggaaggaaagctgggacaagcagggaacgcatgattcagggatgctgtcactcggcagccagattccgaaactcccattctccaatgacttcctcaaccaatgggtggccttgtgactgttctttaaggctgaagatatccaggaaagggggcttggacactggccaaggagaccccttcgtgctgtggacacagctctcttcactctttgctcatggcatgacacagcggagaccgcctccaacaacgaatttggggctacgaagaggaatagcgaaaaagcaaatctgtttcaactgatgggaaccctatagctatagaacttgggggctatctcctatgcccctggacaggacagttggctggggacaggagaagtgctcaatcttcatgagacaaaggggcccgatcaaggcagccacaaggccttgacctgccgagtcagcatgccccatctctctcgacagctgtcccctaaacccaactcacgtttctgtatgtcttaggccagtatcccaaacctcttccacgtcactgttctttccacccattctccctttgcatcttgagcagttatccaactaggatctgccaagtggatactggggtgccactcccctgagaaaagactgagccaggaactacaagctccccccacattcctcccagcctggacctaattcttgagaggggctctctcttcacggactgtgtctggactttgagcaggcttctgccccttgcgttggctctttgctgccagccatcaggtgggggattagagcctggtgtaagtgcgccagactcttccggtttccaaagttcgtgcctgcgaacccaaacctgtgagtctcttctgcatgcaggagtttctcctgggcagctggtcactccccagagaagctgggccttcatggacacatggaactaagcctcccaaatgggagttctggctgagcccagggtggggagatcctgggaagggaggcactggaggaagacggcacctcttcccccatggcagggtgtgagggaggcaggtttggaatggtgcgagtatggcaatctaagcaggggtctggtctctttgactccaggctcgctttggccgactgtctgctcacccagagaccttggactccggactatccatggctccgaatctaagtgctgcccactcccatgctcacacccacagaaggtcttcccatcccctttagattcgtgcctcactccaccagtgaggaagatgcctctgtctttcccacgactgccaggagatagggaagcccagccaggactgaccctccttcctccagcctgccctgacccacctggcaaagcagggcacatggggaggaagagactggaacctttctttgacagccaggcctagacagacaggcctggggacactggccccatgaggggaggaaggcaggcgcacgaggtccagggaggcccttttctgatcatgccccttctctcccaccccatctccccaccaccacctctgtggcctccatggtacccccacagggctggcctcccctagagggtgggcctcaaccacctgctcccgccacgcaccggttagtgagacagggctgccacggcaaccgccaagcccccctcaaggtgggacagtaccccggacccatccactcactcctgagagggctccggcccagaatgggaacctcagagaagagctctaaggagaagaaaccccatagcgtcagagaggatatgtctggcttccaagagaaaggaggctccgttttgcaaagtggaggagggacgagggacaggggtttcaccagccagcaacctgggccttgtactgtctgtgtttttaaaaccactaaagtgcaagaattacattgcactgtttctccactttttattttctcttaggcttttgtttctatttcaaacatactttcttggttttctaatggagtatatagtttagtcatttcacagactctggcctcctctcctgaaatccttttggatggggaaagggaaggtggggagggtccgaggggaaggggaccccagcttccctgtgcccgctcaccccactccaccagtccccggtcgccagccggagtctcctctctaccgccactgtcacaccgtagcccacatggatagcacagttgtcagacaagattccttcagattccgagttgcctaccggttgttttcgttgttgttgttgttgtttttctttttctttttttttttgaagacagcaataaccacagtacatattactgtagttctctatagttttacatacattcataccataactctgttctctcctcttttttgttttcaactttaaaaacaaaaataaacgatgataatctttactggtgaaaaggatggaaaaataaatcaacaaatgcaaccagtttgtgagaaaaaaaaaa

SEQ ID NO: 302 - DNA, 2242 bp, Homo sapiens
cctcgccgcatccactctccggccggccgcctgcccgccgcctcctccgtgcgcccgccagcctcgcccgcgccgtcaccatgagccaggcctactcgtccagccagcgcgtgtcctcctaccgccgcaccttcggcggcgccccgggcttcccgctcggctccccgctgagctcgcccgtgttcccgcgggcgggtttcggctctaagggctcctccagctcggtgacgtcccgcgtgtaccaggtgtcgcgcacgtcgggcggggccgggggcctggggtcgctgcgggccagccggctggggaccacccgcacgccctcctcctacggcgcaggcgagctgctggacttctcactggccgacgcggtgaaccaggagtttctgaccacgcgcaccaacgagaaggtggagctgcaggagctcaatgaccgcttcgccaactacatcgagaaggtgcgcttcctggagcagcagaacgcgctcgccgccgaagtgaaccggctcaagggccgcgagccgacgcgagtggccgagctctacgaggaggagctgcgggagctgcggcgccaggtggaggtgctcactaaccagcgcgcgcgcgtcgacgtcgagcgcgacaacctgctcgacgacctgcagcggctcaaggccaagctgcaggaggagattcagttgaaggaagaagcagagaacaatttggctgccttccgagcggacgtggatgcagctactctagctcgcattgacctggagcgcagaattgaatctctcaacgaggagatcgcgttccttaagaaagtgcatgaagaggagatccgtgagttgcaggctcagcttcaggaacagcaggtccaggtggagatggacatgtctaagccagacctcactgccgccctcagggatatccgggctcagtatgagaccatcgcggctaagaacatttctgaagctgaggagtggtacaagtcgaaggtgtcagacctgacccaggcagccaacaagaacaacgacgccctgcgccaggccaagcaggagatgatggaataccgacaccagatccagtcctacacctgcgagattgacgccctcaagggcactaacgattccctgatgaggcagatgcgggaattggaggaccgatttgccagtgaggccagtggctaccaggacaacattgcgcgcctggaggaggaaatccggcacctcaaggatgagatggcccgccatctgcgcgagtaccaggacctgctcaacgtgaagatggccctggatgtggagattgccacctaccggaagctgctggagggagaggagagccggatcaatctccccatccagacctactctgccctcaacttccgagaaaccagccctgagcaaaggggttctgaggtccataccaagaagacggtgatgatcaagaccatcgagacacgggatggggaggtcgtcagtgaggccacacagcagcagcatgaagtgctctaaagacagagaccctctgccaccagagaccgtcctcacccctgtcctcactgctccctgaagccagccttcttccatcccaggacaccacacccagcctcagtcctcccctcacagcctctgacccctcctcactggccatccctcgtggtccccaacagcgacatagcccatccctgcctggtcacagggcatgccccggccacctctgcggaccccagctgtgagccttggctgttggcagtgagtgagcctggctcttgtgctggatggagcccaggcgggagcggtggccctgtccctcccacctctgtgacctcaggcactagcctttggctctggagacagccccagagcagggtgttgggatactgcagggccaggactgagccccgcagacctccccagcccctagcccaggagagagaaagccaggcaggtagccagggggactagcccctgtggagactggggggcttgaaattgtccccgtggtctcttactttcctttccccagcccagggtggacttagaaagcaggggctacaagagggaatccccgaaggtgctggaggtgggagcaggagattgagaaggagagaaagtgggtgagatgctggagaagagaggagaggagagaggcagagagcggtctcaggctggtgggaggggcgcccacctccccacgccctcccctcccctgctgcaggggctctggagagaaacaataaagagattcacacacaaaaaaaaaa

SEQ ID NO: 303 - DNA, 14342 bp, Homo sapiens
ggccggcgagcgggcggctgcgggcggcgcggagcgggcggcgcggagcgagcgagcgagagagcggcgcgggccgggccatggggtggcgggcgccgggcgcgctgctgctggcgctgctgctgcacgggcggctgctggcggtgacccatgggctgagggcatacgatggcttgtctctgcctgaggacatagagaccgtcacagcaagccaaatgcgctggacacattcgtacctttctgatgatgagtacatgctggctgacagcatctcaggagacgacctgggcagtggggacctgggcagcggggacttccagatggtttatttccgagccctggtgaatttcactcgctccatcgagtacagccctcagctggaggatgcaggctccagagagtttcgagaggtgtccgaggctgtggtagacacgctggagtcggagtacttgaaaattcccggagaccaggttgtcagtgtggtgttcatcaaggagctggatggctgggtttttgtggagctcgatgtgggctcggaagggaatgcggatggtgctcagattcaggagatgctgctcagggtcatctccagcggctctgtggcctcctacgtcacctctccccagggattccagttccgacgcctgggcacagtgccccagttcccaagagcctgcacggaggccgagtttgcctgccacagctacaatgagtgtgtggccctggagtatcgctgtgaccggcggcccgactgcagggacatgtctgatgagctcaattgtgaggagccagtcctgggtatcagccccacattctctctccttgtggagacgacatctttaccgccccggccagagacaaccatcatgcgacagccaccagtcacccacgctcctcagcccctgcttcccggttccgtcaggcccctgccctgtgggccccaggaggccgcatgccgcaatgggcactgcatccccagagactacctctgcgacggacaggaggactgcgaggacggcagcgatgagctagactgtggccccccgccaccctgtgagcccaacgagttcccctgcgggaatggacattgtgccctcaagctgtggcgctgcgatggtgactttgactgtgaggaccgaactgatgaagccaactgccccaccaagcgtcctgaggaagtgtgcgggcccacacagttccgatgcgtctctaccaacatgtgcatcccagccagcttccactgtgacgaggagagcgactgtcctgaccggagcgacgagtttggctgcatgcccccccaggtggtgacacctccccgggagtccatccaggcttcccggggccagacagtgaccttcacctgcgtggccattggcgtccccgccccctttctcatcaattggaggctcaactggggccacatcccctctcagcccagggtgacagtgaccagcgagggtggccgtggcacactgatcatccgtgatgtgaaggagtcagaccagggtgcctacacctgtgaggccatgaacgcccggggcatggtgtttggcattcctgacggtgtccttgagctcgtcccacaacgagcaggcccctgccctgacggccacttctacctggagcacagcgccgcctgcctgccctgcttctgctttggcatcaccagcgtgtgccagagcacccgccgcttccgggaccagatcaggctgcgctttgaccaacccgatgacttcaagggtgtgaatgtgacaatgcctgcgcagcccggcacgccacccctctcctccacgcagctgcagatcgacccatccctgcacgagttccagctagtcgacctgtcccgccgcttcctcgtccacgactccttctgggctctgcctgaacagttcctgggcaacaaggtggactcctatggcggctccctgcgttacaacgtgcgctacgagttggcccgtggcatgctggagccagtgcagcggccggacgtggtcctcgtgggtgccgggtaccgcctcctctcccgaggccacacacccacccaacctggtgctctgaaccagcgccaggtccagttctctgaggagcactgggtccatgagtctggccggccggtgcagcgcgcggagctgctgcaggtgctgcagagcctggaggccgtgctcatccagaccgtgtacaacaccaagatggctagcgtgggacttagcgacatcgccatggataccaccgtcacccatgccaccagccatggccgtgcccacagtgtggaggagtgcagatgccccattggctattctggcttgtcctgcgagagctgtgatgcccacttcactcgggtgcctggtgggccctacctgggcacctgctctggttgcagttgcaatggccatgccagctcctgtgaccctgtgtatggccactgcctgaattgccagcacaacacggaggggccacagtgcaagaagtgcaaggctggcttctttggggacgccatgaaggccacggccacttcctgccggccctgcccttgcccatacatcgatgcctcccgcagattctcagacacttgcttcctggacacggatggccaagccacatgtgacgcctgtgccccaggctacactggccgccgctgtgagagctgtgcccccggatacgagggcaaccccatccagcccggcgggaagtgcaggcccgtcaaccaggagattgtgcgctgtgacgagcgtggcagcatggggacctccggggaggcctgccgctgtaagaacaatgtggtggggcgcttgtgcaatgaatgtgctgaccgctctttccacctgagtacccgaaaccccgatggctgcctcaagtgcttctgcatgggtgtcagtcgccactgcaccagctcttcatggagccgtgcccagttgcatggggcctctgaggagcctggtcacttcagcctgaccaacgccgcaagcacccacaccaccaacgagggcatcttctcccccacgcccggggaactgggattctcctccttccacagactcttatctggaccctacttctggagcctcccttcacgcttcctgggggacaaggtgacctcctatggaggagagctgcgcttcacagtgacccagaggtcccagccgggctccacacccctgcacgggcagccgttggtggtgctgcaaggtaacaacatcatcctagagcaccatgtggcccaggagcccagccccggccagcccagcaccttcattgtgcctttccgggagcaagcatggcagcggcccgatgggcagccagccacacgggagcacctgctgatggcactggcaggcatcgacaccctcctgatccgagcatcctacgcccagcagcccgctgagagcagggtctctggcatcagcatggacgtggctgtgcccgaggaaaccggccaggaccccgcgctggaagtggaacagtgctcctgcccacccgggtaccgtgggccgtcctgccaggactgtgacacaggctacacacgcacgcccagtggcctctacctgggtacctgtgaacgctgcagctgccatggccactcagaggcctgcgagccagaaacaggtgcctgccagggctgccagcatcacacggagggccctcggtgtgagcagtgccagccaggatactacggggacgcccagcgggggacaccacaggactgccagctgtgcccctgctacggagaccctgctgccggccaggctgcccacacttgttttctggacacagacggccaccccacctgtgatgcgtgctccccaggccacagtgggcgtcactgtgagaggtgcgcccctggctactatggcaaccccagccagggccagccatgccagagagacagccaggtgccagggcccataggctgcaactgtgacccccaaggcagcgtcagcagccagtgtgatgctgctggtcagtgccagtgcaaggcccaggtggaaggcctcacttgcagccactgccggccccaccacttccacctgagtgccagcaacccagacggctgcctgccctgcttctgtatgggcatcacccagcagtgcgccagctctgcctacacacgccacctgatctccacccactttgcccctggggacttccaaggctttgccctggtgaacccacagcgaaacagccgcctgacaggagaattcactgtggaacccgtgcccgagggtgcccagctctcttttggcaactttgcccaactcggccatgagtccttctactggcagctgccggagacataccagggagacaaggtggcggcctacggtgggaagttgcgatacaccctctcctacacagcaggcccacagggcagcccactctctgaccccgatgtgcagatcacgggcaacaacatcatgctagtggcctcccagccagcgctgcagggccctgagaggaggagctacgagatcatgttccgagaggaattctggcgccggcccgatgggcagccggccacacgcgagcacctcctgatggcactggccgacctggatgagctcctgatccgggccacgttctcctccgtgccgctggtggccagcatcagcgcagtcagcctggaggtcgcccagccggggccctcaaacagaccccgcgccctcgaggtggaggagtgccgctgcccgccaggctacatcggtctgtcctgccaggactgtgcccccggctacacgcgcaccgggagtgggctctacctcggccactgcgagctatgtgaatgcaatggccactcagacctgtgccacccagagactggggcctgctcgcaatgccagcacaacgccgcaggggagttctgcgagctttgtgcccctggctactacggagatgccacagccgggacgcctgaggactgccagccctgtgcctgcccactgaccaacccagagaacatgttttcccgcacctgtgagagcctgggagccggcgggtaccgctgcacggcctgcgaacccggctacactggccagtactgtgagcagtgtggcccaggttacgtgggtaaccccagtgtgcaagggggccagtgcctgccagagacaaaccaagccccactggtggtcgaggtccatcctgctcgaagcatagtgccccaaggtggctcccactccctgcggtgtcaggtcagtgggaggggaccccactacttctattggtcccgtgaggatgggcggcctgtgcccagcggcacccagcagcgacatcaaggctccgagctccacttccccagcgtccagccctcggatgctggggtctacatttgcacctgccgtaatctccaccgatccaataccagccgggcagagctgctggtcactgaggctccaagcaagcccatcacagtgactgtggaggagcagcggagccagagcgtgcgccccggagctgacgtcaccttcatctgcacagccaaaagcaagtccccagcctataccctggtgtggacccgcctgcacaacgggaaactgcccacccgagccatggatttcaatggcatcctgaccattcgcaacgtccagctgagtgatgcaggcacctacgtgtgcaccggctccaacatgtttgccatggaccagggcacagccactctacatgtgcaggcctcgggcaccttgtccgcccccgtggtctccatccatccgccacagctcacagtgcagcccgggcaactggcggagttccgctgcagcgccacagggagccccacgcccaccctcgagtggacagggggccccggcggccagctccctgcgaaggcacaaatccacggcggcatcctgcgcctgccagctgtcgagcccacggatcaggcccagtacttgtgccgagcccacagcagcgctgggcagcaggtggccagggctgtgctccacgtgcatgggggcggtgggcccagagtccaagtgagcccagagaggacccaggtccacgcaggccgcaccgtcaggctgtactgcagggctgcaggcgtgcctagcgccaccatcacctggaggaaggaagggggcagcctcccaccacaggcccggtcagagcgcacagacatcgcgacactgctcatcccagccatcacgactgctgacgccggcttctacctctgcgtggccaccagccctgcaggcactgcccaggcccggatccaagtggttgtcctttcagcctcagatgccagccaaccgccggtcaagattgagtcctcatcgccttctgtgacagaagggcaaacactcgacctcaactgtgtggtggcagggtcagcccatgcccaggtcacctggtacaggcgagggggtagcctgcctcaccacacccaggtgcacggctcccgtctgcggctcccccaggtctcaccagctgattctggagagtatgtgtgccgtgtggagaatggatcgggccccaaggaggcctccattactgtgtctgtgctccacggcacccattctggccccagctacaccccagtgcccggcagcacccggcccatccgcatcgagccctcctcctcacacgtggcggaagggcagaccctggatctgaactgcgtggtgcccgggcaggcccacgcccaggtcacgtggcacaagcgtgggggcagcctccctgcccggcaccagacccacggctcgctgctgcggctgcaccaggtgaccccggccgactcaggcgagtatgtgtgccatgtggtgggcacctccggccccctagaggcctcagtcctggtcaccatcgaagcctctgtcatccctggacccatcccacctgtcaggatcgagtcttcatcctccacagtggccgagggccagaccctggatctgagctgcgtggtggcagggcaggcccacgcccaggtcacatggtacaagcgtgggggcagcctccctgcccggcaccaggttcgtggctcccgcctgtacatcttccaggcctcacctgccgatgcgggacagtacgtctgccgggccagcaacggcatggaggcctccatcacggtcacagtaactgggacccagggggccaacttagcctaccctgccggcagcacccagcccatccgcatcgagccctcctcctcgcaagtggcggaagggcagaccctggatctgaactgcgtggtgcccgggcagtcccatgcccaggtcacgtggcacaagcgtgggggcagcctccctgtccggcaccagacccacggctccctgctgagactctaccaagcgtcccccgccgactcgggcgagtacgtgtgccgagtgttgggcagctccgtgcctctagaggcctctgtcctggtcaccattgagcctgcgggctcagtgcctgcacttggggtcacccccacggtccggatcgagtcatcgtcttcgcaagtggcagaggggcagaccctggacctgaactgcctcgttgctggtcaggcccatgcccaggtcacgtggcacaagcgcgggggcagcctcccggcccggcaccaggtgcatggctcgaggctacgcctgctccaggtgaccccagctgattcaggggagtacgtgtgccgtgtggtcggcagctcaggtacccaggaagcctcagtccttgtcaccatccagcagcgccttagtggctcccactcccagggtgtggcgtaccccgtccgcatcgagtcctcctcagcctccctggccaatggacacaccctggacctcaactgcctggttgccagccaggctccccacaccatcacctggtataagcgtggaggcagcttacccagccggcaccagatcgtgggctcccggctgcggatccctcaggtgactccggcagactcgggcgagtacgtgtgtcacgtcagtaacggtgcaggctcccgggagacctcgctcatcgtcaccatccagggcagcggttcctcccacgtgcccagagtctccccaccgatcaggatcgagtcgtcttcccccacggtggtggaagggcagaccttggatctgaactgcgtggtcgccaggcagccccaggctatcatcacatggtacaagcgtgggggcagccttccctcccgacaccagacccatggctcccacctgcggttgcaccaaatgtctgtggctgactcgggcgagtatgtgtgccgggccaacaacaacatcgatgccctggaggcctcaatcgtcatctccgtctcccctagcgccggcagcccctccgcccctggcagctccatgcccatcagaattgagtcatcctcctcacacgtggccgaaggggagaccctggatctgaactgcgtggtccccgggcaggcccatgcccaggtcacttggcacaagcgtgggggcagcctccccagttaccatcagacccgcggctcacggctgcggctgcaccatgtgtccccggccgactcgggtgaatacgtgtgccgggtgatgggcagctctggccccctggaggcctcagtcctcgtcaccatcgaagcctctggctcaagtgctgtccacgtccccgccccaggtggagccccacccatccgcatcgagccctcctcctcccgagtggcagaagggcagaccctggatctgaagtgcgtggtgcccgggcaggcccacgcccaggtcacgtggcacaagcgtggaggaaacctccctgcccggcaccaggtccacggcccactgctgaggctgaaccaggtgtccccggctgactctggcgagtactcgtgccaagtgaccggaagctcaggcaccctggaggcatctgtcctggtcacaattgagccctccagcccaggacccattcctgctccaggactggcccagcccatctacatcgaggcctcctcttcacacgtgactgaagggcagactctggatctgaactgtgtggtgcccgggcaggcccatgcccaggtcacgtggtacaagcgcgggggcagcctccccgcccggcaccagacccatggctcccagctgcggctccaccacgtctcccctgccgactcaggcgagtatgtgtgtcgtgcagccggcggcccaggccctgagcaagaagcctccttcacagtcaccgtcccgcccagtgaggggtcttcctaccgccttaggagcccggtcatctcgatcgacccgcccagcagcaccgtgcagcagggccaggatgccagcttcaagtgcctcatccatgacggggcagcccccatcagcctcgagtggaagacccggaaccaggagctggaggacaacgtccacatcagtcccaatggctccatcatcaccatcgtgggcacccggcccagcaaccacggtacctaccgctgcgtggcctccaatgcctacggtgtggcccagagtgtggtgaacctcagtgtgcacgggccccctacagtgtccgtgctccccgagggccccgtgtgggtgaaagtgggaaaggccgtcaccctggagtgtgtcagtgccggggagccccgctcctctgctcgttggacccggatcagcagcacccctgccaagttggagcagcggacatatgggctcatggacagccacacggtgctgcagatttcatcagctaaaccatcagatgcgggcacttatgtgtgccttgctcagaatgcactaggcacagcacagaagcaggtggaggtgatcgtggacacgggcgccatggccccaggggcccctcaggtccaagctgaagaagctgagctgactgtggaggctggacacacggccaccttgcgctgctcagccacaggcagccccgcgcgcaccatccactggtccaagctgcgttccccactgccctggcagcaccggctggaaggtgacacactcatcataccccgggtagcccagcaggactcgggccagtacatctgcaatgccactagccctgccgggcacgctgaggccaccatcatcctgcacgtggagagcccaccatatgccaccacggtcccagagcacgcttcggtgcaggcaggggagacggtgcagctccagtgcctggctcacgggacacccccactcaccttccagtggagccgcgtgggcagcagccttcctgggagggcgaccgccaggaacgagctgctgcactttgagcgtgcagcccctgaggactcaggccgctaccgctgccgggtcaccaacaaggtgggctcagccgaggcctttgcccagctgctcgtccaaggccctcccggctctctccctgccacctccatcccagcagggtccacgcccaccgtgcaggtcacgcctcagctagagaccaagagcattggggccagcgttgagttccattgtgctgtgcccagcgaccggggtacccagctccgttggttcaaggaagggggtcagctgcctcccggtcacagcgtgcaggatggggtgctccgaatccagaacttggaccagagctgccaagggacgtatatatgccaggcccatggaccttgggggaaggcccaggccagtgcccagctggttatccaagccctgccctcggtgctcatcaacatccggacctctgtgcagaccgtggtggttggccacgccgtggagttcgaatgcctggcactgggtgaccccaagcctcaggtgacatggagcaaagttggagggcacctgcggccaggcattgtgcagagcggaggtgtcgtcaggatcgcccacgtagagctggctgatgcgggacagtatcgctgcactgccaccaacgcagctggcaccacacaatcccacgtcctgctgcttgtgcaagccttgccccagatctcaatgccccaagaagtccgtgtgcctgctggttctgcagctgtcttcccctgcatagcctcaggctaccccactcctgacatcagctggagcaagctggatggcagcctgccacctgacagccgcctggagaacaacatgctgatgctgccctcagtccaaccccaggacgcaggtacctacgtctgcaccgccactaaccgccagggcaaggtcaaagcctttgcccacctgcaggtgccagagcgggtggtgccctacttcacgcagaccccctactccttcctaccgctgcccaccatcaaggatgcctacaggaagttcgagatcaagatcaccttccggcctgactcagccgatgggatgctgctgtacaatgggcagaagcgagtcccagggagccccaccaacctggccaaccggcagcccgacttcatctccttcggcctcgtggggggaaggcccgagttccggttcgatgcaggctcaggcatggccaccatccgccatcccacaccactggccctgggccatttccacaccgtgaccctgctgcgcagcctcacccagggctccctgattgtgggtgacctggccccggtcaacgggacctcccagggcaagttccagggcctggatctgaacgaggaactctacctgggtggctatcctgactatggtgccatccccaaggcggggctgagcagcggcttcataggctgtgtccgggagctgcgcatccagggcgaggagatcgtcttccatgacctcaacctcacggcgcacggcatctcccactgccccacctgtcgggaccggccctgccagaatggcggtcagtgccatgactctgagagcagcagctatgtgtgcgtctgcccagctggcttcaccgggagccgctgtgagcactcgcaggccctgcactgccatccagaggcctgtgggcccgacgccacctgtgtgaaccggcctgacggtcgaggctacacctgccgctgccacctgggccgctcggggttgcggtgtgaggaaggtgtgacagtgaccaccccctcgctgtcgggtgctggctcctacctggcactgcccgccctcaccaacacacaccacgagctacgcctggacgtggagttcaagccactcgcccctgacggggtcctgctgttcagcggggggaagagcgggcctgtggaggacttcgtgtccctggcgatggtgggcggccacctggagttccgctatgagttggggtcagggctggccgttctgcggacggccgagccgctggccctgggccgctggcaccgtgtgtctgcagagcgtctcaacaaggacggcagcctgcgggtgaatggtggacgccctgtgctgcgctcctcgcccggcaagagccagggcctcaacctgcacaccctgctctacctggggggtgtggagccttccgtgccactgtccccggccaccaacatgagcgctcacttccgcggctgtgtgggcgaggtgtcagtgaatggcaaacggctggacctcacctacagtttcctaggcagccagggcatcgggcaatgctatgacagctccccatgtgagcgccagccttgccaacatggtgccacgtgcatgcccgctggcgagtatgagttccagtgcctgtgtcgagatggaatcaaaggagacctgtgtgagcacgaggagaacccctgccagctccgtgaaccctgtctgcatgggggcacctgccagggcacccgctgcctctgcctccctggcttctctggcccacgctgccaacaaggctctggacatggcatagcagagtccgactggcatcttgaaggcagcgggggcaatgatgcccctgggcagtacggagcctatttccacgatgatggcttcctcgccttccctggccatgtcttctccaggagcctgcccgaggtgcccgagaccatcgagctggaggttcggaccagcacagccagtggcctcctgctctggcagggtgtggaggtgggagaggccggccaaggcaaggacttcatcagcctcgggcttcaagacgggcaccttgtcttcaggtaccagctgggtagtggggaggcccgcctggtctctgaggaccccatcaatgacggcgagtggcaccgggtgacagcactgcgggagggccgcagaggttccatccaagtcgacggtgaggagctggtcagcggccggtccccaggtcccaacgtggcagtcaacgccaagggcagcatctacatcggcggagcccctgacgtggccacgctgaccgggggcagattctcctcgggcatcacaggctgtgtcaagaacctggtgctgcactcggcccgacccggcgccccgcccccacagcccctggacctgcagcaccgcgcccaggccggggccaacacacgcccctgcccctcgtaggcacctgcctgccccacacggactcccgggccacgccccagcccgacaatgtcgagtatattattattaatattattatgaatttttgtaagaaaccgaggcgatgccacgctttgctgctaccgccctgggctggactggaggtgggcatgccaccctcacacacacagctgggcaaagccacaaggctggccagcaaggcaggttggatgggagtgggcacctcagaaagtcaccaggacttggggtcaggaacagtggctgggtgggcccagaactgcccccactgtccccctacccaccgatggagcccccagatagagctgggtggcctgtttctgcagcccttgggcagttctcactcctaggagagccaacctcggcttgtgggctggtgccccacagctacctgagacgggcatcgcaggagtctctgccacccactcaggattgggaattgtctttagtgccggctgtggagcaaaaggcagctcacccctgggcaggcggtccccatccccaccagctcgtttttcagcacccccacccacctccacccagcccctggcacctcctctggcagactccccctcctaccacgtcctcctggcctgcattcccaccccctcctgccagcacacagcctggggtccctccctcaggggctgtaagggaaggcccaccccaactcttaccaggagctgctacaggcagagcccagcactgatagggccccgcccaccgggccccgcccaccccaggccacatccccacccatctggaagtgaaggcccagggactcctccaacagacaacggacggacggatgccgctggtgctcaggaagagctagtgccttaggtgggggaaggcaggactcacgactgagagagagaggagggggatatgaccaccctgccccatctgcaggagcctgaagatccagctcaagtgccatcctgccagtggcccccagactgtggggttgggacgcctggcctctgtgtcctagaagggaccctcctgtggtctttgtcttgatttttcttaataaacggtgctatccccgcaaaaaaaaaa

SEQ ID NO: 304 - DNA, 1454 bp, Homo sapiens
acagtggtttgagcacaatggactagacctagtctcttattcccatgcctgctcttttcaccacccaaagctgacactagaaggaatgactacggtgcagaatttccaaaccctaatttgaggaaattccccaaggggactttttcatgcaagctggagagcctcaaaaatgccatgaatgcctaggaaggttctaagggccctaatattctaacctgaacactagaaagccgggcaagccgcatagtggggaagcaggggactgggacccccgtccctgagaatggaagtaataggcaagaagccaaggggcttcccaggacaagctaaaaaagagcagatccagactacaactacagaatcctgtaagattctgaaactttgtcacttcctttctaaggcttccttcctaagcctctctgtgaaactctttgaaaaggggtatgtgggctagcctgcaaggacagccagaagggagaaggatcacatccccctccgtggccaggctctgagagacagaaatccagtgaaggacagagcatggggctgagtgtctgtagcccactgcattgagggcaggagagctcagggcaggtctgagtcatcaccattttctgtgtgtttcttcctaataagtgaaataatgtgtagtgtctagcacggtgcctgacagctcacagaaaatccccaacttcccctcccccaccgccatgccttctaactctcggtgagatgaacatctctactgggaggggaagccattgagggaagaaatgctggcaccttgacatttggggaaagaaagggaaggaattgttttccaagtatctactttgtgccagaaatggtgttgggcaatttactgattgcctcatttaatcctttgacgtatcctaggagttaggtattctcagccccatttccagaaagcaaaccaaggtgaaaaagagttaataatttgttcaaagacatatggaaaagtgccaggcatggtggctcacgcctgtaatcctagcactttgggaggccaaggcgggcagatcacttgaggtcaggagttcaagaccagcctggccaacaaggcgaaatgctgtctcgactaaaaatacaaaaattagccagaaatcacttgaatctgggaggcggaagttgcagtaagccaagatcgtgccactggcactccagcctgggcaacagagtgagactccatctaaagaaaaagcaagacaaagaagaaaaaaatttgttggggggcatagggcctcgaaaaaggtttttagagaccatctggttggtcgcgggtgcccctcggggactagcgaaccaggggcaaacggggtcccaaggagaacaccggacgacaaaggcctggaatgctccaccaaataaaaaacgcggggggaacccgcagcgtctgaaacactccagaggagaccagggcacaaggggcgtaa

SEQ ID NO: 305 - DNA, 1359 bp, Homo sapiens
tttttttctcttgttctggtcccttttatttctttctttttgctccttttctttttttgtgtgcttttttttttttggtctttattttttccttactttttcccctttgggggcgcctatagactcgaaggatccacagttgtacaaaaaagcaggcttgtaaaacgacggccagtaactataacggtcctaaggtagcgaggcctgggtggcgaattcggcacgagggttggctgcagatttgtggtgcgttctgagccgtctgtcctgcgccaagatgcttcaaagtattattaaaaacatatggatccccatgaagccctactacaccaaagtttaccaggagatttggataggaatggggctgatgggcttcatcgtttataaaatccgggctgctgataaaagaagtaaggctttgaaagcttcagcgcctgctcctggtcatcactaaccagatttacttggagtacatgtgaaagaaaacgtcagtctgcctgtaaatttcagcaagccgtgttagatggggagcgtggaacgtcactgtacacttgtataagtaccgtttacttcatggcatgaataaatggatctgtgagatgcactgctacctggtactgctttcagtgtgttccccctcagcccctccggcgtgtcaggcatactctgagtagataatttgtcatgcagcgcatgcaatcagaatctcactgagccacccatcattgtgaaataattacctcagttgtacaggacttggtgatcaggatccaggcactcacttgtattctactgctcaataaacgtttattaaactccaaagagaaagcaaacagacaaaaatttcgcgcgcctggccggaaaaatctcagaccctcgtggtgggcgcgcccgaggtaacgacagggcacaggccagaaccggcagaaggcggggtccccaaaaacccgggcacgcggctgaaaccgaggcggggcacggctacagcgccggccgtaaaaccccggggaaaaacaaagtacaaagcaacgaggacacaacgcaaacaagagaaaacacagaaagaaaagggcgaccaaaaaaaaagacacaaagacaaaatgagaacagaacaacaaaaaaaaagggaggcaggaggaagaggaggagggagaacgcagcgagggagacaggcaggagcgaggaggagggagagaacgagaagagagagaggggaaggaggcgaagaggacagcagaaagaagcagagcggagggaaggcagagaaagagagagaggagaaagaggaaggagagggagaggcagagaacgagagcaggaaaagcgagcgggacagcggagtgaggagggggagagagc

SEQ ID NO: 306 - DNA, 3206 bp, Homo sapiens
ttttttttttttaaatatttttcaaggttttattgcaaaccaaaatcagtttatcacacacaaaaaaagttgtgtgatgggatgagggaaggattgtacgtattataaccatgttaattacagtacattaaaatggtggtttacattacaaataagcctgtaagtttaaatatactagtgttataacccaatgtacagacgttctttatacaatacatacaattatcaggaatgcaaaaaaaaaaacataaataatgcccattttacaggtgacattttaaacaatgaaaaacaccaacggctctgactgacaactggggcattggtccataaaaaccctttctaaaaatagaaatatttgtagcagcaatgctttctttaagcatctgaatacgagtcattgcaagaccatttcaataaattttagttattaaccgtatcttacaaaaaagtctacacataaatttatcttccaaatatggaagaaacaaacaatgtcccacgttgtagtgtcctgcaagtgtcacattgatgcttataacaaaatccatctgtgatcaggcataccacactcacacgacggttcacacagcatatccacaagggaaaataaagaactgaaacactgcgataggaaaagctttggagctaacacaatctcttcagaaaaggcacatttcataatattcgtcatcacagcccagacagatctgcaggagaccttttttagaacagcgtccgctttctaacgaaactcctgcctccgtctaaggcggcactctaacgctcgtttcagagatagcaccacgttggaaggaagaataaaaatgaaaacctcatgagctcactgaggagaatgtgctcttcaaaaagcttccagcgaacagtgtgcaataagattgctaagcttccagagatgtgcaaattctcttgtaagatgtcctgtcagctggcggctccaccaaaaggctaactaaaacattcggaaacacacataaaatcctttaaaaccaagccctaacagggttcagaggaaagagtccgtgggaggcgcataggaaaagcctaggaaagcctcggcagcttccttgacgctggctgtgacgaggacgctgtcaggggacttgccaatggagttggggacaggctcttcggtaaactcggggtcaaagtgccgtaggtcgttgggcccactcacatttgggttaaaagggggagtaatcttcttattaatgagatcatcccagttaattaaggagaagaagacatgactcttaatctccatgaagtcatccttggccccgagccgctttgtcctgtccttctgcaggaggccctccaggaggtgtcttgcggaatttgtaatatttggtttcagctggagaggcttgttcagaatgttgtcgtacatttcagctgtgtttcggctataaaaaggcggcaggccatacagcatctcatacaagacagctcccaggcaccaccagtccacagtcctgtcataaggctgcttatgaagcacctcaggtgcgagatactccggcgtgccacagaaggtggatgttgtgctgttgtgttcaatgttctccttgcagagtccgaagtcagtaaggacaatgtgtccctgtgaatctagcaaaatattctctggttttaagtctctataaacgatgttcagtgaatgcaggtagcccaaggcactggctatttcagcagcatagaaacgagcccgtggttccaggaagcagcgttccctctggagatggtagaacaactctccaccattaatgtagtctaggacaaagtacaatttgtcagcagtctggaaagagaagtgaaggcccaccaggaaagggtgcttcacattcttcaacagaacattccgctccgacataatatgcttctcctctttctttttcaggattgctttcttctgtaaaactttgactgcatagaacacttcttctgccttgtgtcttgctagaagaacctttccaaaactgccctttccgatcactttcaagaagtgaaagtcagatggtttagcatgaggattggacgacgggccaaggttgatttgctgagaaggacttggtggaggagaagggttggcattcataagctcaggctcctgaggttgggagatcttcaagatggactgaacttcagggtgtttgcatgcataggagttattggcaatcttctgaataaagtcgttcagacccatcctcctctgcttcatgaaagctggatcatcattagtccagaaggttcttggatcgggcttggtcaggatgttggcatgattacatggctctctcacttcacacccagattgagtttcccatgaacatgactcgttctcctgagggagaacccctctttggaaagcatgttcacccaggcatgtttgacacaaggaagactcgaagtctggctcccctggagggatgtgcaccatggaggagccggtgtacttcaggctgggactctgatgcttgtccacactgaccattgggctcttgatccaccttcgtacccgcttcttaaaaaattggaaggctgagcatttcttgactgggaatccattcatgtctttgtttaccattttccaccgtggggaattcacagttatagatccaggttggcacccgcctggttagtgcatatctgtttccccggtttacctcctgcagacagttaatgaagactgagcgggatggagaatctagcggggctcagttcttcactcgcgcattctgcagcaccagctactgcagcaacctctccccactttcagttgccaccgacagcggcttttctccttccatcattgctccgaaacatatgcatcaccgctgcaggaccctgggggccggacggtgggatacggccaatctccggggagatgctgtggctcttaccgagcgggagaagggtacgcctccccgcccccagctacctggctgctcttccgcggccggcgcggggagcgagtcgctcttctccaggtgatgcgctcctggaggcggcttgagagaggagagttgtttttgattgtgcaagttccagtgggagctgtagttaagcagctgagagaaggagtaagaaagagcagaagccagagggagggagggagaacagcgccagaaaggcagagggagcgagaaggcgaggctggaagaagcaacggttcatgaatatct

SEQ ID NO: 307 - DNA, 2730 bp, Homo sapiens
ttgttgttgttttgagacagtctcactgcaacctctgcctcccgggttcaagcagttctctgcctcagcctcccaagtagctgggattacaggcacctgccaccatgactggctaatttttgtatttttagtagagtcagggcttcaccgtttgaactcctgacctcgtgatccaccctcctttgcctcccaaagtgctgggattacaggcatgagccactgcgcctggcccatagattaaattctttgtgaggccaagattgtagctttgatcttcatatggggtgtttagaggtattccattttgtggccacaaagtatatttgtaatcctagccggctatcatgaatattttattggtcacaggaagaaccagctaagaacatatgaatagatcagtgcaatactgtcatcatcctggaataacttgatgctgttatattaaaatcttgttaatggctgtcagttttgcaacctaaactagtaacacactgaattattgatttgcttatgtgttaatggcacataaagcaatgagcattaacacttgaagtttttcggtagtatcatttttgtgtatggagactgtatctgccattttttcacaataggaaggtttgttactgtatcttcacagatgattggttaagattgctttccaaagtcacatttattctcaccttcacatggtgttttaatgagcacttatgaaactaaatatgaaccataaagagtggattggactgattaaattgagagtaattatgcagtttaatcagttggtaatattgaatcatatgtatttttatgtttagagtacaggattgttttaaattgttctttttgacaagttgagattagtagtttattgtcaaatagtaaagagatagctaatgattgtgatatactgtaataagatctatcactttatatgatacattataagtttcaattatttcatttttgtcaggctaaatctcatttgctttctctccatgatatatacttgaggcagcagaaagagcaggtgggaagttaaagcaactcatttaactggcctttaggaaagaaaatgtttagattgactcaattttctagttatctattcatcttatttaaaattccaacctgctctactccttactcaggtctgttttgttttaatcacacttagtactttctaacatagtataaatagtgattacgtttgcctgtctcccttccccattcctacccttgctagaatgtaaggtccttaaaggcagagattctaatttaatcttttgtcttcactgtgtcccagaagcctagaatagttttcagcacatagtagatacccaataaggttaaattagtggtctcaaatgctaatacattttcaaccttcttatagaaagaacatactggtcgtcttgttataggagatcacaaatcaacatctcacttccgaaccggggaagaagacaagaaaattaatgaagaactggagtctcaatatcagcaaagtatggacagtaaattatcaggaagatatcggcgacattgtggacttggcttcagtgaggtagaagaccatgatggagaaggtgatgtggctggagatgatgatgatgacgatgatgattcacctgatcctgaaagtccagatgattctgaaagcgattcagagtcagagaaagaagaatctgctgaagaactccaagctgctgagcaccctgatgaagtggaggatcccaaaaacaaaaaagatgcaaaaagcaattataaaatgatgtttgttaaatccagtggttcataactcccaaacgcttagtctttgtattaaaagtaagccttattgttacaatgcacagtggaggactgcttatagagcacagacctttgtattataatttttaaaaaggcccttttaaataattacaaagagtgtttgctttcaaatgccatgggttacacttttatgggcatgactataaccatttttgtaaagagtaagagttgtataaaataagaaataaatacagtactcaacttcctttcatattagcatcatcaaccctctaattcaccttatgggggaaatgcttctttttgtttgtgatagctattttatcatttccttcatatttttctcttataaaaatgtatttgatactgtgatatgttcacgaaaagtattctttaattattctttgttatagtagagctgttcattatggatatttctgctgccagtcacaatctaaattaattttggcaaaagattgggtacttagtttcctgttactgagttagctctactcttttggaccaaagcaacatgagagcaagtacttttcacacttgttaagatggagttataactgtcatacatttggaatattatgatcccaagtagtctttttataatttggattgtatcgtatgttagatttttgataaaatttggccaatttttacagaagaaattctctgatcatttagttctatctatttagaaatatgtaaaactggatttttttttaagtaatatgtgaccaaagttaattttgtcccaaaggtctaaataaagagcagtttcccatatttggctgtgatacctttatcctcattatctacaaatgaggaacaggcttactgataagaagctgaaacaagaaattctcttcatttatcccagtgctattttattgattaattactaaaaagtattactttccaaaaaaaaaa

SEQ ID NO: 308 - DNA, 650 bp, Homo sapiens
gaaggatacagtggctagaagtcgtcctgtcgtcctgcctcacagtaacatcgttaccgaattctcagcaggtgaaccaaatgaaatggtcaactgaaagccaaccaggagggtgtctggctgttttggggaaactattcctgaccttattttgactaaaaagttgcctgctgtaccagcaaaaaatcaccatgtaccaacctatccaaacttatccatggatgaatctatccagaagacgggagttccgatgcttgtcttgctctgaatgtctgcttgtcacctgcttagggttatcgactgtgattctgggactcattgttgttctacaggacccctctgactctgtggttttctctactggattaacaatgatagccataggtgctttttttgttgtcctcactggagtgacagccctgtgtacggttacagtcgacgagaacttgcagaaaaccacgaggctaagactaggagtgatacgaaaaagcggaagtctccaaggaactacagagccttccatgactcactcaataatcgctagcacctcgctgtagttgtacattgaaccctggcatcttcgtctttggaactaagtctcctgagcattgtttttaaatagaaataaaatctggcttttaaaaaaaaaa

SEQ ID NO: 309 - DNA, 1241 bp, Homo sapiens
cttgtgtctggggcctctgtattgcgtgtgttgcgccctgttttcccgccccctttttttgtcgtttcttgttgttctgtttcccgtcgtctttttctttgtgtcttccttgttcctctctttcttgtttttttttttttggcgcagcgactcggaggttcgcctccagcttgcgcatcatctgcggccgggtcccgatgagcctcctgttgcctccgctggcgctgctgctgcttctcgcggcgcttgtggccccagccacagccgccactgcctaccggccggactggaaccgtctgagcggcctaacccgcgcccgggtagagacctgagtctccccacctgtatacacagttcccccttctgcccacaagggtccagcatttccttcagaccttgggaactgctgatccggggataactcacagcccgacccaactcagggataaggaagtatggctttggggatgtgactggaataaacgtgaaggactcctgacctatcccattttatccccctccagacctgcgggggatgacagctgaaccgcctaaaggaggtgaaggctttcgtcacgcaggacattccattctagtatccttctgttctgggggaggggaaatgggatgggcacctgggagaatctccacgtaacttcagaaaggggtggcagatggttttcaactgacaagttgaattgattggtagtggctcccagaggattctgaggtggtctccatgttgggtgggcaagagagattgactagtgatgactgccacagaatggagaggagggccctttacttctttgaaccctaattttctcacgtataagcggagaccctggcccctcccgggcacagagtaagctctgagcaaaggaggcaatgctgttcccatcagtaaggctgcggaaaccaccacctccctctgcccaccaccccgctccttaacaccacctccagtcacaacctggtgatgaaacacctccctggggccgaccctgagctcgtgctgctgggccgccgctacgaggaactagagcgcatcccactcagtgaaatgacccgcgaagagatcaatgcgctagtgcaggagctcggcttctaccgcaaggcggcgcccgacgcgcaggtgccccccgagtacgtgtgggcgcccgcgaagcccccagaggaaacttcggaccacgctgacctgtaggtccgggggcgcggcggagctgctcagaacaacgaca

SEQ ID NO: 310 - DNA, 2471 bp, Homo sapiens
ctcagcttctttgcgtaaccaatactggaaggcatttaaaggacctctgccgcctcagaccttgcagttaactccgccctgacccacccttcccgatgcagtccctgatgcaggctcccctcctgatcgccctgggcttgcttctcgcgacccctgcgcaagcccacctgaaaaagccatcccagctcagtagcttttcctgggataactgtgatgaagggaaggaccctgcggtgatcagaagcctgactctggagcctgaccccatcgtcgttcctggaaatgtgaccctcagtgtcgtgggcagcaccagtgtccccctgagttctcctctgaaggtggatttagttttggagaaggaggtggctggcctctggatcaagatcccatgcacagactacattggcagctgtacctttgaacacttctgtgatgtgcttgacatgttaattcctactggggagccctgcccagagcccctgcgtacctatgggcttccttgccactgtcccttcaaagaaggaacctactcactgcccaagagcgaattcgttgtgcctgacctggagctgcccagttggctcaccaccgggaactaccgcatagagagcgtcctgagcagcagtgggaagcgtctgggctgcatcaagatcgctgcctctctaaagggcatatagcatggcatctgccacagcagaatggagcggtgtgaggaaggtcccttttcctctgttttgtgtttgccaaggccaaactcccactctctgcccccctttaatcccctttctacagtgagtccactaccctcactgaaaatcattttgtaccacttacattttaggctggggcaagcagccctgacctaagggagaatgagttggacagttcttgatagcccagggcatctgctgggctgaccacgttactcatccccgttaacattctctctaaagagcctcgttcatttccaaagcagttaaggaatgggaaccagagtgttttaggacctgaagaatctttatgactctctctctttcactctttttttttttgtcactaagttaaaagcgaagtgagagtattaacgtttttgttctcctccggccccctgttacaatgaaggggcaaaagtatttgctcttagtctattcctcccttaacttctgtgactaatttttatttcctttctagatttgcccaattaatactagggtgcagtgtatcctggagaggtagggtgtgtgggggaggaatcccttgggggagatattaggagtgctctgttgtttacaaactcaggtacccgcagggcctagcaagagacttaaatgactgataagaaccgtgagaaacatgttgcttccaggcttgatttcgatttttcgctttttttttttgggacggagtctcgctttgtcaccaggctggagtgcagtggtgcaatctcacctcactgcaacctccgcctcctgggttcaagcaattctcctgcctcagcctcccaagtagcttggactacaggccctgccaccacgcccggctaatttgtgtatttttagtagagatggggtttcaccatgttggccaggatggtctcgatctcttgacctcgtgatccgtccaccttggccttgcaaagcgctggattacaggcatgagccactacacccagccgatttttcctttttgattaaagatgctattacaatgtaaatatttcttacacagaaagtcacagcacatgtgcccattgatacaaggctgctgaggcctggtctccagttggaaatataattaagggtggcaaggactggagtcagttggagagtgcatagccagtctgtgaagacaactgccagatactggcaatactccagcctggtgacagagtgagactctgtctcaaaaaaaaagtttcaatgtttactcctagagaagccaaaaatccagatttgtatatgaaatcttaccattttaaaagattggcagctaattatttttttaaaaagctgtgcagtgtgatgtgtcccaaacggactggctcatgggtggccacgtcacaacctctgatctcagaccgtgcatgccttgtcctcttaagacaactcctgtggcaccgtttctccctccacagggccaaagccatagtgtccggtcccaaggacaaggctcttccagtgctaggagaggtatgagcagcctctcacctgtgagctgtggggatcacaaggctgcctgcctcagtcttggagtcctgttgggtgaatgaggcagatgggaaagagcctcaccagcagctgcttttggagcaggggtccaaggaagagagggtggcctcgacatcaaactgcctggatttttctaccaccctgttacatcataacaacttctgaaacacacaccagccctgagttctgggctcatttgaagcctggaatagcaataaatctttttaacttgcaaaaaaaaaa

SEQ ID NO: 311 - DNA, 6406 bp, Homo sapiens
ttttttttttttgcacttaaccactaaatctttattgaatttttattgtaacagcaatgcaatattagcaaatagagagaaatatagagtgaagagaatacagcaataaagttagaaggaggggtaggggcaatggggttcagtggtaggaggagggctactgacaggggtaaaagcaagggtttttatttatcacttttataacttccatgaaaatttaccatccatcattgacaagttcattctagcagtaatttatcagaggtcactcatcctctattaaattattaatctaatcacctttgaactttctcccactggggtttttatccatgtccaattcgctctaaataagttggtctccctgcagttccctccgagtttatttgaaatctttaaggatagcaattatagggtaaagggttacaagtaagtacgcatgtccacttatagcgatatctaatacataatattattctaacattctaaataaccccacccacttaaaattacttaatagtccctcccaccctaaaatgcttatgattatatatcccctattacttaaacttgattacacaaagaaataaaagcaatgcaattttccacagaccaattcaataccattctacaatctaaaacaacaaagaactttcagtctcatcagatgtgcattctctctttagatgaaaatgtagcatggttcccgcagggctctccatttctgcccaggtctttccagcaggttgttctctgttgtcaatcttggaactgtctgtatctgatgtgagatgtctgtggtggatgacaactggatcaattcagaagtccaagaggtacctacaaacttaaacagaattccagactgcaccatatagatgtggccctcttattttgtgcacctgcaagttcactgtattacttcacgatttgatcagactaattctccttttttccactaagacaaatacctcactgtccaaactaaattgacccttcataaatgtatgtaaactttctgtgtttcaatatcctagcatgataaatttagctagttctctctaggcttgcctatcaatgggagctcttagatcttcttccttcttgatttaattaacaatgtaaatttgggctaaaagtcaattaattaattttgccagtttgaaaaactcgactactgatttgcttactaattcatctatctcctttatgttttttattttgctccctttctaacttctttagatatcaaattccattgatttttttcctttcttatgaataaagccatttttgttggaaaatgccaaaaaaaatttaaaggatccaattaacataaatttgattaacaacaaaataaatcaattgagtgaaaggaaacttaaccaaacttcaaaactatagaataataaatttagaattacttatccttaacatctacatttatagatagcatatatagcaatagagcatagtacacactgccaaaaagttaatcacaagctttagtaaacagccaaatgtggatcagggactttctgagttgttaacccacagcagcatattttccctaatcgttcttgtcgttggtgaacttctccagacttttgcttgcagtggtggcaaatgtccgtgtgcacatgccagggctacagacaacggcccatttctaggcaccctgcagcttgaagatcaattgacaactgtaaatttgacaaaaaacaacttgaattcaaatgtatggaggatgaattgatacttgaggtaaacagaagtgactcttcaaaatagttcagaagcacaaatgcaccattttaaaagtaattactctaaaacacatgagtgattgacaagctttctgattccattgaaggaaaaaaaaaagttgttttggattaaatagccaattaggtttctcttttcaaattttatatccttttatatgatttttaaaggcccaattgatagaattgaaattatatatgatgttaaaattgaagatgaacaggatgaattattatacaaatgctccagttctgaggagcctctcattcacagcattgtaagaagttcacagtaaaggaatattttacactatgttacttatcatttttacttagtttaacaataagaactggatagtgctttgtaattcaatggaagtttttgaaagcctagtcaccacttcaaaacacactaaaaattatactaaaaattttaagtgtttaaacatgcaagaataagagcggatgataatgaacatgtgaaagatgatgctgatgaaaagtgaaacttcaccgttagactcctcttcatgtcaggcaatttgagatatacaccatgttgttttctactgctcaaactgtgctttggcaattaaagcctgcctcttacatctctgtgtgtggcagcaaaatggagtctcagcaaccaggcaggaaaatgacacaaatcctgcagcagggtcaatggcagtagcaaagaattaaacagaaaaagagaggttagataaaacagttcaaggtagtagcaagggaccaggctaaaggaagtcaggcagtcccaggttagcacaaagcttccaggggacatcagaggtgtcactgggctgaagacaactcttgtgttgtccgttgctttgagtcctttgagttgctttctgaggcttttcatccattggcagcttcacatcagctccatcctctagagggacctttttcattacgtggattctgatccttttgaagtggttaccatcaagtaatgtggagctcactaaggaagtccacatcctcaagacagtgtccacagccctaattcctcttcttcaaagatgtcccccttccaggcataggagtgtgaatctgggtgctaaatcatttctcctctctccacacatcctaatgctacagtctaatgaggggactgaagatgaaatgcccagatgcatatggaggcagacacatggatagattcttccaaaacgtcagctggtgcttttccagccaattaagaacactcatgaaaattctttctgaagtaccaggacaaatctcttaagagttgggtatgggattttggagtccttttgatgtgctactctttagccctcaaaggtgattgagaggtggtcacatttcatgaacatctaacaacgctggagccaccagtaatctctggttaccaggtttaatgctttgtggaagccatcatggcatgatgatggtaaggtgttgtgtcaaagccggagtcattgggtacatgtgatttgcaccatgatgtgaagacatagtcttaacatgcaagagtccatctgagagagcactttcttttcaggcctgagatgtttcatgtcacaagggtttttcctgctcctgggagaaccagtcgagttgctgctccttgagaattaacagaaccatggaaatggagtttgaagacggtgaagtttctaagggtgcagcgagaggatcacggaagcctttccacactgcaccgataattttggcttccttaataaggcctcagtcctccagtgatttaaaaagagggtaccgaaaccgcaagaaaagtcatgtcctcctcctcctcgtctccccctccataaagaaatcagcatttcctgcgtttgtatcagcttctctgtaaatgttaaacagcaaatttggcagcctataatttagatggtgatggaggttttggcaggtaaaacccagacttccaggactggctggaaagtaaacttattaattattttagttagattggcagtcaaggtggaaaaatgagagatcatttattggcaaatactctgttgctctcagaaaatgttgaaggtcttttggtgctttaggatgtgtgccagtccagagtggccctaaccttccatagccgtttcagagaggatgtgcctcaggtggcctgaagatacagtagcctaaaatttagcacacagtcactgattgagaagctgaacaggaataaattttgagggcagagatcctgaaggacatgacaggtatttacagggtactgtaagatggaggcggcggcggtggtggtggtggaggcggcggctgtggcggcgggtactgtggtaccggaggctggcggtaccagtgtggattccaagtgatcatcacaggtacatatagtgatcttccttgtccgtctcgtcccactgggtaccaggcgaatcctactgggtaggtcgggtacgcggcatatgtggggtatgtttggtatccaggtatttgaggtacgaattcagtgtacgttgccaggtgtgcttggtcttctaaatttggaatagataggcgaggatactgattctggatagtaaaattgtttggagctcggcaatcataagaaacttgcagtttccaccccctcttcacctggagaacttgggctccattaggtgcaatcgttggagtaattagcccatcttttacatttcttgccacaaaatctcgaagagctgccatttcaggttcggacagtgaatacacatgtccactgggaatactgtgtgctccaggtatcatttctatgtgagggtcaaccaggcggtgatctgggtagacgtgctcatctactggagtgtacacattctggacatagtaatacctcactggttggtaaactctgtatccatctactggataatagagtggcggttgtggtgctggtggtgggagcgatggtggtattggagaatacatccggcagtggtagcggcagtattcagaatcaaagacgatagatcgagtgctccatgtgatattgggatcatgtgtgctcagccagcgaacccctaggacgacagggaagaatggagactgagtcacatcaaatgacagcacctctcggtgatctcccaggtcaactatcaggtcgtgagtttcgtggacaactgggcccgatgctatggggcgcccatcaattgcttccacaagtattggccagtccttgattcttagaggaattccattttgagcaacatattcgtgatcaatgaagttgccagaagcaccagaatcgatcatggctcggacgaacagggtgtgtctgcccggaagatgaatctggagcatcacttgcaagtgtggagatgaggcatcatcttgtggggaccttattatttctggcccggtcgctgaaggtccctctacagcggggccggggagtttcccgccggcgaagactttgaggccttggcaggacaattgtcagcgtagtgacctcctgttccacagtagaggcacaggttcagctttctgcgtctttctttttcttcctgcgtcaggcgcatgcgggcacctcccaccggctcggttggatctacctggtggtggcttgcaatgtgaggcaacaccagcgcccggggtggcgagcgtggcttgcgagctgcagcagccctggccagccttctctcaatgtgaatgcactgcccaatcagagcagacagcgacttggcgacctcgaggtgggagagctcctcctgaatgtggtcgctgaggccctcgtggtactggtcaatcagcgcaggctcgttccaatccaggtcctgggcaatcatctggaaagcattggagtagtcgatgacagaccccatgccttggcgcaggcgtctgatcttgcgtttggcaacctctcgcctctgagggtcttcaaagacatgcttcatttccatcatgaaagctgggtagttgtgcatcaggtagtgggagcgctccagctttgctgaggcccaacgggcagcacggccggtcatcatgcttgtcacgaagcagacacggacacgatcaactgagaaatccctggtgctcttttccatgaagatctggcactgggccatgaaaggagccagcatgtctgggttgccatcgaacttctctgggaggtcttctgggcactcttcctctattggagggggtggggcagcagctgctgcagcaccgcggagctcgatgtcatcatcctcatcctcaggggtgggttccacttgctctcgaagggtggtgttctcctctgtgagcttctgcacctggctctgcaggttgttgttctcctccgactgcttcatgaccttctctcttaagttgttgatctcttcagagagctcgtcccttcttcgttcggtcatgttggggacacacgcactcttatggccggtgtgcttggagttgttgttgttgttgttgttggggggagggggaggaggaggaggtgggcagtcgggacccagggtgacggttggggtgggaggagacctcccagctgtagcttcacttctgtggggatggaggcctggatcctggccccctcttccactccttcttttttttgttttcaaaacccgcttatttcacgcgaggactcctctgcgaagacaggaaggatg

SEQ ID NO: 312 - DNA, 2911 bp, Homo sapiens
ttttttttttttctgtatgcatgtgtttaattttaagtgtcaacactgaaaaattttaacagataaaaacacattacacaacgtctacaaccttcacaacagtgagaacctcctgcccggccaggcagggcaggcctctgtaccgtgagcctcaggcagtggccccaaggggcctcgccatggggcctctgacatcagtcttagcttaagagggaagctgagccccagcgcctagtctcttcagttctgcagcaaagacatgagaggaaaagtccaggatgggacaagcgcccttagtctgtcccgagtactggccacaggtgccagggcaacatgctgcattgcagccctgggccagcccctgtccccaccctgggtcacaaggtggagcagagaggcagccagcagcaggaccagtggctccgactccaccccactgggtgtcctggactttggtgccagactatagctgccactccctcctggtggcacacgggatcagggagggagggtggagggagtagagtggtggacgaagggaggatggatggtcttcgtgtacaaagctgctgtggccacaggagctgctgggccgtccagaaccatgcgccttcatatgccggactctgatgccctgagggcccgggtctgattgtggccagtgccagacgtggtggaggtgaattctgagtacttgctccccccagcaactaggcaggcccacttccggtattcttcccgaaccttcttgttgagcaggcagtgcagcaggtagaggaaggcgccctgcaggcagttgaggatggtaaacacataggtcagcaccaagctccgatcgtcgaagatgaacaggccaaagacccaggtgcagcccaacaggaagagctgcgcgatggccgtgatggtcagcgccctcgccttctttaatttcttcatgtctggattgatttcagaaaacttctgagtgagcttccagacggtagtcacgaaaatgacagcattgcacaaaatgatgaaggtcacaggtcccaagaagctccagaggaagccctgctcaaagtccaaccagcagtatctggggcggccgtagcccttgctgtagatggcagccgagacgcccacgatgagcaggggcacgccatagccgatcaggcagagccagcgcgtactcaggccctggccttggaacacgcgcaccacaagaaagtagagctccaggccttcgaggctcatccagcagaaggcggccaggaaacagtagtgcagcagcccggccaccaggcggcagcgcagccccacctggccgccttcgttctcgatgccggccaggaagatggtggagcccacgaagaggcagatgcagaggtgcaggtgtatggtggtgcgcgagccctggatgggccgcaccagcaggaaagtgaggatgcacagcagcaggcagaagagtgacagcgccagtcccaccctggtgatcagggtcagcttccagtcctccacgtcataatgagccataaggatcgcaaagctgctcaggtggctgcattggcaggtggtgctgccgttcttgctgcccagcacctggcagccctcggtggcccagtgccctcccctgtcgctgtcactcttccagaaggcacagagcagctcctgccgtggcccaggcatcacgtccttggcaggagggtctcttcccgcctccccatcggaggactcaaggtgggagaaggcgaaaaggatgggggagttgagttccttggtgttgttgtggctcagaaagatggagttgacggcagagaggcgtctgagttggacaccacggatgctgctttcatatatctcctccagttcggcttgcttcttggaatgcaggttcaaggaggcattggccagcaatgtcgtcatgttctggatggagaggatgcccgccacggcggggcctggatcctcggctccagctgccacagcccaattcagcttcatgcgtgcgctgctctgacccatagtgacgttcttgtccccccgctcctggatcatcagggtcagctctgtgttcgaaggggaaatgtaggtgaaggggcctttaggcaggctcttggccaggatcctcatgatatcttcaaggtttgagagcagctgggtggctatgaggtgccggacaggtggcgccagggcctctacgtctccaggagcttccatcagttcatccaccaatttgatgacattctggatggtgacctcggctgagcttgtcttggagtctctgcccaggtcctggactttgtcgaagaatcgggaaagcgtctggctgtggactccagggggcggggtccaggtggagaaagtcatatcttcacagacagtgtccttttggttattcgggattccgtgtctgggcttccagcctgggcggcagcggcagctgtatgaacccacggtgttgaagcagacggtggagctgtcacactgatgctgcccggagctgcactcgtccacatcttgacaggtgttctcgctctcattcttgaatgtttttgccccagaaacaggctcatatcccgggctgcacacgcagtcgtagctcccctctgtgttccagcagtccgagaattttccgcatgacactttcgacggtgttgcacactcgttgatgtcgtcacaagtctccgtcggggtggtgatgatctcagaaaaagagctgaaccctggattgcagcgacaggcggtggcattgacacacgaggagttctgagggcaccaccgggcacagcccctggagtcctgggtttcagctcccggcagagtcagccagacacagaatgcgagaaagacgcggcctcccatggttggagctgccggcaggagcggcaggggaaagagtgagtgggacagggctgtcccgtctccacaggct

SEQ ID NO: 313 - DNA, 2861 bp, Homo sapiens
tagtcgcgggtccccgagtgagcacgccagggagcaggagaccaaacgacgggggtcggagtcagagtcgcagtgggagtccccggaccggagcacgagcctgagcgggagagcgccgctcgcacgcccgtcgccacccgcgtacccggcgcagccagagccaccagcgcagcgctgccatggagcccagcagcaagaagctgacgggtcgcctcatgctggctgtgggaggagcagtgcttggctccctgcagtttggctacaacactggagtcatcaatgccccccagaaggtgatcgaggagttctacaaccagacatgggtccaccgctatggggagagcatcctgcccaccacgctcaccacgctctggtccctctcagtggccatcttttctgttgggggcatgattggctccttctctgtgggccttttcgttaaccgctttggccggcggaattcaatgctgatgatgaacctgctggccttcgtgtccgccgtgctcatgggcttctcgaaactgggcaagtcctttgagatgctgatcctgggccgcttcatcatcggtgtgtactgcggcctgaccacaggcttcgtgcccatgtatgtgggtgaagtgtcacccacagcctttcgtggggccctgggcaccctgcaccagctgggcatcgtcgtcggcatcctcatcgcccaggtgttcggcctggactccatcatgggcaacaaggacctgtggcccctgctgctgagcatcatcttcatcccggccctgctgcagtgcatcgtgctgcccttctgccccgagagtccccgcttcctgctcatcaaccgcaacgaggagaaccgggccaagagtgtgctaaagaagctgcgcgggacagctgacgtgacccatgacctgcaggagatgaaggaagagagtcggcagatgatgcgggagaagaaggtcaccatcctggagctgttccgctcccccgcctaccgccagcccatcctcatcgctgtggtgctgcagctgtcccagcagctgtctggcatcaacgctgtcttctattactccacgagcatcttcgagaaggcgggggtgcagcagcctgtgtatgccaccattggctccggtatcgtcaacacggccttcactgtcgtgtcgctgtttgtggtggagcgagcaggccggcggaccctgcacctcataggcctcgctggcatggcgggttgtgccatactcatgaccatcgcgctagcactgctggagcagctaccctggatgtcctatctgagcatcgtggccatctttggctttgtggccttctttgaagtgggtcctggccccatcccatggttcatcgtggctgaactcttcagccagggtccacgtccagctgccattgccgttgcaggcttctccaactggacctcaaatttcattgtgggcatgtgcttccagtatgtggagcaactgtgtggtccctacgtcttcatcatcttcactgtgctcctggttctgttcttcatcttcacctacttcaaagttcctgagactaaaggccggaccttcgatgagatcgcttccggcttccggcagcggggggaggccagccaaagtgacaagacacccgagggagctgttccatccccctgggggctgattcccaagtgtgagtcgccccagatcaccagcccggcctgctcccagcagccctaaggatctctcaggagcacaggcagctggatgagacttccaaacctgacagatgtcagccgagccgggcctggggctcctttctccagccagcaatgatgtccagaagaatattcaggacttaacggctccaggattttaacaaaagcaagactgttgctcaaatctattcagacaagcaacaggttttataatttttttattactgattttgttatttttatatcagcctgagtctcctgtgcccacatcccaggcttcaccctgaatggttccatgcctgagggtggagactaagccctgtcgagacacttgccttcttcacccagctaatctgtagggctggacctatgtcctaaggacacactaatcgaactatgaactacaaagcttctatcccaggaggtggctatggccacccgttctgctggcctggatctccccactctaggggtcaggctccattaggatttgccccttcccatctcttcctacccaaccactcaaattaatctttctttacctgagaccagttgggagcactggagtgcagggaggagaggggaagggccagtctgggctgccgggttctagtctcctttgcactgagggccacactattaccatgagaagagggcctgtgggagcctgcaaactcactgctcaagaagacatggagactcctgccctgttgtgtatagatgcaagatatttatatatatttttggttgtcaatattaaatacagacactaagttatagtatatctggacaagccaacttgtaaatacaccacctcactcctgttacttacctaaacagatataaatggctggtttttagaaacatggttttgaaatgcttgtggattgagggtaggaggtttggatgggagtgagacagaagtaagtggggttgcaaccactgcaacggcttagacttcgactcaggatccagtcccttacacgtacctctcatcagtgtcctcttgctcaaaaatctgtttgatccctgttacccagagaatatatacattctttatcttgacattcaaggcatttctatcacatatttgatagttggtgttcaaaaaaacactagttttgtgccagccgtgatgctcaggcttgaaatcgcattattttgaatgtgaagggaa

SEQ ID NO: 314 - DNA, 1528 bp, Homo sapiens
gcttctcctttttgtgttccggccgatcccacctctcctcgaccctggacgtctaccttccggaggcccacatcttgcccactccgcgcgcggggctagcgcgggtttcagcgacgggagccctcaagggacatggcaactacagcggcgccggcgggcggcgcccgaaatggagctggcccggaatggggagggttcgaagaaaacatccagggcggaggctcagctgtgattgacatggagaacatggatgatacctcaggctctagcttcgaggatatgggtgagctgcatcagcgcctgcgcgaggaagaagtagacgctgatgcagctgatgcagctgctgctgaagaggaggatggagagttcctgggcatgaagggctttaagggacagctgagccggcaggtggcagatcagatgtggcaggctgggaaaagacaagcctccagggccttcagcttgtacgccaacatcgacatcctcagaccctactttgatgtggagcctgctcaggtgcgaagcaggctcctggagtccatgatccctatcaagatggtcaacttcccccagaaaattgcaggtgaactctatggacctctcatgctggtcttcactctggttgctatcctactccatgggatgaagacgtctgacactattatccgggagggcaccctgatgggcacagccattggcacctgcttcggctactggctgggagtctcatccttcatttacttccttgcctacctgtgcaacgcccagatcaccatgctgcagatgttggcactgctgggctatggcctctttgggcattgcattgtcctgttcatcacctataatatccacctccacgccctcttctacctcttctggctgttggtgggtggactgtccacactgcgcatggtagcagtgttggtgtctcggaccgtgggccccacacagcggctgctcctctgtggcaccctggctgccctacacatgctcttcctgctctatctgcattttgcctaccacaaagtggtagaggggatcctggacacactggagggccccaacatcccgcccatccagagggtccccagagacatccctgccatgctccctgctgctcggcttcccaccaccgtcctcaacgccacagccaaagctgttgcggtgaccctgcagtcacactgaccccacctgaaattcttggccagtcctctttcccgcagctgcagagaggaggaagactattaaaggacagtcctgatgacatgtttcgtagatggggtttgcagctgccactgagctgtagctgcgtaagtacctccttgatgcctgtcggcacttctgaaaggcacaaggccaagaactcctggccaggactgcaaggctctgcagccaatgcagaaaatgggtcagctcctttgagaacccctccccacctaccccttccttcctctttatctctcccacattgtcttgctaaatatagacttggtaattaaaatgttgattgaagtctggaaaaaaaaaa

SEQ ID NO: 315 - DNA, 2396 bp, Homo sapiens
agcgggccgaggagccgggcgcaatggagcggaagaggtgggagtgcccggcgctcccgcagggctgggagagggaagaagtgcccagaaggtcggggctgtcggccggccacagggatgtcttttactatagcccgagcgggaagaagttccgcagcaagccgcagctggcgcgctacctgggcggctccatggacctgagcaccttcgacttccgcacgggcaagatgctgatgagcaagatgaacaagagccgccagcgcgtgcgctacgactcctccaaccaggtcaagggcaagcccgacctgaacacggcgctgcccgtgcgccagacggcgtccatcttcaagcagccggtgaccaagattaccaaccaccccagcaacaaggtcaagagcgacccgcagaaggcggtggaccagccgcgccagctcttctgggagaagaagctgagcggcctgaacgccttcgacattgctgaggagctggtcaagaccatggacctccccaagggcctgcagggggtgggacctggctgcacggatgagacgctgctgtcggccatcgccagcgccctgcacactagcaccatgcccatcacgggacagctctcggccgccgtggagaagaaccccggcgtatggctcaacaccacgcagcccctgtgcaaagccttcatggtgaccgacgaggacatcaggaagcaggaagagctggtgcagcaggtgcggaagcggctggaggaggcgctgatggccgacatgctggcgcacgtggaggagctggcccgtgacggggaggcgccgctggacaaggcctgcgctgaggacgacgacgaggaagacgaggaggaggaggaggaggagcccgacccggacccggagatggagcacgtctagggcagaggccctgccgagagcccgtgctgcctgctggagccgcctgcagacgcggtcctcggccccacgtgaaccaggctcggcggcgaagcccagccttggagacacccaggaggaaggccgtgctcctggctccctcctcggcccgtccccacttcccggggcctcggggcacacagctggggctgcccccacccgaaagaccctccacgctcgtcctctacagagtccggcttcgggaagtgccgggtgctcctgggccctggcctggctccctacgacctttgggctcgaggccagctcctccccatgcccgctgtcccagctccttgcagactggagagcagccagcaggtgcccggcagctcggcgccacggcttgctgacagctgggagggtttctcggtctggaggcgtagttttgaaactcacatcacccactgtgcagcgtgaggacgggactctggtctgctgtggggggcatgcaggacggcgccactctctgccctgccatgcggctggtggtgccacagagcctcaccgtgcctgagtggcgtgcccaggaggccgctctccttcagtaaatgtaacacagtcgaggcacgtcatcgggcagccttccctgtgtgccaacgccagccttcgcttctgaaaaccaaactccagccgctgccagtcgggacttggtcgcccggcgctgccagaatgctccactgccagccggcccccctgcctcggtttcccttctgtttagtggcgacacaggcacccagctttggggtggtgctgacgctcccaggggtgccaggagccactgggacagggtgaggctcccagacgctcctcgaggtgcccagctctccagggagcttctggcccaaggccgtctgagggatctgctccttaaccccccagtgccttggcgagggcaggttccaagccacagacgcctgccccgagtggactctgcggccagtccctggtgccctcctggccctgctgcccagtgagggctcctacgggtgggttcattggcctgggcccagcaagcccccacctgcattgaccttaggcccatagagagggcctgtcccggtgctgccccagccaggatctggtcgctgccccagggggactgatgggcagagtcgcccctgtggctggactgtgaccatccctgatggggcctgaccgcgggagctgaggaagcgccgctccaccgtctgccctccaaggacccgcatggaggcagtgggctggcagcttcctgctgctccctgtcagagtcaaagcacaaatcctcaggacgggctcaagggccagggcagccgagggaagctccaggtggggaccacgtcttcctgaggttggtgcccactggctgggaccctttgcagtggggtggcctcccctctgtctgcctggtggagggagccgtgggcgtggggacgtgactgaataaagccaccatgggtggatgtgcttggaaaaaaaaaa

SEQ ID NO: 316 - DNA, 4549 bp, Homo sapiens
gcggcgcgcacactgctcgctgggccgcggctcccgggtgtcccaggcccggccggtgcgcagagcatggcgggtgcgggcccgaagcggcgcgcgctagcggcgccggcggccgaggagaaggaagaggcgcgggagaagatgctggccgccaagagcgcggacggctcggcgccggcaggcgagggcgagggcgtgaccctgcagcggaacatcacgctgctcaacggcgtggccatcatcgtggggaccattatcggctcgggcatcttcgtgacgcccacgggcgtgctcaaggaggcaggctcgccggggctggcgctggtggtgtgggccgcgtgcggcgtcttctccatcgtgggcgcgctctgctacgcggagctcggcaccaccatctccaaatcgggcggcgactacgcctacatgctggaggtctacggctcgctgcccgccttcctcaagctctggatcgagctgctcatcatccggccttcatcgcagtacatcgtggccctggtcttcgccacctacctgctcaagccgctcttccccacctgcccggtgcccgaggaggcagccaagctcgtggcctgcctctgcgtgctgctgctcacggccgtgaactgctacagcgtgaaggccgccacccgggtccaggatgcctttgccgccgccaagctcctggccctggccctgatcatcctgctgggcttcgtccagatcgggaagggtgatgtgtccaatctagatcccaacttctcatttgaaggcaccaaactggatgtggggaacattgtgctggcattatacagcggcctctttgcctatggaggatggaattacttgaatttcgtcacagaggaaatgatcaacccctacagaaacctgcccctggccatcatcatctccctgcccatcgtgacgctggtgtacgtgctgaccaacctggcctacttcaccaccctgtccaccgagcagatgctgtcgtccgaggccgtggccgtggacttcgggaactatcacctgggcgtcatgtcctggatcatccccgtcttcgtgggcctgtcctgcttcggctccgtcaatgggtccctgttcacatcctccaggctcttcttcgtggggtcccgggaaggccacctgccctccatcctctccatgatccacccacagctcctcacccccgtgccgtccctcgtgttcacgtgtgtgatgacgctgctctacgccttctccaaggacatcttctccgtcatcaacttcttcagcttcttcaactggctctgcgtggccctggccatcatcggcatgatctggctgcgccacagaaagcctgagcttgagcggcccatcaaggtgaacctggccctgcctgtgttcttcatcctggcctgcctcttcctgatcgccgtctccttctggaagacacccgtggagtgtggcatcggcttcaccatcatcctcagcgggctgcccgtctacttcttcggggtctggtggaaaaacaagcccaagtggctcctccagggcatcttctccacgaccgtcctgtgtcagaagctcatgcaggtggtcccccaggagacatagccaggaggccgagtggctgccggaggagcatgcgcagaggccagttaaagtagatcacctcctcgaacccactccggttccccgcaacccacagctcagctgcccatcccagtccctcgccgtccctcccaggtcgggcagtggaggctgctgtgaaaactctggtacgaatctcatccctcaactgagggccagggacccaggtgtgcctgtgctcctgcccaggagcagcttttggtctccttgggccctttttcccttccctcctttgtttacttatatatatattttttttaaacttaaattttgggtcaacttgacaccactaagatgattttttaaggagctgggggaaggcaggagccttcctttctcctgccccaagggcccagaccctgggcaaacagagctactgagacttggaacctcattgctacgacagacttgcactgaagccggacagctgcccagacacatgggcttgtgacattcgtgaaaaccaaccctgtgggcttatgtctctgccttagggtttgcagagtggaaactcagccgtagggtggcactgggagggggtgggggatctgggcaaggtgggtgattcctcccaggaggtgcttgaggccccgatggactcctgaccataatcctagccccgagacaccatcctgagccagggaacagccccagggttggggggtgccggcatctcccctagctcaccaggcctggcctctgggcagtgtggcctcttggctatttctgtgtccagttttggaggctgagttctggttcatgcagacaaagccctgtccttcagtcttctagaaacagagacaagaaaggcagacacaccgcggccaggcacccatgtgggcgcccaccctgggctccacacagcagtgtcccctgccccagaggtcgcagctaccctcagcctccaatgcattggcctctgtaccgcccggcagccccttctggccggtgctgggttcccactcccggcctaggcacctccccgctctccctgtcacgctcatgtcctgtcctggtcctgatgcccgttgtctaggagacagagccaagcactgctcacgtctctgccgcctgcgtttggaggcccctgggctctcacccagtccccacccgcctgcagagagggaactagggcaccccttgtttctgttgttcccgtgaatttttttcgctatgggaggcagccgaggcctggccaatgcggcccactttcctgagctgtcgctgcctccatggcagcagccaaggacccccagaacaagaagacccccccgcaggatccctcctgagctcggggggctctgccttctcaggccccgggcttcccttctccccagccagaggtggagccaagtggtccagcgtcactccagtgctcagctgtggctggaggagctggcctgtggcacagccctgagtgtcccaagccgggagccaacgaagccggacacggcttcactgaccagcggctgctcaagccgcaagctctcagcaagtgcccagtggagcctgccgcccccacctgggcaccgggaccccctcaccatccagtgggcccggagaaacctgatgaacagtttggggactcaggaccagatgtccgtctctcttgcttgaggaatgaagacctttattcacccctgccccgttgcttcccgctgcacatggacagacttcacagcgtctgctcataggacctgcatccttcctggggacgaattccactcgtccaagggacagcccacggtctggaggccgaggaccaccagcaggcaggtggactgactgtgttgggcaagacctcttccctctgggcctgttctcttggctgcaaataaggacagcagctggtgccccacctgcctggtgcattgctgtgtgaatccaggaggcagtggacatcgtaggcagccacggccccgggtccaggagaagtgctccctggaggcacgcaccactgcttcccactggggccggcggggcccacgcacgacgtcagcctcttaccttcccgcctcggctaggggtcctcgggatgccgttctgttccaacctcctgctctgggacgtggacatgcctcaaggatacagggagccggcggcctctcgacggcacgcacttgcctgttggctgctgcggctgtgggcgagcatgggggctgccagcgtctgttgtggaaagtagctgctagtgaaatggctggggccgctggggtccgtcttcacactgcgcaggtctcttctgggcgtctgagctggggtgggagctcctccgcagaaggttggtggggggtccagtctgtgatccttggtgctgtgtgccccactccagcctggggaccccacttcagaaggtaggggccgtgtcccgcggtgctgactgaggcctgcttccccctccccctcctgctgtgctggaattccacagggaccagggccaccgcaggggactgtctcagaagacttgatttttccgtccctttttctccacactccactgacaaacgtccccagcggtttccacttgtgggcttcaggtgttttcaagcacaacccaccacaacaagcaagtgcattttcagtcgttgtgcttttttgttttgtgctaacgtcttactaatttaaagatgctgtcggcaccatgtttatttatttccagtggtcatgctcagccttgctgctctgcgtggcgcaggtgccatgcctgctccctgtctgtgtcccagccacgcagggccatccactgtgacgtcggccgaccaggctggacaccctctgccgagtaatgacgtgtgtggctgggaccttctttattctgtgttaatggctaacctgttacactgggctgggttgggtagggtgttctggcttttttgtggggtttttatttttaaagaaacactcaatcatcctaaaaaaaaaa

SEQ ID NO: 317 - DNA, 1900 bp, Homo sapiens
tcgcggtttcaataacaaccacctgttcaccccccccttttggggcccccctcccccgtcttgactccttcttcccggcccccccaaatgttaaactttcgccacgccccaacttttttttttttcttttttgaaactgcatctgcctgttctaaagaaactcccattatcgcaacaaaacacaaaagtgatttgcttcaaaagatgtaactcaaaatcttagcctacagagaatcaccaaattatggagagttaacaggggttaacaggaaggaagtgcctttagtaagttctcaagccagaggctggaggcagcagctaaatcagaggacagcatcctcagtgaaagtgagccattcggggtggcatgtcactccaggaataaacacaacttagaaacaaatgatttcgtaggatagcacagtgacatggtgcactgtgaacctgaggccactgtgtcaaactgtgcactggttgtgaatagggagagccaaaaattatgtcctactggtaatgagctttcaatggctcgatcctctcacactgaagctctgtagagcagctcagagccacaaccactcccaacattgacccttctgggggtagctgtctgtggcagcccacaggaaggagctggagatccccattaggactgtccacccacacttgaagccacaaaactgcagggattggggctctcactggtttggtcgcctaactcccgcctaaaaggccacaaatttctggaaaacaggtaacagaccaaaaactaaagtgcatcagtaaaatgaacatttatctactgccccgaatctctggcttgacactacctactggtgtccagttggagacagactaaaatgcactgaaggactattaggattgctgcctcctaagttatcacgctccctgctgccccaaacaggtccttatctaggtttgctccccactgccccaaacaggtctggcaggattggttacaatgatctccagaggctcaaccattcctgccagacctgttggggcagtggggagcaaacctagataaggacctgtttggggcagcagggagcgtgataacttaggaggcagcaatcctaatagtccttcagtgcattttagtctgtctccaactggacaccagtaggtagtgtcaagccagagattcggggcagtagataaatgttcattttactgatgcactttagtttttggtctgttacctgttttccagaaatttgtggccttttaggcgggagttaggcgaccaaaccagtgagagccccaatccctgcagttttgtggcttcaagtgtgggtggacagtcctaatggggatctccagctccttcctgtgggctgccacagacagctacccccagaagggtcaatgttgggagtggttgtggctctgagctgctctacagagcttcagtgtgagaggatcgagccattgaaagctcattaccagtaggacataatttttggctctccctattcacaaccagtgcacagtttgacacagtggcctcaggttcacagtgcaccatgtcactgtgctatcctacgaaatcatttgtttctaagttgtgtttattcctggagtgacatgccaccccgaatggctcactttcactgaggatgctgtcctctgatttagctgctgcctccagcctctggcttgagaacttactaaaggcacttccttcctgtttaaacccctgttaactctccataaatttggtgattctctggctaggcctaagattttgagttaacatctcttgaagccaaactccaccttctggtgcttttggcttgggataatggagtttttctttagaaacagtgccagaatgacaacgatatttaaaacaaacaacggcaaccacaacaacatc

SEQ ID NO: 318 - DNA, 1657 bp, Homo sapiens
ttttttttttttctagctccaccatctctgcaacttgccaagatgcggcaagactatctgcaacaaagtaaaatatacaggttttttattccaccagtgcctcagatagataggaaaaagatatgattacggtttaaatccatacatagcagcttacaatacttaagatgatgaacacatggcagtcaagacaggtaatttttcctcacaacagtgcatggctaaaaataaagatctaacaacgatctgtgaaactgcactgcaacgtcaaggttcgttcttccctgaccctcccccgtataatcaaatgaatatcccctttaaagatgaactcctactaattattttgggcgttttcattcagctttgcgcttcaatccagggatttttgcttggattttagccatagcatctttaacattcttatttgcaagtcctagataatgatctatctgtgcctgatgccgttcataaataacaggaacactgaagagtgaaatgagagccaaaatcagtagtgtcagaccattaaacaaggcaccaacataggtaaatacccacatcaacactgcaaacttcagagaatcaactaaatcatcaactaagaagaggcgcctgagttcctttatcgtgcagttcacatgaccaagagcagaattactgtacttctgaaccaactcctcagatatagcaacttcagattccagatatgccctgaatgggtggccttcatctgatttctggatagcttggatcacacccttgtatatcctaaagctgatggtcacagagagcagggccaaggcaatgtaggctgttacgctcacaatgctgaatactgtcaatgaaagcagcaggaataggctggcaccaaacaccactccagtcttcttaatgtctctccagtacaggaggtcaacaaccactgagcccgaggagcccctgcgcttgggcgcggccggggtggaggggggcgcggcgggagccggggctggcggggtccacacgggctctgcctgggggctcacgctggccgggggaggagggggaggccgggccggaggctcgtcgtcctcagggagcttggagggcgagactgcggcagcagacagcggggatggcgcgggcacggtcgacgacaccgggctcgggtcccaagacggctgccgctccggggcgacggggggagcggccggcaggggtccccggggcgccggcggcacgaagtcatttccgaagtccatcaggggcgcgccggcggcaggggcggtgggcactggggccgcggacagcccggcggcgggcttcctctccagcacctccagctcctccaggtcttcgtcctcgtcctcctcttcctcctcctcttcttcctcctcgtcctcgggctccctcacgaactggtacttgaacgcgggctgcggccggggtgggctgtccgaggacgagaccagaggagactggtccaggtcttccatggctggagggtggagatgatgctgcagctgctgccgccgccgccggggccgcgtctcagagccgcgggcggttgtgggggttggggaggactgagaggggctgggccgactgagccgagggacctactgtggtgacggctcccggaacaatgagactgctcctcctgcctccgcgccgg

SEQ ID NO: 319 - DNA, 2707 bp, Homo sapiens
acgcgggcacgcacacacggaagcacgcctccacttaactcgcgccgccgcggcagctcgagtccaccagcagcgccgtccgcttgaccgagatgctgcgggcctgtcagttatcgggtgtgaccgccgccgcccagagttgtctctgtgggaagtttgtcctccgtccattgcgaccatgccgcagatactctacttcaggcagctctgggttgactactggcaaaattgctggagctggccttttgtttgttggtggaggtattggtggcactatcctatatgccaaatgggattcccatttccgggaaagtgtagagaaaaccataccttactcagacaaactcttcgagatggttcttggtcctgcagcttataatgttccattgccaaagaaatcgattcagtcgggtccactaaaaatctctagtgtatcagaagtaatgaaagaatctaaacagtctgcctcacaactccaaaaacaaaagggagatactccagcttcagcaacagcacctacagaagcggctcaaattatttctgcagcaggtgataccctgtcggtcccagcccctgcagttcagcctgaggaatctttaaaaactgatcaccctgaaattggtgaaggaaaacccacacctgcactttcagaagaagcatcctcatcttctataagggagcgaccacctgaagaagttgcagctcgccttgcacaacaggaaaaacaagaacaagttaaaattgagtctctagccaagagcttagaagatgctctgaggcaaactgcaagtgtcactctgcaggctattgcagctcagaatgctgcggtccaggctgtcaatgcacactccaacatattgaaagccgccatggacaattctgagattgcaggcgagaagaaatctgctcagtggcgcacagtggagggtgcattgaaggaacgcagaaaggcagtagatgaagctgccgatgcccttctcaaagccaaagaagagttagagaagatgaaaagtgtgattgaaaatgcaaagaaaaaagaggttgctggggccaagcctcatataactgctgcagagggtaaacttcacaacatgatagttgatctggataatgtggtcaaaaaggtccaagcagctcagtctgaggctaaggttgtatctcagtatcatgagctggtggtccaagctcgggatgactttaaacgagagctggacagtattactccagaagtccttcctggatggaaaggaatgagtgtttcagacttagctgacaagctctctactgatgatctgaactccctcattgctcatgcacatcgtcgtattgatcagctgaacagagagctggcagaacagaaggccaccgaaaagcagcacatcacgttagccttggagaaacaaaagctggaagaaaagcgggcatttgactctgcagtagcaaaagcattagaacatcacagaagtgaaatacaggctgaacaggacagaaagatagaagaagtcagagatgccatggaaaatgaaatgagaacccagcttcgccgacaggcagctgcccacactgatcacttgcgagatgtccttagggtacaagaacaggaattgaagtctgaatttgagcagaacctgtctgagaaactctctgaacaagaattacaatttcgtcgtctcagtcaagagcaagttgacaactttactctggatataaatactgcctatgccagactcagaggaatcgaacaggctgttcagagccatgcagttgctgaagaggaagccagaaaagcccaccaactctggctttcagtggaggcattaaagtacagcatgaagacctcatctgcagaaacacctactatcccgctgggtagtgcagttgaggccatcaaagccaactgttctgataatgaattcacccaagctttaaccgcagctatccctccagagtccctgacccgtggggtgtacagtgaagagacccttagagcccgtttctatgctgttcaaaaactggcccgaagggtagcaatgattgatgaaaccagaaatagcttgtaccagtacttcctctcctacctacagtccctgctcctattcccacctcagcaactgaagccgcccccagagctctgccctgaggatataaacacatttaaattactgtcatatgcttcctattgcattgagcatggtgatctggagctagcagcaaagtttgtcaatcagctgaagggggaatccagacgagtggcacaggactggctgaaggaagcccgaatgaccctagaaacgaaacagatagtggaaatcctgacagcatatgccagcgccgtaggaataggaaccactcaggtgcagccagagtgaggtttaggaagattttcataaagtcatatttcatgtcaaaggaaatcagcagtgatagatgaagggttcgcagcgagagtcccggacttgtctagaaatgagcaggtttacaagtactgttctaaatgttaacacctgttgcatttatattctttccatttgctatcatgtcagtgaacgccaggagtgctttctttgcaacttgtgtaacattttctgttttttcaggttttactgatgaggcttgtgaggccaatcaaaataatgtttgtgatctctactactgttgattttgccctcggagcaaactgaataaagcaacaagatgaaaaaaaaaa

SEQ ID NO: 320 - DNA, 1560 bp, Homo sapiens
ttttttttttttgagaaaagccggcataaagcacttttattgcaataataaaacttgagactcataaatggtgctgggggaagggtgcagcaacgatttctcaccaaatcactacacaggacagcaaaggggtgagaaggggctgagggaggaaaagccaggaaactgagatcagcagagggagccaagcatcaaaaaacaggagatgctgaagctgcgatgaccagcatcattttcttaagagaacattcaaggatttgtcatgatggctgggctttcactgggtgttaagtctacaaacagcaccttcaattgaaactgtcaattaaagttcttaagatttaggaagtggtggagcttggaaagttatgagattacaaaattcctgaaagtccattagaaaaaccacaggatgaaaaaaaaaaaaaggccacaaagaaggcttcagaggtccctgctggcccagggacagatacctgtagtgtccagcattgcagtgaacatgatctactttcaaaggcagagggtttaaggggagggtgggtgggaatggtggaggcaaaggctctccccatccccacctcagttttaggtagggcttttaatttaacccaaagacatctctcaacttggagagtaattcagtcctcaacagcgcctcaaatctgctatggctttgcagcgcagcagcaagaatgtttaatatataatagataaaaatttcatccaaaaaattaaaataaaatattcttgcaaacccccccccaacaccaattcctattctaatgttaacctaccacttgtgctgttaatacttgaccatgtacttaattggaaacctatatccaaaagactgaaactgaatcttcaccccaaaatgaaaacaaaataaaatgagtaacttgaggtttatggcatatagtttaggtaaacacacatacgaggagaaaggggaagaggaaacagaggtgtcggaagcaaagctgagtgacagaacacattcagtcagggcagatgtctatacaaagtggagtggaacatcaggaaaagctccatatggattcatgtgcacatgtctggaggcaccagatccctccatggcagatccaagaacagggagctaagggaggaggccattcctgtcattccagttttagaagctccacatcgaagacgagagtggcatgtggtgggatgatgcctgggtgcccagtggcaccataggcataatctggagatatagtcagtttggctctctgacccacactcatctgggcaaccccttcttcccagcctcggatcacctcctgcttgcctagcataaacttaaagggcttgtttctgtcccgggaggaatcaaatttctttccatcttcaagcatcccggtgtagtgcaccacgcaggtctggccgcgcttggggaaggtgcgcccgtctcctggggagatggtttccacctgcactcccatggcggcggcggacgctgagcgggcgggcggcgcgacgggcggcgtggaccaacagcgacctggcggcggttccacggctctgcctcgtgcc

SEQ ID NO: 321 - DNA, 1347 bp, Homo sapiens
cggctattttatttttttcttgcgtctcttctctttgactctcgcctctgtatgttagtccccccccttgttgtctccctcttgctgatgatccctccttcttggtgcggtgttttttcctcaaaagccgcgctctttgttttctctccccgccgcgtcgttttttttttttttgtgtggagaaactcccccccccccctgtctgttgtgttcacccccccggttgtttcttcgtggtggacaccctcgtttggtccccgatgtttactctgccctactgtgggccccgccgccctcccccgccgtgtgtctttcaaagagactttctcctggggcccgccggtgcgcgcgccgcccacatctttttttgtcgttttttcttctttttttgttttttgtgttttttgttgttttttttttttttttttttttttttcaggattaagcatgtatttattttagttcagttaaaacaaacatacattgtttcattgaaacggtgtagcactctttgccaacaagccatactagaattgttggcctctaacagtacagtggggatatttacactatatacacaaagttaatacacccaggttctcaaaggtcttccattacactagatcacattttatttcattacactagatcacattttgattactgcattttgaaaatgtattccttatttaaattttaaataagagatctgaatttgtaccaagatttcatgaaaaaatttgatgttgtttattgcaaatacaatttaaacaagttttttttagtgtttgtacacaatttgtcaatttttcaatattcaattttctgtacaggtacttttgggacaattcttatagttacataatgtgaattcatcaaaatgcagttaagaaacttacaggaatatatacacttgaacccaagacccaaacctgacattatatacaacctatttacaaatacatatggacagacaatatatgtacatagattatcataaatattgaaaaataggttagctttaatggattaatgttgttctataaataacattacagttgtaactgaaacatccacggaagacagtaatgcaaaatgaggtgacaagacagtggttttaatactgaagactgctcattaatgggaattcattgttcaggaacctcaaggtagacaagatagctcccagaaaatcatccattggaattttccctaggcacttgattttgaaccttaaatagccagaggattggaggagcttcctcacattaatttgctgtagagaaaagaattttttttccattccttcctggttgccacagtatcttctcccatacaaaaaaaaaa

SEQ ID NO: 322 - DNA, 1385 bp, Homo sapiens
gcccaaggcaaagaccagatgtggtatgaggatgccttggcttccagccaccctatcattctgtacctgcatgggaacgcaggtaccagaggaggcgaccaccgcgtggagctttacaaggtgctgagttcccttggttaccatgtggtcacctttgactacagaggttggggtgactcagtgggaacgccatctgagcggggcatgacctatgacgcactccacgtttttgactggatcaaagcaagaagtggtgacaaccccgtgtacatctggggccactctctgggcactggcgtggcgacaaatctggtgcggcgcctctgtgagcgagagacgcctccagatgcccttatattggaatctccattcactaatatccgcgaagaagctaagagccatccattttcagtgatatatcgatacttccctgggtttgactggttcttccttgatcctattacaagtagtggaattaaatttgcaaatgatgaaaacgtgaagcacatctcctgtcccctgctcatcctgcacgctgaggacgacccggtggtgcccttccagcttggcagaaagctctatagcatcgccgcaccagctcgaagcttccgagacttcaaagttcagtttgtgccctttcattcagaccttggctacaggcacaaatacatttacaagagccctgagctgccacggatactgagggaattcctggggaagtcggagcctgagcaccagcactgagcctggccgtgggaaggaagcatgaagacctctgccctcctcccgttttcctccagtcagcagcccggtatcctgaagccccagggggccggcacctgcaatgctcaggagcccagctcgcacctggagagcacctcagatcccaggtggggaggcccctgcaggcctgcagtgcccggaggcctgagcatggctgtgtggaaagcgtgggtggcaggcatgtggctctccttgccgcccctcaacctgagatcttgttgggagacttaatggcagcaggcagccatcactgcctggttgatgctgcactgagctggacagggggagtccgggcaggggactcttggggctcgggaccatgctgagctttttggcaccacccacagagaacgtggggtccaggttctttctgcaccttcccagcacatgcagaatgactccagtggttccatcgtcccctcctgccctgtgtacctgcttgcctttctcagctgccccacctcccctgggctggcccactcacccacagtggaagtgcccgggatctgcacttcctcccctttcacctacctgtacacctaacctggccttagactgagctttatttaagaataaaatcgtggtggtggtcaaaaaaaaaa

SEQ ID NO: 323 - DNA, 3101 bp, Homo sapiens
  misc_feature (1)...(3101): n = a,t,c or g
aaaaaaaccttgcctgcgcccgcccggagccagcggttctccaagcacccagcatcctgctagacgcgccgcgcaccgacggaggggacatgggcagagcaatggtggccaggctcgggctggggctgctgctgctggcactgctcctacccacgcagatttattccagtgaaacaacaactggaacttcaagtaactcctcccagagtacttccaactctgggttggccccaaatccaactaatgccaccaccaaggcggctggtggtgccctgcagtcaacagccagtctcttcgtggtctcactctctcttctgcatctctactcttaagagactcaggccaagaaacgtcttctaaatttccccatcttctaaacccaatccaaatggcgtctggaagtccaatgtggcaaggaaaaacaggtcttcatcgaatctactaattccacaccttttattgacacagaaaatgttgagaatcccaaatttgattgatttgaagaacatgtgagaggtttgactagatgatggatgccaatattaaatctgctggagtttcatgtacaagatgaaggagaggcaacatccaaaatagttaagacatgatttccttgaatgtggcttgagaaatatggacacttaatactaccttgaaaataagaatagaaataaaggatgggattgtggaatggagattcagttttcatttggttcattaattctataaggccataaaacaggtaatataaaaagcttccatgattctatttatatgtacatgagaaggaacttccaggtgttactgtaattcctcaacgtattgtttcgacagcactaatttaatgccgatatactctagatgaagttttacattgttgagctattgctgttctcttgggaactgaactcactttcctcctgaggctttggatttgacattgcatttgaccttttatgtagtaattgacatgtgccagggcaatgatgaatgagaatctacccccagatccaagcatcctgagcaactcttgattatccatattgagtcaaatggtaggcatttcctatcacctgtttccattcaacaagagcactacattcatttagctaaacggattccaaagagtagaattgcattgaccacgactaatttcaaaatgctttttattattattattttttagacagtctcactttgtcgcccaggccggagtgcagtggtgcgatctcagatcagtgtaccatttgcctcccgggctcaagcgattctcctgcctcagcctcccaagtagctgggattacaggcacctgccaccatgcccggctaatttttgtaattttagtagagacagggtttcaccatgttgcccaggctggtttcgaactcctgacctcaggtgatccacccgcctcggcctcccaaagtgctgggattacaggcttgagcccccgcgcccagccatcaaaatgctttttatttctgcatatgttgaatactttttacaatttaaaaaaatgatctgttttgaaggcaaaattgcaaatcttgaaattaagaaggcaaaaatgtaaaggagtcaaaactataaatcaagtatttgggaagtgaagactggaagctaatttgcattaaattcacaaacttttatactctttctgtatatacattttttttctttaaaaaacaactatggatcagaatagccacatttagaacactttttgttatcagtcaatatttttagatagttagaacctggtcctaagcctaaaagtgggcttgattctgcagtaaatcttttacaactgcctcgacacacataaacctttttaaaaatagacactccccgaagtcttttgttcgcatggtcacacactgatgcttagatgttccagtaatctaatatggccacagtagtcttgatgaccaaagtcctttttttccatctttagaaaactacatgggaacaaacagatcgaacagttttgaagctactgtgtgtgtgaatgaacactcttgctttattccagaatgctgtacatctattttggattgtatattgtgttgggtgggcggggggtngggggggggggcgggccttcttttcttgacagggtcttattctgtcatccaggatggagtgcagtggtgcgatctcggctcactgcaaacttcacctcccgggctcaagcgattctcctgcctcagcctcccaagtagctgggattacaggcacctgccaccatgcccggctaatttttgtaattttagtagagacagggtttcaccatgttgcccaggctggtttcgaactcctgacctcaggtgatccacccgcctcggcctcccaaagtgctgggattacaggcttgagcccccgcgcccagccatcaaaatgctttttatttctgcatatgttgaatactttttacaatttaaaaaaatgatctgttttgaaggcaaaattgcaaatcttgaaattaagaaggcaaaaatgtaaaggagtcaaaactataaatcaagtatttgggaagtgaagactggaagctaatttgcattaaattcacaaacttttatactctttctgtatatacattttttttctttaaaaaacaactatggatcagaatagccacatttggaacactttttgttatcagtcaatatttttagatagttagaacctggtcctaagcctaaaagtgggcttgattctgcagtaaatcttttacaactgcctcgacacacataaacctttttaaaaatagacactccccgaagtcttttgttcgcatggtcacacactgatgcttagatgttccagtaatctaatatggccacagtagtcttgatgaccaaagtcctttttttccatctttagaaaactacatgggaacaaacagatcgaacagttttgaagctactgtgtgtgtgaatgaacactcttttgctttattccagaatgctgtacatctattttggattgtatattgtgtttgtgtatttacgctttgattcatagtaacttcttatggaattgatttgcattgaacacaaactgtaaataaaaagaaatggctgaaagagcaaaaaaaaaa

SEQ ID NO: 324 - DNA, 4190 bp, Homo sapiens
gcggggaagcagcagcggccaggatgaatcccaggtgctctggagctggatggtgaaggtcggcactcttcaccctcccgagccctgcccgtctcggccccatgcccccaccagtcagccccgggccacaggcagtgagcaggcacctgggagccgaggccctgtgaccaggccaaggagacgggcgctccagggtcccagccacctgtcccccccatggagctgaggccctggttgctatgggtggtagcagcaacaggaaccttggtcctgctagcagctgatgctcagggccagaaggtcttcaccaacacgtgggctgtgcgcatccctggaggcccagcggtggccaacagtgtggcacggaagcatgggttcctcaacctgggccagatcttcggggactattaccacttctggcatcgaggagtgacgaagcggtccctgtcgcctcaccgcccgcggcacagccggctgcagagggagcctcaagtacagtggctggaacagcaggtggcaaagcgacggactaaacgggacgtgtaccaggagcccacagaccccaagtttcctcagcagtggtacctgtctggtgtcactcagcgggacctgaatgtgaaggcggcctgggcgcagggctacacagggcacggcattgtggtctccattctggacgatggcatcgagaagaaccacccggacttggcaggcaattatgatcctggggccagttttgatgtcaatgaccaggaccctgacccccagcctcggtacacacagatgaatgacaacaggcacggcacacggtgtgcgggggaagtggctgcggtggccaacaacggtgtctgtggtgtaggtgtggcctacaacgcccgcattggaggggtgcgcatgctggatggcgaggtgacagatgcagtggaggcacgctcgctgggcctgaaccccaaccacatccacatctacagtgccagctggggccccgaggatgacggcaagacagtggatgggccagcccgcctcgccgaggaggccttcttccgtggggttagccagggccgaggggggctgggctccatctttgtctgggcctcggggaacgggggccgggaacatgacagctgcaactgcgacggctacaccaacagtatctacacgctgtccatcagcagcgccacgcagtttggcaacgtgccgtggtacagcgaggcctgctcgtccacactggccacgacctacagcagtggcaaccagaatgagaagcagatcgtgacgactgacttgcggcagaagtgcacggagtctcacacgggcacctcagcctctgcccccttagcagccggcatcattgctctcaccctggaggccaataagaacctcacatggcgggacatgcaacacctggtggtacagacctcgaagccagcccacctcaatgccaacgactgggccaccaatggtgtgggccggaaagtgagccactcatatggctacgggcttttggacgcaggcgccatggtggccctggcccagaattggaccacagtggccccccagcggaagtgcatcatcgacatcctcaccgagcccaaagacatcgggaaacggctcgaggtgcggaagaccgtgaccgcgtgcctgggcgagcccaaccacatcactcggctggagcacgctcaggcgcggctcaccctgtcctataatcgccgtggcgacctggccatccacctggtcagccccatgggcacccgctccaccctgctggcagccaggccacatgactactccgcagatgggtttaatgactgggccttcatgacaactcattcctgggatgaggatccctctggcgagtgggtcctagagattgaaaacaccagcgaagccaacaactatgggacgctgaccaagttcaccctcgtactctatggcaccgcccctgaggggctgcccgtacctccagaaagcagtggctgcaagaccctcacgtccagtcaggcctgtgtggtgtgcgaggaaggcttctccctgcaccagaagagctgtgtccagcactgccctccaggcttcgccccccaagtcctcgatacgcactatagcaccgagaatgacgtggagaccatccgggccagcgtctgcgccccctgccacgcctcatgtgccacatgccaggggccggccctgacagactgcctcagctgccccagccacgcctccttggaccctgtggagcagacttgctcccggcaaagccagagcagccgagagtccccgccacagcagcagccacctcggctgcccccggaggtggaggcggggcaacggctgcgggcagggctgctgccctcacacctgcctgaggtggtggccggcctcagctgcgccttcatcgtgctggtcttcgtcactgtcttcctggtcctgcagctgcgctctggctttagttttcggggggtgaaggtgtacaccatggaccgtggcctcatctcctacaaggggctgccccctgaagcctggcaggaggagtgcccgtctgactcagaagaggacgagggccggggcgagaggaccgcctttatcaaagaccagagcgccctctgatgagcccactgcccaccccctcaagccaatcccctccttgggcactttttaattcaccaaagtatttttttatcttgggactgggtttggaccccagctgggaggcaagaggggtggagactgcttcccatcctaccctcgggcccacctggccacctgaggtgggcccaggaccagctggggcgtggggagggccgtaccccaccctcagcaccccttccatgtggagaaaggagtgaaacctttagggcagcttgccccggccccggccccagccagagttcctgcggagtgaagaggggcagcccttgcttgttgggattcctgacccaggccgcagctcttgcccttccctgtccctctaaagcaataatggtcccatccaggcagtcgggggctggcctaggagatatctgagggaggaggccacctctccaagggcttctgcaccctccaccctgtcccccagctctggtgagtcttggcggcagcagccatcataggaagggaccaaggcaaggcaggtgcctccaggtgtgcacgtggcatgtggcctgtggcctgtgtcccatgacccacccctgtgctccgtgcctccaccaccactggccaccaggctggcgcagccaaggccgaagctctggctgaaccctgtgctggtgtcctgaccaccctcccctctcttgcacccgcctctcccgtcagggcccaagtccctgttttctgagcccgggctgcctgggctgttggcactcacagacctggagcccctgggtgggtggtggggaggggcgctggcccagccggcctctctggcctcccacccgatgctgctttcccctgtggggatctcaggggctgtttgaggatatattttcactttgtgattatttcactttagatgctgatgatttgtttttgtatttttaatgggggtagcagctggactacccacgttctcacacccaccgtccgccctgctcctccctggctgccctggccctgaggtgtgggggctgcagcatgttgctgaggagtgaggaatagttgagccccaagtcctgaagaggcgggccagccaggcgggctcaaggaaagggggtcccagtgggaggggcaggctgacatctgtgtttcaagtggggctcgccatgccgggggttcataggtcactggctctccaagtgccagaggtgggcaggtggtggcactgagcccccccaacactgtgccctggtggagaaagcactgacctgtcatgcccccctcaaacctcctcttctgacgtgccttttgcacccctcccattaggacaatcagtcccctcccatctgggagtccccttttcttttctaccctagccattcctggtacccagccatctgcccaggggtgccccctcctctcccatccccctgccctcgtggccagcccggctggttttgtaagatactgggttggtgcacagtgatttttttcttgtaatttaaacaggcccagcattgctggttctatttaatggacatgagataatgttagaggttttaaagtgattaaacgtgcagactatgcaaaccagaaaaaaaaaa

SEQ ID NO: 325 - DNA, 1747 bp, Homo sapiens
ttttttttttttgttttaacaaacatgtttattagaaaagtaaaaaaatattgcataggtcttaatacttgaacatcaagtgtattcatgaacagtgagtatcttatcttcatgtaaacagttctagatggaagacccagatggcactcctcccggggaggggttccagcccccaccctctcagcccctcccctgccagctcaactctgcagtacacgatgggggaaggcttaaacgcagctgccaggtgtaatttttcaagtgtcaaagatcccaagtgatccctgacacccaccccttcctactcttacattcatgcgtctgtaagatagctgcctacaacaggtcagtagtgatgctccgatcagaaaaacaagatacaaaacaaacaacaaacacacttggtcccttcagaccagtaagatacacaaaccacctccacgacctccgacctcccccctccctccggctgctctgaggagcacgtgcctcttccttcaccctgggccgggctggggcgggagcagcccagctgctctctggatgtcacaccactgttaactgtcagtaacaaaaataataaggtacatgctacacacacatccagctggaagccttgttgggcccctaagcctttgtttcatgctacagtactgaggggtatgtgtccccaatgcacagccacccgcacacaactcaatgagcttcctgggaaacactattcccccacctccaccttaggtggctgcctcagttttccaaccactggaatcagtccctcagctcctgcctctagtctccaccccaaaagttcagtcgtctctgtcttggagggcactgtcggccccctcaggttgaagttcaacactcctcaatgagcagctgttccgagctgtacagcttcttcttgatgactcggaagccagtgctcagcgtcagggactggctgaagccagggaggaagggagagttggcggagctaaacagcccctggatcttgggccagagtcgtgagtccaggcgcagcacgagggtcagctggaaggtgggccaccaggctggggtcgagtgccagctggcccacgctgtggcagctcttgccctgctccacgcagacgtccagcagcgccccccgcaggccgcacggctcgctgtaggccaggcgcagtagttctttgcccacctggcttaccaactggctaggcatcagcaggcgcgcagggcgtcgagagcccagccgcgcctgggccaggctctcctgcagcagctgcatcaggttggcacacaagtgttcatcctcagggtcactgagcagctcgaagtcgggcaacgacaccccatccaggtaagccgtgtcttcctccggcccgaagccactgttgctgctgtccagggactcgcagtccgagctctccaggctcgtggagcggtcaaacccctcctcccgggtcgccgacccccaggctgagcgcggcggccgatctggggtgggagttcggggcaaggacgagggcgaagaggaggtggacgacgacgagaagcggtcccaaaggctaggcatggtgaggacagacgccagggcgtttgctgatgaactcagagtgccggagcgtagaagccgcagctagcgcggtcagcgagaactgctaagacaagtgcgtcctgccgcttgaatgggtgtgcgaacccgtgccaaccaccgagagccgcccagacccgtcccaggtccacgctcgcacctcccccc

SEQ ID NO: 326 - DNA, 1048 bp, Homo sapiens
gggttgataatgaacatttttcactatttttttttctatctgaagcttagagatctagagctttggatctttcgggtatatgtcaatggaggtattattttataatactttgcattgacatgaagtgggttcatgggggaaaaccatgagctgtgaacattggtagcaaacaagcatatattcatttcaaaactttccttgcttttagcagagagaagcctgtatatgttacatgtgtgactttcagtagtttaaagagatgtttcaaaaaattgttgcatgtttttgatgcaatttgggaaattgtttacttcacaatgtagtcattcataaaaaaattcatgaaaatactgaacatatgtttgaggatttttcttttcctttttaaatttttttattttttctgagacggagatctgctcttacgcccaggctagagtgaagtggcgcgatcttggcttactgcaacctccaccccccaggttcaagcgattctcctgcctcagcctccggagtagctgggattacaggcgcccgccaccacgtccggctaatttttgtattttcagtagagacggggttttgctatgttggccaggctggtctcaaactcctgacctcaagtgatccacctgcctcggcctcccaaagtgttaggataacaggtgtgagccaccgtgcccggctgaagatttttcttaattgcaataaatattcagcattttttctaatgaaaatgaattttgtttaccagtaaaagtatgcattttaaaagactttcagatttatgctttttacgtgaagctgctaaactaaaagtaaatggaagaaaccaagtctagtaggttttttctttttttttgtgggggtgggatgggggaggttagttacacttaaaatatcttctccagagactgtatgctcctatactagactgtaagctctttgagggcagtctgtcagatttatctttgtatcttccccagcgcctagtgtagtgccttgcacataataggcgcccaataaatattgatgaagaaaaaaaaaa

SEQ ID NO: 327 - DNA, 3145 bp, Homo sapiens
ctgtctgagcatttcactgcggagcctgagcgcgcctgcctgggaaaacactgcagcggtgctcggactcctcctgtccagcaggaggcgcggcccggcagctcccgcatgcgcagtgcgctcggtgtcagacggcccggatcccggttaccggcccctcgctcgctgctcgccagcccagactcggccctggcagtggcggctggcgattcggaccgatccgacctgggcggaggtggcccgcgccccgcggcatgagccggtgaccaagctcggggccgagcgggaggcagccgtggccgaggagtgtgaggaagaggctgtctgtgtcattatgtgtgcgtcggtcaagtataatatccggggtcctgccctcatcccaagaatgaagaccaagcaccgaatctactatatcaccctcttctccattgtcctcctgggcctcattgccactggcatgtttcagttttggccccattctatcgagtcctcaaatgactggaatgtagagaagcgcagcatccgtgatgtgccggttgttaggctgccagccgacagtcccatcccagagcggggggatctcagttgcagaatgcacacgtgttttgatgtctatcgctgtggcttcaacccaaagaacaaaatcaaggtgtatatctatgctctgaaaaagtacgtggatgactttggcgtctctgtcagcaacaccatctcccgggagtataatgaactgctcatggccatctcagacagtgactactacactgatgacatcaaccgggcctgtctgtttgttccctccatcgatgtgcttaaccagaacacactgcgcatcaaggagacagcacaagcgatggcccagctctctaggtgggatcgaggtacgaatcacctgttgttcaacatgttgcctggaggtcccccagattataacacagccctggatgtccccagagacagggccctgttggctggtggcggcttttctacgtggacttaccggcaaggctacgatgtcagcattcctgtctatagtccactgtcagctgaggtggatcttccagagaaaggaccaggtccacggcaatacttcctcctgtcatctcaggtgggtctccatcctgagtacagagaggacctagaagccctccaggtcaaacatggagagtcagtgttagtactcgataaatgcaccaacctctcagagggtgtcctttctgtccgtaagcgctgccacaagcaccaggtcttcgattacccacaggtgctacaggaggctactttctgtgtggttcttcgtggagctcggctgggccaggcagtattgagcgatgtgttacaagctggctgtgtcccggttgtcattgcagactcctatattttgcctttctctgaagttcttgactggaagagagcatctgtggttgtaccagaagaaaagatgtcagatgtgtacagtattttgcagagcatcccccaaagacagattgaagaaatgcagagacaggcccggtggttctgggaagcgtacttccagtcaattaaagccattgccctggccaccctgcagattatcaatgaccggatctatccatatgctgccatctcctatgaagaatggaatgaccctcctgctgtgaagtggggcagcgtgagcaatccactcttcctcccgctgatcccaccacagtctcaagggttcaccgccatagtcctcacctacgaccgagtagagagcctcttccgggtcatcactgaagtgtccaaggtgcccagtctatccaaactacttgtcgtctggaataatcagaataaaaaccctccagaagattctctctggcccaaaatccgggttccattaaaagttgtgaggactgctgaaaacaagttaagtaaccgtttcttcccttatgatgaaatcgagacagaagctgttctggccattgatgatgatatcattatgctgacctctgacgagctgcaatttggttatgaggtctggcgggaatttcctgaccggttggtgggttacccgggtcgtctgcatctctgggaccatgagatgaataagtggaagtatgagtctgagtggacgaatgaagtgtccatggtgctcactggggcagctttttatcacaagtattttaattacctgtatacctacaaaatgcctggggatatcaagaactgggtagatgctcatatgaactgtgaagatattgccatgaacttcctggtggccaacgtcacgggaaaagcagttatcaaggtaaccccacgaaagaaattcaagtgtcctgagtgcacagccatagatgggctttcactagaccaaacacacatggtggagaggtcagagtgcatcaacaagtttgcttcagtcttcgggaccatgcctctcaaggtggtggaacaccgagctgaccctgtcctgtacaaagatgactttcctgagaagctgaagagcttccccaacattggcagcttatgaaacgtgtcattggtggaggtctgaatgtgaggctgggacagagggagagaacaaggcctcccagcactctgatgtcagagtagtaggttaagggtggaaggttgacctacttggatcttggcatgcacccacctaacccactttctcaagaacaagaacctagaatgaatatccaagcacctcgagctatgcaacctctgttcttgtatttcttatgatctctgatgggttcttctcgaaaatgccaagtggaagactttgtggcatgctccagatttaaatccagctgaggctccctttgttttcagttccatgtaacaatctggaaggaaacttcacggacaggaagactgctggagaagagaagcgtgttagcccatttgaggtctggggaatcatgtaaagggtacccagacctcacttttagttatttacatcaatgagttctttcagggaaccaaacccagaattcggtgcaaaagccaaacatcttggtgggatttgataaatgccttgggacctggagtgctgggcttgtgcacaggaagagcaccagccgctgagtcaggatcctgtcagttccatgagctattcctctttggtttggctttttgatatgattaaaattattttttattccttttaaaaaaaaaa

SEQ ID NO: 328 - DNA, 3120 bp, Homo sapiens
gcccagttggagccagacagcggggtggacaagtggcgtgtgtgctgcgaccccgagggaagatgaacgggacgcggaactggtgtaccctggtggacgtgcacccagaggaccaggcggcgggcagcgtggacattctcaggctgactctccagggtgaactgacaggagatgaacttgaacacatagcccagaaggcgggcaggaagacctatgccatggtgtccagccactcagctggtcattctctggcttcagaactggtggagtcccatgatggacatgaggagatcattaaggtgtacttgaaggggaggtctggagacaagatgattcacgagaagaatattaaccagctgaagagtgaggtccagtacatccaggaggccaggaactgcctacagaagctccgggaggatataagtagcaagcttgacaggaacctaggagattctctccatcgacaggagatacaggtggtgctagaaaagccaaatggctttagtcagagtcccacagccctgtacagcagcccacctgaggtggacacctgtataaatgaggatgttgagagcttgaggaagacggtgcaggacttgctggccaagcttcaggaggccaagcggcaacaccagtcagactgtgtggcttttgaggtcacactcagccggtaccagagggaagcagaacaaagtaatgtggcccttcagagagaggaggacagagtggagcagaaagaggcagaagtcggagagctgcagaggcgcttgctagggatggagacggagcatcaggccttactggcgaaagtgagggaaggggaggtggccctagaggaacttcggagcaacaatgctgactgccaagcagaacgagaaaaggctgctaccctggaaaaggaagtggccgggttgcgggagaagatccaccacttggatgacatgctcaagagccagcagcggaaagtccggcaaatgatagagcagctccagaattcaaaagctgtgatccagtcaaaggacgccaccatccaggagctcaaggagaaaatcgcctatctggaggcagagaatttagagatgcatgaccggatggaacacctgatagaaaaacaaatcagtcatggcaacttcagcacccaggcccgggccaagacagagaacccgggcagtattaggatatccaagccgcctagcccgaagcccatgcctgtcatccgagtggtggaaacctgagctgcctggagatggttgctgccattgctgctgcctctgcctcggagaagcccactgcccctgttggctgttaacactgcctttgacttcctgactgtcccctggctgcacccaggacttcgggctcctgtgtctcaccattcccaagcccctggccactctaagctgggcagacggagcacgagcacctattcaaggcactgcagccctttggaagacattgtcctgcaagcaggagccagggcaatatctatattcctacagtgactatttttctctgtagagagcctcccttctgttgtagactggactctggctgcgccataagccaggccttcatcagattgggagaggtgacaagatttgcctcagccctaaaagctggagacacagatgtccagagtgattggagaatgtcctgggggaatgaagttccttccacaaacacagctcagttcttagcaacaaactgtttgtttttctacttgctccatctgcagcctacgctgccctggcctcctgcagacagatagtggggttacctggcaaggcctggtgagagccagtgaacctaagctttgactgggtggccttgtctttctggggaggagggaatgtacattcagggagtagccttttgcggaaaaattctctagggctacagacagtcatgtgtgacttctctctgctgtgaaaactcccagagtctctttagggattttccctaaggtgtaccaccaggcacacctcagtcttcttgacccagagcctgaaaactgttttcactgggttccaccagtcccagcaaaatcctctttgtatttattttgctaagttattggtggttttgcttacatctcatgattgatataataccaaagttctatagccttctcttgcagtatttggatttgcttgaaaccgggaaaactgttcccattaggcttgttaatgtcagagtgacactattatgaatctttctctccctttcctctgcctgtttcttctctctttctccttcaaacttgctctgcagctaaggaaggtgagtctactttccctgaggctttggggtcagagtatatgttgtttggagaaagagggcaatcaggactcttctgggacccagatgagttcttcactagcccttctgaaccccttgctccataattggtcttttatcctggctctgaatgaccctgcaggtcatcatggttttctttttttattgtttttttttttttctgagacagagtctcactctgtcacccaggctggagtgcagtggcgcgatctcagctcactgcaacctctgcctcccggatttaagcgattcttctgcctcagcctcccgagtagctgggactacaggtgtgccaccacgcctggctgatttttgtatttttagtagagatggggtttcaccatactggctaggctggtctcgaattcctgacctcaggtgatccacccacctcggcttcccaaagtgctaggattataggcttgagctactgcgcccggcccatggtgtttttctttagggctcttcctacaaccttgagaagtagataggcatcagagtatggtactataggaatcagaaaaattcaaaacaaatgtggattaagtgtttaggctctatgtggctcacgcagccagaatccttaagtctgtgtgtttctgtgtctcaagactgggctcacattctggctttgtccataacaatgctctgggatttcagggagttccctcatttgtaaaatgagggggtcagagcaggtgatatccatgtttcttccctttctgatattgttgtctgtggcatattctttgtatggcgaatttaataaattatattaatgtgtctctttgaaaaaaaaaa

SEQ ID NO: 329 - DNA, 822 bp, Homo sapiens
atgactctctctcttgagtaggcacacactcccttttctcgggtgtgtactttttgctttgtgatacatctctgcactttcagtattttccaactcatccttaaattccttctcacaacagtgtcaagagcctggacgccagccaggattgaggtcctacgggtgtttggggacctccccaagcccacgagtatcaatggcagtatcaattgtctgtgacagtgattaaggagcaaaacacttggaacccacaagactcccagaaggtgaagttaagagctcccagactcataaggttattagaacagcaaactggcaccccaaagaactttacggagacttgcaacctatcaacaagttggatgagggattaaaagccttcaacaaccaacaaccccaagcatcaaactgaaggaaacattctaaccttcacagacagactggaggctggatggggacctggctgaagacatctggagaatgaaagttaagtaccagcttgcatttttgtgcccctagattatttttgcattttaaaataagaagcatcaaattgcgtgtctctgtgtaaaagttctagcaatttgttttaaggtgaacttattttggcttagggactacaaaaagagaaggtaattcctagggaaggaagaagagaaagaaatgaaaattagagaataagattattttgaatgacttcaggtagcgaggagtgtgtgtttgtgagtgtgtatttgagagacttggctcatgcctgtgggtcttctcttctagtatcagtgaggggagggattactgaagaagaaggggggaaaaaaaaaa

SEQ ID NO: 330 - DNA, 7294 bp, Homo sapiens
cgcactctccgtccccgcggctggcgcaggacctcactcgagcggagcgcccacggggagcgggtcgcggggcggcggcggcgaggaggaggcgagaaggagttggaggaggaggaggaggaggcgagggcgagcgagcccagcggggtcccggccgccccgcgggccaaagtcgagccctcccgcccgtgggcgagcgcgccagccgccccttccagaacagccgccgccacaaagaagaacggggggtgccgaggtccccatgacctcctaaagtggtgcggtccctgctgagtgcgctgcccgggccgtgacccgcgcccctgtgcgtccccgcgcgcctccgagcgcccctgtgcgccccggcccgcgccccgccggcatggacgtccatacccgctggaaagcgcgcagcgcgctccgcccgggcgccccgctgctgcccccgctgctgctgctgctgctgtgggcgccgcctccgagccgcgcagctcagccagcagatctcctgaaggttctagattttcacaacttgcctgatggaataacaaagacaacaggcttttgcgccacgcggcgatcttccaaaggcccggatgtcgcttacagagtcaccaaagacgcgcagctcagcgcacccaccaagcagctgtaccctgcgtctgcatttcccgaggacttctccatcctaacaactgtgaaagccaagaaaggcagccaggccttcctggtctccatctacaacgagcagggtatccagcagattgggctggagctgggccgctctcccgtcttcctctacgaggaccacacggggaagcctggcccggaagactaccccctcttccggggcatcaacctgtcagatggcaagtggcacagaattgctctcagcgtccacaagaaaaatgtcaccttgatcctcgactgtaaaaagaagaccaccaaattcctcgaccgcagcgaccaccccatgatcgacatcaatggcatcatcgtgtttggcacccggatcctggatgaggaggtgtttgagggtgacatccagcagctgctctttgtctcggaccaccgggcagcttatgattactgtgagcactacagccctgactgtgacaccgcagtacctgacaccccacagtcgcaggaccccaatccagatgaatattacacggaaggagacggcgagggtgagacctattactacgaatacccctactacgaagaccccgaagacctagggaaggagcccacccccagcaagaagcccgtggaagctgccaaagaaaccacagaggtccccgaggagctgaccccgacccccacggaagctgctcccatgcctgaaaccagtgaaggggctgggaaggaagaggacgtcggcatcggggactatgactacgtgcccagtgaggactactacacgccctcaccgtatgatgacctcacctatggcgagggggaggagaaccctgaccagcccacagacccaggcgctggggccgaaattcccaccagcaccgccgacacctccaactcctccaatccagctccgcctccaggggaaggtgcggatgacttggagggggagttcactgaggaaacgatccggaaccttgacgagaactactacgacccctactacgaccccaccagctccccgtcggagatcgggccgggaatgccggcgaaccaggataccatctatgaagggattggaggacctcggggcgagaaaggccaaaagggagaaccagcgattatcgagccgggcatgctcatcgagggcccgcctggcccagaaggccccgcgggtcttcccggacctccaggaaccatgggtcccactggccaagtcggggaccctggagaaaggggcccccctggacgcccaggccttcctggggccgatggcctgcccggtcctccaggaaccatgctcatgctgcccttccggtttggaggtggcggcgatgcgggctccaaaggccccatggtctcagcccaggagtcccaggcgcaagccattctccagcaggccaggttggcactgaggggaccagctggcccgatgggtctcacagggagacctggccctgtgggtccccctgggagcggaggtttgaagggcgagccgggagacgtggggcctcagggtcctcgaggtgtgcaaggcccgcctggtccggccgggaagcccggaagacggggtcgggctgggagtgatggagccagaggaatgcctggacaaactggccccaagggtgaccggggtttcgacggcctggctgggttgccaggcgagaagggccacaggggtgaccctggtccttccggcccaccaggacctccgggagacgatggagaaaggggtgacgacggagaagttgggcccagggggctgcctggggagcccgggccacgtggtctgcttgggccgaaagggcccccaggtcctcccggacctcccggtgtcacgggtatggacggccagccggggccaaaaggaaatgtgggtccccagggagagcctggccccccaggacagcagggtaatccaggcgcccagggtcttccaggcccccagggtgcaattggtcctccaggagaaaagggtcccttggggaaaccaggccttccaggaatgcccggtgctgacggacccccgggacaccctggcaaagaaggccctccaggagagaaaggaggtcagggtccacctggcccccagggtccgattggctacccaggtcctcgaggagtcaagggggccgatggcatccgtggtctgaagggcacaaagggcgagaagggtgaagacggctttcctgggtttaaaggagacatgggcatcaagggtgatcggggggagatcggcccacccggtcccaggggagaagatggccctgaaggcccaaagggtcgcggaggtcccaatggtgaccccggtcctctgggaccccctggggagaagggaaaactcggagtcccagggttaccagggtatccaggaagacaaggaccaaagggctctattggattccctggatttcctggcgccaatggagagaagggcggcagggggacccctggaaagccaggaccgcgggggcagcgaggcccaacgggtccgaggggtgaaagaggcccccggggcatcactgggaagcctggccccaagggcaactccggaggtgacggcccagctggccctcctggtgaacggggacccaatggaccccaaggacccacaggatttcctggaccaaagggcccccctggccctccaggcaaggatggactcccaggacaccctggacagagaggcgagactggtttccaaggcaagaccggccctccaggcccccccggcgtggtcggccctcagggtcccacgggagaaacgggcccaatgggtgagcgtggccaccctgggccccctggaccccccggtgaacaggggcttccgggccttgctggaaaagaagggacgaagggtgacccaggccctgcaggcctccctgggaaagatggccctccaggattacgtggtttccctggggaccgagggcttcctggtccagtgggagctcttggactgaaaggcaatgaagggccccctggcccaccaggccctgcgggatctccaggggagagaggtccagctggagccgctgggcccatcggaattccagggagacctgggccccagggacccccagggccggcaggagagaaaggggctcctggcgagaaaggcccacaaggcccagctggccgagacggtctccaggggcctgtggggctcccgggtccagctggccctgtgggtccccctggagaagacggagataagggagagatcggggagccggggcagaaaggaagcaagggggacaaaggagaacagggtcctcctgggcctacaggtcctcaaggccccatcggacagccaggcccctctggagctgacggcgagccggggcctcggggccagcagggccttttcgggcagaaaggtgatgaaggtcccagaggctttcctggaccccctgggccagtggggctgcagggtttgccaggacctccaggcgagaagggtgagacaggagacgtgggccagatgggccccccgggtccccctggcccccgaggaccctccggagctccaggtgctgatggcccacaaggtcccccaggtggaataggaaaccctggtgcagtgggagagaagggcgagcctggcgaagcaggtgagcctggcccttccgggagaaggcggccccccgggacccaaaggagaaaggggagagaagggcgagtcaggcccttcaggtgctgccggaccccctggacccaaaggccctcccggagatgatggtcccaaaggcagccctggcccagtgggttttcctggagatcctggcccccccggagagcctggccccgcgggtcaagatggtccccctggtgacaaaggagatgatggtgaacccgggcagacaggatcccccggccctactggtgaaccaggtccatcggggcctccaggaaaaaggggtcccccaggccccgcaggccccgaaggcagacagggagagaaaggggccaagggagaagccggcttggaaggccctcctgggaagactggccccatcggcccccagggggcccctgggaagcccggaccggatggccttcgagggatccctggccctgtgggagaacaaggtctcccaggatccccaggcccggacggtccccccggccccatgggtcccccaggacttcccggcctcaaaggagattctggtcccaaaggtgaaaagggtcatccaggcctgatcgggctcatcggtcctcccggtgaacagggtgagaagggcgaccgtggtctccctggcccccagggctcctccggtcctaagggagaacagggtatcactggtccttctggcccgattgggcctcctgggccccctggcctgccgggtccgcctggtccaaaaggtgctaagggctcctcgggtccaactggcccgaagggtgaggcaggccacccaggacccccaggccccccgggccccccgggagaggtcatccagcccctgccaatccaggcatccaggacgcggcggaacatcgacgccagccagctgctggacgacgggaatggcgagaactacgtggactacgcggacggcatggaagagatcttcggctctctcaactctctgaagctggagattgagcagatgaaacggcccctgggcacgcagcagaaccccgcccgcacctgcaaggacctgcagctctgccaccccgacttcccagatggtgaatactgggtcgatcctaaccaaggatgctccagggattccttcaaggtttactgcaacttcacagccggggggtcgacatgcgtcttccctgacaagaagtccgaaggggccagaatcacttcttggcccaaagaaaacccgggctcctggttcagtgaattcaagcgtgggaaactgctctcctatgtggacgccgagggcaaccctgtgggtgtggtacagatgaccttcctgcggctgctgagcgcctctgcccaccagaacgtcacctaccactgctaccagtcagtggcctggcaggacgcagccacgggcagctacgacaaggccctccgcttcctgggctccaacgacgaggagatgtcctatgacaacaacccctacatccgcgccctggtggacggctgtgctaccaagaaaggctaccagaagacggttctggagatcgacacccccaaagtggagcaggtgcccatcgtggacatcatgttcaatgacttcggtgaagcgtcacagaaatttggatttgaagtggggccggcttgcttcatgggctaggagccgccgagcccgggctcccgagagcaacctcgtgacctcagcatgccattcgttcgtgagtgtcccgtgcacgtcctgatcctggacagtgaaggcttctccctcccctcccacctgacttcatctacgcctcggcacccacggggtgtgggaccccagcccggagagaacagagggaaggagccgcgcccccacctggagctgaatcacatgacctagctgcaccccagcgcctgggcccgccccacgctctgtccacacccatgcgccccgggagcggggccatgcctccagccccccagctcgcccgacccatcctgttcgtgaataggtctcaggggttgggggagggactgccagatttggacactatatttttttctaaattcaacttgaagatgtgtatttcccctgaccttcaaaaaatgttccaaggtaagcctcgtaaaggtcatcccaccatcaccaaagcctccgtttttaacaacctccaacacgatccatttagaggccaaatgtcattctgcaggtgccttcccgatggattaaaggtgcttatgtttttgtgagttttaagtaaatatttgtggaatttaagatgaagacagtaatataatattttggtacaaaaacagctgcaggaagaggtggaggggggcctgtcattatgtttcccccccaccccccaacgaaaggaaaactaagactcccaacataaacagggccttgaagggggggattacaggcacttgggcatggagtcttcggctgcaggaagcactccgcttattcttcaggaatgggaaaggcgtgacccaacgagagcatctgtctcagagctccactcagggtcacccctctccagaggccggtatggggtggcttcagacttccactgcacgacctggagcaccaagaccacacaccacaataccaaattcacccaagaagaggtctaattgtagtgttcaaggagatgatggagttgcagagagacctggtgccaaatcgaaggatacaggcagacaccaagaccaggaagacggctatagctgagatggccagtgcaatgcgcagccctatagcacctctgtgggagtcctcgatgcagctgctgtagatccagaagagcaaaagcaggaggcagtagagggccaagaggccagaggccccagctacaaagtagcacagggatggtgctgagggacgggataaggccagggaggagccattcagggtggccacaccatacaggggacatctaccactgaaggagccctgggtccgagtcatcgccgcggccgccacggccccgcacaggaaggcggcagcaaagagcgcaagctcgacgcgctgcagccaggacagcgccatggcgccctgaccaccag

SEQ ID NO: 331 - DNA, 1239 bp, Homo sapiens
aaggatccttaattaaattaatcccccccccccccgaggagctggtgagaagacagcgaaatggcgcctccggcccccggcccggcctccggcggctccggggaggtagacgagctgttcgacgtaaagaacgccttctacatcggcagctaccagcagtgcataaacgaggcgcagcgggtgaagctatcaagcccagagagagacgtggagagggacgtcttcctgtatagagcgtacctggcgcagaggaagttcggtgtggtcctggatgagatcaagccctcctcggcccctgagctccaggccgtgcgcatgtttgctgactacctcgcccacgagagtcggagggacagcatcgtggccgagctggaccgagagatgagcaggagcgtggacgtgaccaacaccaccttcctgctcatggccgcctccatctatctccacgaccagaacccggatgccgccctgcgtgcgctgcaccagggggacagcctggagttggtgtygagtccgggcagggccctccatctggaagcacagccatggagtgcttctccagatgggcgcacagccatgacagtgcagatcctgctgaagctggaccgcctggacctcgcccggaaggagctgaagagaatgcaggacctggacgaggatgccaccctcacccagctcgccactgcctgggtcagcctggccacgggtggtgagaagctgcaggatgcctactacatcttccaggagatggctgacaagtgctcgcccaccctgctgctgctcaatgggccaggcggcctgccacatgggcccagggcccgctgggagggccgctgaggggcctggctgcagggaggcgctagacaaggatagtggctacccggagacgctggtcaacctcatcgtcctgttcccagcacctggggcaagcccccctgagggtgacaaaccgatacctgtcccagctgaaggatgcccacagggtcccatcccttcatcaaggagtaccaggccaaggagaacgactttgacaggctggtgctacagtacgctcccagcgcctgaggctggcccagagctgtcaggaccatgaagccaggacagaggccaggagccagccctgcagccctccccacccggcatccacctgcatcccctctgggggcaggagcccacccccagcacccccatctgttaataaatatctcaactccagggtgttccacctgaaaaaaaaaa

SEQ ID NO: 332 - DNA, 1212 bp, Homo sapiens
caactttttcgaggtaggagtcgactcctgtgaggtatggtgctgggtgcagatgcagtgtggctctggatagcaccttatggacagttgtgtccccaaggaaggatgagaatagctactgaagtcctaaagagcaagcctaactcaagccattggcacacaggcattagacagaaagctggaagttgaaatggtaagtgaaactgtatccaagtaagcaggtggagtccaacttgcctggaccagcttaatggttctgctcctggtaacgtttttatccatggatgacttgcttgggtaaggacatgaagacagttcctgtcataccttttaaaggtatggagagtcggcttgactacactgtgtggagcaagttttaaagaagcaaaggactcagaattcatgattgaagaaatgcaggcagacctgttatcctaaactagggtttttaatgaccacaacaagcaagcatgcagcttactgcttgaaagggtcttgcctcacccaagctagagtgcagtggcctttgaagcttactacagcctcaaacttctgggctcaagtgatcctcagcctcccagtggtctttgtagactgcctgatggagtctcatggcacaagaagattaaaattggagacactgttttaatcttcttgtgccatgagactccatcaggcagtctacaaagaccactgggaggctgaggatcacttgagcccagaagttggaggctgtagtaagcttcaaaggccactgcactctagcttgggtgaggcaagaccctttcaagcagtaagctgcatgcttgcttgttgtggtcattaaaaaccctagtttaggataacaggtctgcctgcatttcttcaatcatgaattctgagtcctttgcttctttaaaacttgctccacacagtgtagtcaagccgactctccatacccaagcaagtcatccatggataaaaacgttaccagaagcagaaccattaagctggtccaggcaagttggactccaccatttcaacttccagctttctgtctaatgcctgtgtgccaatggcttgagttaggcttgctctttaggacttcagtagctattctcatccttccttggggacacaactgtccataaggtgctatccagagccacactgcatctgcacccagccccatacctcacaggagtcgacgtcgagcggccgcgaatttagtag

SEQ ID NO: 333 - DNA, 1886 bp, Homo sapiens
ggagaagaagccgagctgagcggatcctcacacgactgtgatccgattctttccagcggcttctgcaaccaagcgggtcttacccccggtcctccgcgtctccagtcctcgcacctggaaccccaacgtccccgagagtccccgaatccccgctcccaggctacctaagaggatgagcggtgctccgacggccggggcagccctgatgctctgcgccgccaccgccgtgctactgagcgctcagggcggacccgtgcagtccaagtcgccgcgctttgcgtcctgggacgagatgaatgtcctggcgcacggactcctgcagctcggccaggggctgcgcgaacacgcggagcgcacccgcagtcagctgagcgcgctggagcggcgcctgagcgcgtgcgggtccgcctgtcagggaaccgaggggtccaccgacctcccgttagcccctgagagccgggtggaccctgaggtccttcacagcctgcagacacaactcaaggctcagaacagcaggatccagcaactcttccacaaggtggcccagcagcagcggcacctggagaagcagcacctgcgaattcagcatctgcaaagccagtttggcctcctggaccacaagcacctagaccatgaggtggccaagcctgcccgaagaaagaggctgcccgagatggcccagccagttgacccggctcacaatgtcagccgcctgcaccggctgcccagggattgccaggagctgttccaggttggggagaggcagagtggactatttgaaatccagcctcaggggtctccgccatttttggtgaactgcaagatgacctcagatggaggctggacagtaattcagaggcgccacgatggctcagtggacttcaaccggccctgggaagcctacaaggcggggtttggggatccccacggcgagttctggctgggtctggagaaggtgcatagcatcacgggggaccgcaacagccgcctggccgtgcagctgcgggactgggatggcaacgccgagttgctgcagttctccgtgcacctgggtggcgaggacacggcctatagcctgcagctcactgcacccgtggccggccagctgggcgccaccaccgtcccacccagcggcctctccgtacccttctccacttgggaccaggatcacgacctccgcagggacaagaactgcgccaagagcctctctggaggctggtggtttggcacctgcagccattccaacctcaacggccagtacttccgctccatcccacagcagcggcagaagcttaagaagggaatcttctggaagacctggcggggccgctactacccgctgcaggccaccaccatgttgatccagcccatggcagcagaggcagcctcctagcgtcctggctgggcctggtcccaggcccacgaaagacggtgactcttggctctgcccgaggatgtggccgttccctgcctgggcaggggctccaaggaggggccatctggaaacttgtggacagagaagaagaccacgactggagaagccccctttctgagtgcaggggggctgcatgcgttgcctcctgagatcgaggctgcaggatatgctcagactctagaggcgtggaccaaggggcatggagcttcactccttgctggccagggagttggggactcagagggaccacttggggccagccagactggcctcaatggcggactcagtcacattgactgacggggaccagggcttgtgtgggtcgagagcgccctcatggtgctggtgctgttgtgtgtaggtcccctggggacacaagcaggcgccaatggtatctgggcggagctcacagagttcttggaataaaagcaacctcagaacaaaaaaaaaa

SEQ ID NO: 334 - DNA, 2635 bp, Homo sapiens
agatgctggggagcccctcactgccctgaccgactccgcagtccccggggaggagcatggatggtgtgtcggcagctccgtccttccagctgtcccgttgcagtgcccgtgatccgcgtctgccttagcaggggcctgcgtgagtgggcacggtgtgggaggtcgcctgcgtggggtggtgtctgtgtgtgtgcacgcacgcctgccatcaaagcagcagggctgagggggtgcagcttgctggtgttcactgggggagggcctgtgggcacacatggcagagagagtggctcacacgtcgtgaggtctcccctgtgctctggtgacccgaggaggtcgtgcagcacagcgcagaagcccctgcccacgggatccggccccccagacaccgaccccacaggccgtcccggatctcagcggacacaggcaggagcgccccatcatttgacggtgagcaggattcaggctgtgtgtcctggagctacttctcaccaactgtggtcagtgcagggggaacgaggaggtcttttgggggcctggcgaggggaagggctgctgcagtctagggagagggggtgcagcctgggggatgttggtggacatggatgtggaggtggaaggaggaggacgttgcgtggagtggtgggaggaggcgggagccgtgtgcgagagcaggtggaaagccttgaggggcaggaccaggatgcagctggcttgtagaagagctcaggagtgagcctggcactccagagggcgcggcgggtggggaggcagcaggcaccagtccaggagagcttcgtggacgtggctcctgcgcgcacacccccaggagcacagccacgggctgcaggtgtggctggcctcagcactcagtcctcacccggagcctttgcctgctcctccttccaagagcactgaggcaccagtgggcttggcactccaccttgggcttccttttcctggagagccgccttgagggtccctcctgtgactggggtctctgcagcgagagccgcgggggttgcggagcccctgcctgggggagctggcggaatgcgagccgccggccgggggccgccacataagacctgcaaggtggtgcctggggccctggctccttctcggctgcccctgcccacccagtaacagcccccaccagctacagagcccaggcgggtgccagccacgctgggagggcagaggacagacagccccggggctgcgacttggttctgtgtctactgttagaagttgagtgggaagctgcaggcccgccaggaccactgggtccctacagagcaaaggcctgcgtgttcccaaacagccgttgcccccgtggccgtggtaggtaatccatattggatgtcataaggaccagggggatatttaaagagagaaacagaaaatatatagagatataaaattatattcacagtttatctacagatttttcgtaacaatctttcttttccagtttgatactgtaaatctatcagagcagagccgggggcacgggcacaggtgggagttgggagcaaagcggaggcccgggctgcccgccgtcccccttcatctccccacggactgtaccaggcagctgggccccgcaggacaggccgcagcgggtggccggttctgtcccgtcttggggttcttggtgtccacgtcttgtgggccgtgggcttctacctgcccttggcctgcagtgctttgctggagaagggactccctggtccccagggtggacggagccgctgtcaccgcccagagctgggccggggaagcacggtgtgttctgcttttcttttcagattgttgaaatttcattgtcatgatttaatatatggatttttttatttaagaaaaagacgagggactctttgtcacgtgggtttgttttctgtctccgtgcctccggcttcccaaagagatccaggtctttgcgtttccagggcgtggggaccccggtccccctatgccgccacgccgccacaccgcctcaccctggcttctgtgctacttggcagttccatttcattatttattttttgtgctgctttttatcatgatataaattattgaaaacagatcacatgtgggcccgtgtctggccgccgccgccctgccccgtccctgcggccaccacctaatttattgccgtgcgtcctgctgctgtgactgcttttgtacctttgcaataaagaatattcttcctgggtgtccaaaagaacacacccacgcagaccaccacacaacaccaccgtcgacacacaacaccagacagaacacgcacaataacaaaaacgaacaaagagagaggggggcggcaaaaaaaataacccgcgggcgcgccgcaatagagcgcaaccccagtgttagagacaaaagaggagcccacaaaaagaggcagcacaaaaaaacaaaagaaagaggagcgggcaaaaaaacaccaggcggacggcagaaacacgctccacggaccactggagagggacacacaccgcggcggggggacaaacggcagaacaacccacacagaaaaaaacagcagggaacaaaacaaaacaggtagcgggggaaaccacaacactctccgggaacaagccgggaacgacaccaacacaccacaaccaaa

SEQ ID NO: 335 - DNA, 2452 bp, Homo sapiens
cggaggcggcgccgacggggactgctgaggcgcgcagagggtcggcggcgcccgggagcctgtcgctggcgcggtccgggcgggaggctcggcggcgggcggcagcatgtcggtggcggggctgaagaagcagttctacaaggcgagccagctggtcagtgagaaggtcggaggggccgaggggaccaagctggatgatgacttcaaagagatggagaagaaggtggatgtcaccagcaaggcggtgacagaagtgctggccaggaccatcgagtacctgcagcccaacccagcctcgcgggctaagctgaccatgctcaacacggtgtccaagatccggggccaggtgaagaaccccggctacccgcagtcggaggggcttctgggcgagtgcatgatccgccacgggaaggagctgggcggcgagtccaactttggtgacgcattgctggatgccggcgagtccatgaagcgcctggcagaggtgaaggactccctggacatcgaggtcaagcagaacttcattgaccccctccagaacctgtgcgagaaagacctgaaggagatccagcaccacctgaagaaactggagggccgccgcctggactttgactacaagaagaagcggcagggcaagatccccgatgaggagctacgccaggcgctggagaagttcgaggagtccaaggaggtggcagaaaccagcatgcacaacctcctggagactgacatcgagcaggtgagtcagctctcggccctggtggatgcacagctggactaccaccggcaggccgtgcagatcctggacgagctggcggagaagctcaagcgcaggatgcgggaagcttcctcacgccctaagcgggagtataagccgaagccccgggagccctttgaccttggagagcctgagcagtccaacgggggcttcccctgcaccacagcccccaagatcgcagcttcatcgtctttccgatcttccgacaagcccatccggacccctagccggagcatgccgcccctggaccagccgagctgcaaggcgctgtacgacttcgagcccgagaacgacggggagctgggcttccatgagggcgacgtcatcacgctgaccaaccagatcgatgagaactggtacgagggcatgctggacggccagtcgggcttcttcccgctcagctacgtggaggtgcttgtgcccctgccgcagtgactcacccgtgtccccgccccgcccctccgtccacactggccggcaccccctgctgggtctcctgcattccacggagcccctgctgccagggcggtgtctgagcctgccggcgccacctgggccccggcccttgaggtactccctgagcaggaccccacacttgggtgggggggcttatctgggtgggtggggatgcctgtttacactagcgctgactcccaacggtgacggctcccttccccactccatggcgccagcctcctcccccgctccccaacttctcgcccagctggccgaggcggggcaacactaaggtgctcttagaaacactaatgttcctctggggcagcccccacctccgtcctgacccgacgggggcccggcccactgcctaccctcgagtcccgcagccttaacaggatgggatcgagggtccccatggggtggctcagagataggaccctggttttaaatccctcccagcctggtgctggtgatgggccctggccctactccagggccaatgcacccccgcctcacacacgcactccttctcctcaaggccagggcagagggcctcaccgcctcccgggcctgctgtcagcttgcagcccggggacagaggccagctgggatctgcctgaggacagagaacatggtctcctgcagggccctgcctcccaagccccgccctcagaaagccaagtaccttttcagctttttaactgcccccatcccaacccagggaggcctgtgtcactctggcacaagctgccaccaccagccacccacacccaccccagcacacctcacacgggaccacagccgcgctgccgagggccaagcacaaaggttccagtgagcgcatgtcccagcccctggtggccaggctccccttgctgagccgctgccacttcaccctgtgggaagtggccccagccatctcctctagaccaaggcaggcagccccgacatctgcttcctctatcgcccaatgcaaaatcgatgaaatggggagttctctgggccaggccacattcacattcccctccccctgtggtccagtgaagcctccggaccccaggctctgctctgccctgccctgcacccccctcgtcagaagtacatgaggggcgcagagatgagcacacagctttgggcacggtccagggcaaactgaaatgtacgcctgaattttgtaaacagaagtattaaatgtctctttctacaaaaaaaaaa

SEQ ID NO: 336 - DNA, 3432 bp, Homo sapiens
ttttttttttttagcctaaaaaagcaactttattaatgtcctgcagcagcgtacattagtaattataacaatgcattaaaattttcatttcatgtcatagagaatcagttttcttcatgatgatacattatgttttactgagtgagtttgtccctccagagacctttctgggaacatgccttctccagggactgcttcctaagatgcccaggttgcttaccacaggtcatctttggtcatttaaaagcagtcaagctgtctggactgcaccctctcaactgaagttgagccaaattcccttctctcaaaccctaacgccgccatcactaagagaatgggcatctcggcttggtcagagcattactaacaagctaatgtgggattctctttggttatgaatttttatttttatttaagcatacaaaaaatacagctagaagtaggctcctgcattctaaaagcatttttaatcaacttaaactatgttcttggaaaattcaccacctggactggttcagtctgcccatttccctgtggaatctagtatcagtgttgtatttagcaaattcatttgagtgacgaacagtgactgatattcaggagccccgaggggtgggggcggccggcctgggcagacttagatgctgtccatagctttgaactcgctgagggcctgcaccgggttcacgtgcttcttctgagatgcccgtttaatcttggtctgtgtctcatcctgtttctctctcttcaccaatggctttttctctggtgccttcatcttccatgacacagcaggaaggttgagggaagccataccctgtgacttttggtatttggtagaggcgacgtaggatgccttcactgtctgcaccacagcattcatcaagttcttggctgcctggatcagggacatggcgctgtccaccccagagacaacaagctccccgccgagattctgcacctcggccttgaccttgctgcagatgttcagctggtggcagtagagggcgatgcgttgcaggtaggccagcaggtcctgcttgcaagccgagtcggggcaatggtctgcaatggtgcggccaagcttgtccatcctggatcctgcctcagcaattttcttggcagcactgatgacatccgatgtatttttgagtggtcctttacctcgggtaaagtctgtcatctccatcataatcatgcacatctgcttggccagcacaatgatgtcattgccactgtcgtcccatttggacacttcagcatccagcttgctcttttcttcctggaagctggccacctgttccgcaatcttcgctttttgctcctggggaagctgagccatgatcgcccgggcactctggccagctatcagctgatcgtcttctgtctggacgctcgtcctgcttctgacatcaaaatcttctgtctcaaagtcagagtcatccaactcctcaggggtccttatcatcagcactgctttcctgatgtcccggatgccatcatataccaggcgggaagcatcgataaactcattctcatccatgggctgggcagggtccgagctgagggcttccacggctgcttctacttgctcagtaaaacgtggcatgactgtgttggagagcagcttagtggcttccagaaccttctctgtgtagactcctggctcatagttgtccatctctgaggtgactacgtgaatgacccgggctgcccggcctcgaattgcaccagctgtgcggtccaggccatccacatccttctcttggagagcaatgacacatttgttcacatcttccaaaatgtgattctctgagacagccaagaagtcatcaatggaagtaatgtcatcgacagcatctgtgagaacacggacttgtttttcccattgttctttaaaaagatccatgttctcttgggccagtttactctgtggttttgctgctaaagccagtgcagcattaataacctgaggacagagggcttctaactggcttgcagacattcgaacaagctttacaccttcttcattatttgagatggaacaggccaagttggcaacctcaatcaatttgttggcatgttcacggaaaacttgggcatactccttaacttctttctcatttccattctttgcagcttcaatcaataccaaaagtggaacattggtttccaggaaagaatctgaaacgtggtccatgacagctttgcggagctgtctacgcaagtccctggtcttcttggtcattttatctattgcagaattgagtgcatcacttctttctttacgtccagcattgcccatgtactccgaaagcaggtcctgcagggcctggcggacagcattacactctgccacaattcgctcacgacggtcatcacgcgtgcaggacgagtcggccatcaaggcagccccactaatgatgctttccagacgctcctccagggaaggcctaaagcgctcctcgctgaagctcaaggggtccacaatgatttgtttgtcaaagttattgagtgcatatgccagttctcctcctcctccaccctggtgctgtgaggcatcgtctgaggcagtggcctgggctgcattggaaatgcctgtgaccgcctgctgcagctgcttgtatatcaggtccctgttggccttataggctgcgacatcagggtgctgtaggcatgcctgggatgcagtatagaggatcggaacgttcttctgcaggattcctctagctgcagccatctgatcacgatggccaacatctttcaattcctgttgtcttttggctgccataatgttcagcttatccacttcaggttttagggctttatactggattcctaagtcttgttcattgccagcattcctcaacttcaagataccatcttccacaactttcagctgaacaagtaatttgtagacatctgccatgtcagccaaaatcagcaaccgggtaacagcagagagcaaagctcgagctgcccgaaccatgttgcctcgcttcacagaagagcagggatcatctgcgaactctcctgcagcagccttcatcaaatcaccttgttttcgaacatcttctacagcagccacaagctcctccttgagaaactggctctccttcgcaattttatcccccttctccaagaaattctcagttgcttgttcaacagatgcagccaaaacatgggccttcttagaacgacctctcttcttattagagggccctttactattggtgtttacaagggttgtaacctgtgtaacaagaggctccaacagtctctcaactgccagagtcctgatctctagacttttaggatcccacttgaagtttatgttgcctgcatggacagcagtcatttctgcggctagctgggcgagcgctaaattccagaggcccgaagcagacgggcgctgctttgtctcctcgtgcc

SEQ ID NO: 337 - DNA, 437 bp, Homo sapiens
gatacgttccgcaattcccgggtcgacgacttcgtccgcctgggaacagacgagtccaagatcaatgcggctctgtgctcccggagccgggcccacctggtagcaggtttcaatgagtaccagagaatgacaggccgggacattgagaagagcatctgccgggagatgtccggggacctggaggagggcatgctggccgtgaagaaatgtctcaagaataccccagccttctttgcggtgaggctcaacaaggccatgtagtgggcaggaacaaaggagcggaccctgattcgcatcatggtgtctcgcagcgagatcgacctcctggacatcagatcagagtataagcggatgtacggcaagtcgctgtaccacgacatctcgggagatacttcaggggattaccggtagagtctgctgaagatctgtaggggcaa

SEQ ID NO: 338 - DNA, 1565 bp, Homo sapiens
tcaacgcctgcctcccctcgagcgtcctcagcgcagccgccgcccgcggagccagcacgaacgagcccagcaccggccggatggagcgtccgcaacccgacagcatgccccaggatttgtcagaggccctgaaggaggccaccaaggaggtgcacacccaggcagagaatgctgagttcatgaggaactttcagaagggccaggtgacccgagacggcttcaagctggtgatggcctccctgtaccacatctatgtggccctggaggaggagattgagcgcaacaaggagagcccagtcttcgcccctgtctacttcccagaagagctgcaccgcaaggctgccctggagcaggacctggccttctggtacgggccccgctggcaggaggtcatcccctacacaccagccatgcagcgctatgtgaagcggctccacgaggtggggcgcacagagcccgagctgctggtggcccacgcctacacccgctacctgggtgacctgtctgggggccaggtgctcaaaaagattgcccagaaagccctggacctgcccagctctggcgagggcctggccttcttcaccttccccaacattgccagtgccaccaagttcaagcagctctaccgctcccgcatgaactccctggagatgactcccgcagtcaggcagagggtgatagaagaggccaagactgcgttcctgctcaacatccagctctttgaggagttgcaggagctgctgacccatgacaccaaggaccagagcccctcacgggcaccagggcttcgccagcgggccagcaacaaagtgcaagattctgcccccgtggagactcccagagggaagcccccactcaacacccgctcccaggctccgcttctccgatgggtccttacactcagctttctggtggcgacagttgctgtagggctttatgccatgtgaatgcaggcatgctggctcccagggccatgaactttgtccggtggaaggccttctttctagagagggaattctcttggctggcttccttaccgtgggcactgaaggctttcagggcctccagccctctcactgtgtccctctctctggaaaggaggaaggagcctatggcatcttccccaacgaaaagcacatccaggcaatggcctaaacttcagagggggcgaagggatcagccctgcccttcagcatcctcagttcctgcagcagagcctggaagacaccctaatgtggcagctgtctcaaacctccaaaagccctgagtttcaagtatccttgttgacacggccatgaccactttccccgtgggccatggcaatttttacacaaacctgaaaagatgttgtgtcttgtgtttttgtcttatttttgttggagccactctgttcctggctcagcctcaaatgcagtatttttgttgtgttctgttgtttttatagcagggttggggtggtttttgagccatgcgtgggtggggagggaggtgtttaacggcactgtggccttggtctaacttttgtgtgaaataataaacaacattgtctgatagtaaaaaaaaaa

SEQ ID NO: 339 - DNA, 529 bp, Homo sapiens
catttttttgggtgagtgttttttggttcctgcgttgggattccgtgtacaatccatagacatctgacctcggcacttagcatcatcacagcaaactaactgtagcctttctctctttccctgtagaaacctctgcgccatgagagccaagtggaggaagaagcgaatgcgcaggctgaagcgcaaaagaagaaagatgaggcagaggtccaagtaaaccgctagcttgttgcaccgtggaggccacaggagcagaaacatggaatgccagacgctggggatgctggtacaagttgtgggactgcatgctactgtctagagcttgtctcaatggatctagaacttcatcgccctctgatcgccgatcacctctgagacccaccttgctcataaacaaaatgcccatgttggtcctctgccctggacctgtgacattctggactatttctgtgtttatttgtggccgagtgtaacaaccatataataaatcacctcttccgctgttttagctgaagaattaaaaaaaaaa

SEQ ID NO: 340 - DNA, 1858 bp, Homo sapiens
ttttttttttttgcagggtacattatttattttcacttgaacatggaaagaaagtgtcacactcccccttcccctttatagggggagtgtattttaatcagcaacctcttctccatccaccctgtgtatgtgtgtacacatataccaccacagttgggaggcatgactaggctgacccagtcttatctgttcctcctttgaagagggtttgacaaatgggaaaaaggaaggagccacatcaggcagaggtttcaagccatggaatggaggaaaggcggcagagaggagcagcaccagaggccaggagagagtggaaagggccacagcttgtttttaaaaaattctataatttggaagagggtggcgattaattttcaaaatacacttcagagtcccactttccacatagctcccttactcacagccctttggttttttagacaaaatttaagagctctcataaagccagaagtattgataactccttagtgcatccaaaaaaaagtgttcacatcaatcccttacaaagactatgtgctgtagactttgcttcttcctatacatttgtcttacggctcagtggtaaggtagctgtagagacacattacggggtaaatggaaaagggaaataaaggggaagcccaggcacatgggtgcagggaggggtgtgattggttggaagggtagagaacaaaccccagaacagtgtaagctccagaggtgggtgatgggaacagtccccaaagtgagaagagggaataggtcagggcaatgcttgcagcatcaagttcctcaggagtttctgtcggcccagctcatagtcctcctcgtctacatttaccagcagcttgatggcttcatggcccacagcttgcttgagggagtctgtgatgaagacacctttaagtgcctctaataaagagccattgatgtagtcacgccagaatgcatcgaggtaggtgagctcagagaacttgatgtcacagatgatggagcccaggtcccgggacttgaggatggtgttggcctggttaaagcgctcaaactggcgctcaagtgggtcctgcttgttagagaagacattgccctgcagagcagtctcatgctggcagtattcagcccgaacccgcagtctgatgtcacatgtctgcttctccttgggatctggtgtcactgacttccggcgttttcgctggctcccaagtgtggctctccctcgggctggccgcttgctacacatctgaggacccgaagtggggcaacacaccacaggatagtggggaggcactgttttagagggctggggaggccttggttctggatcactgagggctctgggggtcacatagcgaattgatgtctcctccagatacttgtctacaagatcagggcacacagcccgtctcctcttgagggtgacgtagggcagcaggtcgtggcgagtgatgatgcgcagcagctgcagcacctggcgaaagttactttcatcacagcggccctggcgctccagtgccaataagaagtcacgtccatttcggatgagtccacgctcgtggtcatcaatgacatcaacaaagaggaaagaaagcacgcgcacatctctgtgtgtcagatgagtgcccacgatgtcaaacatgcggtgcaggctgtacagcccatgttcctgctcaccatgctcttctggccacacctggcttgcccgccgctttaggcccgccatgctgggggctcaggtacgcaatgctttccagaatccctgctcagcagctgcaatccccaccgtactccgcaagaaacttaatttcccaggtctcttctctcggctcaggctcggcgccgccatgttggatccatccgc

SEQ ID NO: 341 - DNA, 1057 bp, Homo sapiens
ttttttttttttccaaaagccttgtttttatttatatagagtcctaaccacttcggtggtaggaggagtgggagaggctcctttttcaatccagggacctccatgatgttggtttgttgttaccaaacacacaggtaagtggcatcacggatctggtaaactaacgacaatgtttagtctctctctgctagagcaacaaggtgagcatcaatctctgcttctgtaagaatcctgaatttaggattttcaactgtcactactccaacttctatttctgaaggtttgaaatcaattgatagaacagtagacaggcatgtaattgcagtttccactgtctgttcaaatgtccaatcaaatttcttcttcactttttttttcaaggaagctggttgactcagtttgtttaactcccgctgcagtggctttaaacccacagtagtaacctgcaggatcacacttatatacctgagggccttgctcttcatctataccaattaaaatcatacaacaaccaagaggcctcatttcagcattctgtgtgtagacctgagaaatatcggcaattcttttacacagcatgtccacaggaatctcatagccatacttgtatttccagttagctgcctcatagcgtgccctctgtacctgggatctgctgtcagctgtcattccggtcatcacacaaccaatgttttcagttatcttgaataagtgagtcactgtgctggaatccaataatttgtcaggtactttcttctgtgtgacaattactgcacagtctttccctctgacagctactgatgtaaggccaccctggttaatagccttaaaagcatattctacttggtagagccgaccctcgggtgaaaaaatggtaatgtggcggtcaaaaccggcgctggaaccacgggacatgttggtagaagcactactttaaacacaatccctgggccccgtagctcccgcaccaggcacacaagcacctcccggaagttgcagcgactgcttccggggtaccagccgcgtttcttccgctcttgcatgccgaactcccgct

SEQ ID NO: 342 - DNA, 1438 bp, Homo sapiens
ctgggaatatgattatgcttaatctatgctcagtcgaaaggggctggggctgctttctcccctcccttcttgactctctgttcacagaactcaggctgcctccagccagcctttgcccgctagactcactggccctgagcacttgaaggtgcagcaagtcactgagaatgagcactttcttctcggacacagcatggatctgcctggctgtccccacagtactatgtgggacagtattttgcaaatacaagaagagctcagggcagctgtggagctggatggtctgcctggcaggcctctgtgcagtctgcctgctcatcctgtcccctttttggggcttgatcctcttctcggtgtcatgcttcctcatgtatacttacttatctggccaagaattgttacctgtggatcagaaggcagtcctggtgacaggtggtgattgcgggcttggccatgctttgtgcaagtatctggatgagctgggcttcacggtatttgccggagttttgaatgaaaatggcccaggagctgaggaattgcgaagaacctgctctccgcgcctctcggtgctccaaatggacatcacgaagccagtgcagataaaagatgcttacagcaaggttgcagcaatgctgcaggacagaggactgtgggctgtgatcaacaatgctggggtgcttggctttccaactgatggggagcttcttcttatgactgactacaaacaatgcatggccgtgaacttctttggaactgtggaggtcacaaagacgtttttgcctcttcttagaaaatccaaagggaggctggtgaatgtcagcagcatgggaggaggggccccaatggaaaggctggcatcttatggctcatcaaaggcggctgtgaccatgttctcatcagttatgagactggagctttccaagtggggaattaaagttgcttccatccaacctggaggcttcctaacaaatatcgcaggcaccagtgacaagtgggaaaagctggagaaggacattctggaccacctccccgctgaggtacaggaagactacggccaggactacatcttagcacagcggaatttcctcctattgatcaactcgttagccagcaaggacttctctccggtgctgcgggacatccagcatgctatcttggcgaagagcccttttgcctattacacgccagggaaaggcgcttacttgtggatctgccttgctcactatttgcctattggcatatatgattactttgctaaaagacattttggccaagacaagcccatgcccagagctctaagaatgcctaactacaagaaaaaggccacctaggcaatggaagccctcaaagaagtcggaatgtcatagtcttgaaatgaaagggaaactgggaaactgggtttctcattaaagttgtttcccactctgtaaaaaaaaaa

SEQ ID NO: 343 - DNA, 1089 bp, Homo sapiens
caaagcgcagattgtgggcggctgtgtcagctgacccaaggggccttcgaggtgccttaggccgcttgccttgctctcagaatcgctgccgccatggctagtcagtctcaggggattcagcagctgctgcaggccgagaagcgggcagccgagaaggtgtccgaggcccgcaaaagaaagaaccggaggctgaagcaggccaaagaagaagctcaggctgaaattgaacagtaccgcctgcagagggagaaagaattcaaggccaaggaagctgcggcattgggatcccgtggcagttgcagcactgaagtggagaaggagacccaggagaagatgaccatcctccagacatacttccggcagaacagggatgaagtcttggacaacctcttggcttttgtctgtgacattcggccagaaatccatgaaaactaccgcataaatggatagaagagagaagcacctgtgctgtggagtggcattttagatgccctcacgaatatgaagcttagcacagctctagttacattcttatgatatggcattaaattatttccatatattatataataggtccttccactttttggagagtagcaaatctagcttttttgtacagacttagaaattatctaaagatttcatctttttacctcatatttcttaggaatttaatggttatatgttgtctttttttcctatgtcttttggctcaagcaacatgtatatcagtgttgactttttctttcttagatctagtttaaaaaaaaaaaaaaccacataacaattctttgaagaaaggaagggattaaataatttttttccctaacactttcttgaaggtcaggggctttatctatgaaaaagtagtaaatagttctttgtaacctgtgtgaagcagcagccagccttaaagtagtccattcttgctaatggttagaacagtgaatactagtggaattgtttgggctgcttttagtttctcttaatcaaaattactagatgatagaattcaagaacttgttacatgtattacttggtgtatcgataatcatttaaaagtaaagactctgtcatgcaaaaaaaaaa

SEQ ID NO: 344 - DNA, 1315 bp, Homo sapiens
tgggactagcgaaatctgtctgcactgatcgcagtcgtcctcagtttcaccctctaggaatcggcctgggggtgcacgtgctactctcttcctccaggccggtccccggcgcgtgcgcgcgatccatgtccatgtccgcgcctatcaataaagttgctcacttgttgccggcccgctagcccgaaaggttgcgcgcgcagaccgagaagtctcgcgatagccagccgcggctgcccttgcgcttcccgagctggcggggtccgtggtgcgggatcgagattgcgggctatggcgccgaaggtttttcgtcagtactgggatatccccgatggcaccgattgccaccgcaaagcctacagcaccaccagtattgccagcgtcgctggcctgaccgccgctgcctacagagtcacactcaatcctccgggcaccttccttgaaggagtggctaaggttggacaatacacgttcactgcagctgctgtcggggccgtgtttggcctcaccacctgcatcagcgcccatgtccgcgagaagcccgacgaccccctgaactacttcctcggtggctgcgccggaggcctgactctgggagcacgcacgcacaactacgggattggcgccgccgcctgcgtgtactttggcatagcggcctccctggtcaagatgggccggctggagggctgggaggtgtttgcaaaacccaaggtgtgagccctgtgcctgccgggacctccagcctgcagaatgcgtccagaaataaattctgtgtctgtgtgtgaaacacacaaccactccccacacaccacacaccacaaacactcacacacccacacccaccgcacgcccacctcacacttctccggccggccgcacaacacacacatctcttagctacgcgccccatcgggcaccacacccttctcacacacccccccttttttgcacacaggggggcaaaatctgacgccgggccccccactatggcgggcagccacatatacctcgcaatagaccagaggtacacgtggatatggaacgactgggacacccctgctccgcccaggctacacgacactccactcacactacttcctcttgtgctcttcttcgcactctatacccctcctgaccaccactccactacgcttcccaccacctcgtcccccctcacaccccactcccgccctcccaccctcctctcacctacggatggctaggctctgacttcaccactagctaccactatctcacgacggctctccgctctcacactccccgccgccaccacccagcacccacccacccccggcag

SEQ ID NO: 345 - DNA, 4109 bp, Homo sapiens
cagctgccagccgaggaggcgcggcggagaggggactgcggtcagctgcgtccacttggggctgtgcggcggtcccgcgcccggcgatgttcccgggcactccctgagtagcggcagcttatcccccgcccgctagcccgccctggtccccggctcgctcgctggctggcgcggccccggccccgctctgcgtcggccccgccgcggtggaggcgcgcgagggggacgcggccggggatgagcggattgcgggtgaactcgccgcccgggggccccgcgaagccgtgagccgctgcttttctccgagtcgccgccctgcccttggatttgagatcatgtccatccacatcgtggcgctggggaacgagggggacacattccaccaggacaaccggccgtcggggcttatccgcacttacctggggagaagccctctggtctccggggacgagagcagcttgttgctgaacgcggccagcacggtcgcgcgtccggtgttcaccgagtatcaggccagtgcgtttgggaatgtcaagctggtggtccacgactgtcccgtctgggacatatttgacagtgattggtacacttctcgaaatctaattgggggcgctgacatcattgtgatcaaatacaacgttaatgacaagttttcattccatgaagtaaaggataattatattccagtgataaaaagagcattaaattcagttccagtaattattgctgctgttggtaccagacaaaatgaagagttaccttgtacatgcccactatgtacctcagacagagggagctgtgttagtacaactgaagggatccaacttgcaaaagaactaggagcaacctatcttgaactccacagccttgatgacttctacataggaaagtattttggaggagtgttggagtattttatgattcaagccttaaatcagaagacaagtgaaaaaatgaagaaaagaaaaatgagcaactcctttcatggaattagaccacctcaacttgaacaaccagaaaaaatgcctgtcttaaaggctgaagcgtcacattataactctgacttaaataacttgctgttctgctgccagtgtgtggacgtggtattttataaccccgatttaaagaaagttgtagaggcccacaagatcgttctctgcgctgtaagccatgttttcatgctgcttttcaatgtgaagagtcccactgacattcaggattccagtatcatccgaactacccaggatctttttgctataaacagagatactgcatttccaggtgctagccatgaatcttcaggcaacccaccattacgagtcattgttaaagacgccctcttctgttcttgtttatcagacatccttcgcttcatttattcaggtgcttttcagtgggaagaattggaagaagatatcaggaagaagttgaaagattctggggatgtttcaaatgtaatcgagaaagttaaatgcattttaaaaacaccaggaaagattaattgcctaaggaattgcaaaacctatcaagccagaaaacctttgtggttttataacacttccctcaagtttttccttaataagccgatgcttgccgatgttgtcttcgaaattcaaggtacgacagtgccagcccacagggccatcctggtggcccgttgtgaagtgatggcagccatgtttaatggtaattacatggaagcaaagagtgtcctgattcccgtttatggtgtttccaaagagactttcttgtcatttttagaatacctgtacacagactcctgctgcccagctggcatattccaggccatgtgtctcctgatctgtgccgagatgtaccaagtgtccagactgcagcacatctgtgagctgttcatcattacccagctgcagagcatgccaagcagggaactggcatccatgaaccttgatatagttgacctgcttaaaaaggccaagtttcaccactctgattgcctttcaacctggctacttcatttcattgctactaactacctcatcttcagtcaaaagcctgaatttcaggatctttcagtggaagaacgcagttttgttgaaaagcacagatggccgtcgaatatgtacttgaagcagcttgcggaatacaggaagtatattcactcccggaaatgtcgttgcttagtaatgtaacctggagcttttatacactacatttcttttttattattatgaagaatgggatacctccaggttccagtaaaattcttctgaccgaaaccaatgtgggtgttagaaaaattaccatatagcttaatatgtttattagttctctttggaaaaaaactaccactgtggtcttaaaagggaacaaaatataccataggctaaaactaaggctttcactctagaatgcaaagctgttttgcagctgttttcccttaaagatgtcctgttgctttagtgatatttagacccctctcagttaagaaatgcttagattaaaaaaaaaaaattacgtaggattaatacagaaatttaatcatgtctgattaattgctctatgaaaataaggggcatttaaagacccagcataaccatttgtataatgagaaatctaggggaaaaccaatcagtccaacatgagattttaggaatagaaatttgccggccatttggaaagtgaaatgccacttagttctcaattgatgacagtgtttgaatcatcataaaaaaaatacctgcttttcatctggacaacccaattgagccactttatctccttttggcaatctgagtaggcggggaacctaggcagggctggctttcttagcgtgtaacttgtgtagcagcacagggcccacacttagaaggaccccacacttggttcaaggctctgctatagcggaaattcttaataatgtttgaagaagggccccatgatttcattttgtgctgagccctcaaaattatgtctgtttcgtggtgggaaatatcctatgttttcttgctcaaacacctttctctctgaaagcagaaaaaggcactgatataaagggaagagaaggaggctcaccggagggaagagaacatagtgaagattcccgcctttggggaggtctggaccacccagggcctccactgccaccttggctggcaagggagaaatgtgttgtgttgtcttagctttaaaacagtcacagttcttgctctatcatagatgaacaaatactttcttgatcattctgtaagaccaggaggttggtaagagtgactaaccagcctaactttaatacacatgtataaagatgttcacagagaaagatgctctgtagagaatttgctaccgaagttggctcaagaatttgtttttagtgttatttaccaagattaggacgtcagtggcttaaattctttgaattcttttcaaggactgcaagattatttgataaagagtagcatgaatcttgtgctctaatattacacagtaagttcaaagaaaggatgtaagtcaaagacttgttacatagagggaaaatggactgggatagaggacagactgatagtttctttctttcatatcacatgtatagagaaataattatatcagaaactcacaaacctagacatggaaaaacagattactgtctattgtcagcatcattttcatctgtaagtcactactggaatatatttttcttttaatttccagtgactttagaatacacgcagtttttccgacttttcaaaaatttgattaaatggttttatagtataatattgggaccccataccgttagcccttgtatgtataccaacactgccaaagtaaaacattaggtcaggcatggtggctcaggcctgtaatcccagcattttgggaggctgaggcaagtggataacttgaggtcatgagttcgaaaccagcctggccaaaacagtgaaaccccgtctctactaaaaatacaaaattagccagatgtggtggcgcacacctgtaatcccagctactcaggaagctgaggcaggaaaatcgcttgaacctgggaggtggaagttgcagtgagccgagatcgcaccactgcactccagcctgggtgacaagagcgaaactccatctcaaaaaaaaaa

SEQ ID NO: 346 - DNA, 2601 bp, Homo sapiens
ccgacatcggttggattacaggacacagctacgtggtgtatgggcctctctgcaatggtgccaccagcgtcctttttgagagcaccccagtttatcccaatgctggtcggtactgggagacagtagagaggttgaagatcaatcagttctatggcgccccaacggctgtccggctgttgctgaaatacggtgatgcctgggtgaagaagtatgatcgctcctccctgcggaccctggggtcagtgggagagcccatcaactgtgaggcctgggagtggcttcacagggtggtgggggacagcaggtgcacgctggtggacacctggtggcagacagaaacaggtggcatctgcatcgcaccacggccctcggaagaaggggcggaaatcctccctgccatggcgatgaggcccttctttggcatcgtccccgtcctcatggatgagaagggcagcgtcgtggagggcagcaacgtctccggggccctgtgcatctcccaggcctggccgggcatggccaggaccatctatggcgaccaccagcgatttgtggacgcctacttcaaggcctacccaggctattacttcactggagacggggcttaccgaactgagggcggctattaccagatcacagggcggatggatgatgtcatcaacatcagtggccaccggctggggaccgcagagattgaggacgccatcgccgaccaccctgcagtaccagaaagtgctgtcattggctacccccacgacatcaaaggagaagctgcctttgccttcattgtggtgaaagatagtgcgggtgactcagatgtggtggtgcaggagctcaagtccatggtggccaccaagatcgccaaatatgctgtgcctgatgagatcctggtggtgaaacgtcttccaaaaaccaggtctgggaaggtcatgcggcggctcctgaggaagatcatcactagtgaggcccaggagctgggagacactaccaccttggaggaccccagcatcatcgcagagatcctgagtgtctaccagaagtgcaaggacaagcaggctgctgctaagtgagctggcaccttgtggggctcttgggatgggcgggcacccaagccctggcttgtccttcccagaaggtacccctgaggttggcgtcttcctacgtcccagaagcagcccccaccccacacatgacccacaccgccctcacgtgaagctgggctgagagccctttctcccatccattggaggtcccaggagtgtcacccatggagaggctatgcgacatggctagggctggttctgccatctgagtttggtttcctggaatgaaaaggcattgccatctccattcctctgccctcttgagccagcacaggaaggtgaggccctgggatagcgcgcctgctcagataacacagagctagttagctagtagcaaccgtgttttctccagatctgtctagatacaaaggtcagaaatcttatttttatacttttatattgtggaagaacagcatgcaacactcacatgtagtgtgtggatttacttgaacatgttctttttaacatgtagttatgaaaatctccttttttgcctctactggtgaggaaacatgaggatcagaggccacatttttaattattgttagtgtatttggaagtctgaattggagatgtttgtacctctgtctaaacagttcccttgagaacttccaagcctccggcatcttttcctggtgagtgtttctcctgtgcttggttgtgtataatggagctaactcctaagcggtggggtgaatgtggccgccttagttctgaagctactccagttatgttctgtttcttcaagctgtgatccagaaagatttttgtgcccccagatgcctcttgataggagaggcaacatactccaaatagttgggttcttcagggaagctattagaaactcaggtgacttgttagagcactaacttggtcagagccaaatcctggcaaacgctgcctgaccttcactctgtggttggggcagtgagaaccactgaggtccaatgatgagacttggaggtctggatccagtctctctttgttttaatgtgacttaggtgctgtcaacattagcaagataatggaaatcacgacgccagtgggtgcttacctccctgctaggcatgcaggggctggcggttggcaggggaaggaggcccagtgagccgggtcccttaggggagggagagtttgtcctctttgccccacagtctacccttcagggccttgtggcagtgccagtgttcggggggtgtctgggccactgagtacccactcggtcgtggttgtgctggcctcttgggtgagtgaacctgtgaagcccaggaggtggtgttggctgcagggtacacaaatactgagtggtggtcttttgttacaggcttagcaacaaagctgtgccctgggcatggggggctgtagtgtagctacagttgtgcgtttgtgaaatggcttagctttccatgttgctgagaggaacctggacatggtcccgggcatctgaatgatctgtaggggagggagttcaaataaagctttattttgttcaaaaaaaaaa

SEQ ID NO: 347 - DNA, 4500 bp, Homo sapiens
cacgcgtccgcgagtagcggagcgggacccgctgatgctcaccccatttagagaaagaaatccacctccccaaccccaatcaagaacctgctattgtatatcatcatagagccagattacctagggaatcatcatccagggacgtgccagaaaccacaagaaaacatggggagggttttcctcacgggagaaaaagccaattccatattaaaacgctacccaagagctaatgggttttttgaagaaataagacagggcaacattgagcgtgagtgcaaagaagaattctgtacatttgaagaagcaagagaagcttttgaaaataatgaaaaaactaaggagttttggagcacctacacaaaagcgcaacaaggggagagtaaccgaggaagtgactggtttcagttttaccttacctttccgttaatctttggcctcttcattatcctccttgtcattttcctaatctggagatgcttcctaagaaacaaaactcgtagacagacagtgactgaaggccacattcctttccctcagcaccttaatattatcaccccaccccccccaccagatgaagtgtttgacagcagtggattgtctccaggctttctgggatatgtagttgggcgctcagattccgtctctactcgcctgtccaattgtgatcccccgccaacctatgaggaagccactggccaagtgaacctgcagaggagtgaaacagaacctcatttagacccacccccagagtatgaggacatagtcaactccaactcagccagtgccattcctatggtgcctgtggtcaccaccatcaaatgaagctgcaaacttctttttactctaatcatttttaaaatactaatggaagaactttctagcactttaccactacataaatgttcattgacttattttattggactcttaccgcataccacttcacacttgttttattttctttagttttgtttcttgttatagaatcattatccatgctcatttttgctaggggaaatatatgaagagggaaaacatactaatgggggtctttctgtgatgtgatgagacatacatgtaagtgtatatatgtgtgtataggcatatatacgtgtgtatgcatcaacacagtatatgtaaaactgtcttaaaaatccattaacttctacctaaatcacctggaaggagagcattactcaccaaaattgcaaaacaagggtatcaagaatttgtgtaatagccagtgacatgctgtagatttttgcaaactggatgtacttagcatgttttctaattctgactggcttttgttaacttgataattcttcatctaccttaaaaagaaaaaaattacacatagtcattcttgatgttataaatagagaaaaagtgtgtgtgagcaataatgcataagctactgataacttgcttacagcagatagcaataaggtatttggtggcattcggcttgttttgtaatagggattttttttttggttgaccactcccccacacttccaaaattaaacagtgttttcttagcatcttgaatatctcctgcggtgtatattaacatcttgatgagacagatttccaggcaacaaaataatttctaaaatggatatatgtgtggattaatgacaggcagtaaatacccattactcctttactcatagctggtaaaattattcccactgttttattgccttttactgtacgttctacactctgtcctactcccacagaattttcaagcccttaagagtttagttaaaataaaatttttgaaattattgtcttaatatttttatataggctgatgtctttgcctcaagattgttaggaggtaattttccattgaattatcaactgtgatttttatattgccctccaagtggtagaagaagattgcaaagtccatgttatgctaggtgcacaataaatctagtaatagccccacacagatctcatcattgttgctacttccttttgtattttcatcaggtatttttttaactgtagggtttttacttttttcttggagcagagagaacaggctgtaaatgggttgccaacataagctggctgagaaataaaagaaaacaagacagttgttcataaagtttcattttgtatgcactgatggcaaattcattaggtcagttaagggaaatatttgtaccacttccaaacttttcagcgttggataaaatgattgatgaggcaggcagaaggaatgtaggtttcaggtgtgtcatttcctgctgcttccagctccatccctacagactcctccccgagtcctgccctggaaccaaaggaaggaggaacactgaggggaatcctgaagtaggagtcagatgacctgaactcagatctccctctatcacatgcttgccaccactgtaccttgagcaagaatcatatctgaccctcaacctcctcaactctaaaatggggataacatcatttgtcctgcacttctctaagggctttacaaggatcaaataagatggtgtgtatgtaagaaatttgtaaaatgtgaagagctatctacactaagttcgtaatgttattattattgtgcttcatggagaattttcccctctgttttcctaaattgtatgagagctttcacacagtgagaaatagagcaggctgccccataaatgggtaacatattcctaatctgagtgtgtgggctgttagagaacccctgccatgctctggtctgttctgaaactgtgccaactgaaagatgatagtccacacagcacaaacaggtttaagcaaatgatagaaagggaagtaaggcgtgtgtgctagttaataggtttagtagcttttatggactaaaaatgattgattgtatcttgaccctggtctcagaaatgacatttttacttttgccatgagtacacatcagatatctttggcttctatttaaagctaaaggtagaagtgtttgatccagtgaactgtgtatgtatgtgtggggtttttttctttatttttaaatgaaaattaagacaccttttgtgtggacatgtttttgtctttaatgtcaggctttagattagaccagcagttttcaaagtatggccaatggacccctgggttccttgagagcctttcaggggggactatgagatcaaaatatttttattataatgtgaagacattgtcttttcactctatctcaaaaaaagtgttgcaaatgtaaaacattgccatcttctcacaaatctctttttttgtttttgaaaatatggccatttttcataaaatgttatttgtgttagcatgtaatgggtttactatgtttaaataagttaatactttaaaaattttcaggtttttttagtatggtgaatattgatagatataaacctcatgaacaaaagtactttggcatccagattctcaataaatgttaagagcgtaagtgtaagggggtccagagaccaaaagttttagagctacaggattagacataggagcaggatattctgttagtgtgatttcttgcaactttattttatattttaaactgctgatattggatataatgctgctttttagagacacctaaattgcagtatcagaatgaatgttgatgtttgaagccaaaaagccaaatgcttaaactgatcaatgactgtagctttttagactgttggtcaaagaacattctacttcacagtaatagctctatcagccacagatctcatggtggctgttgcatgataatgataggataaacaaaataccactgtcttcaagaaacattatcttaggtttgtttgtttggtttgagtttgatttggcttttatattttttaaaatcccttttgctaccccatctggttttataaactgagtttcttagcattcgttaaaattaaggggtttgtttggaataatatatattttttatgcttttgtctttcttacctgattgatattacattcacctttgattgttttttaaaagtttatttttacagaatatatttagtacctttcttaaggagtaactgaattgaatcaaccagtttgcatttaaataaaagaacaggctcagtggtcttcctgtagaatggtttacatgcctgcatgtgcagtagttgtgtctggaatcctagaattggcactttctgcctccttgctctaaatgtcacaaaaaattatacttccttaaagtaaatgtaatgatttcttcttttcctattgaccagtacagatagatatgttgtgtttgcttcatttttaatgatgacttcaagattgatgatgtgatccaataactgtggaggtagctttaacttggttctgtgtaaatagtatgtattttattataatatttctcattttaagatgcttggtttacattaaattatggtatttaactatttttatgtttatactaggtagggtctttcttatgtttctgtgtttttggtatgctaaataaagctatttttaaacccaaaaaaaaaa

SEQ ID NO: 348 - DNA, 2283 bp, Homo sapiens
ggcacgaggcgggggcggtgcatgacgcgcctcgggggcggtcctcgggcgcgcaccgctctcttacactcgggcctcagaagtccgtgccagtgaccggaggcggcggcggcgagcggttccttgtgggctagaagaatcctgcaaaaatgtctctctatccatctctcgaagacttgaaggtagacaaagtaattcaggctcaaactgctttttctgcaaaccctgccaatccagcaattttgtcagaagcttctgctcctatccctcacgatggaaatctctatcccagactgtatccagagctctctcaatacatggggctgagtttaaatgaagaagaaatacgtgcaaatgtggccgtggtttctggtgcaccacttcaggggcagttggtagcaagaccttccagtataaactatatggtggctcctgtaactggtaatgatgttggaattcgtagagcagaaattaagcaagggattcgtgaagtcattttgtgtaaggatcaagatggaaaaattggactcaggcttaaatcaatagataatggtatatttgttcagctagtccaggctaattctccagcctcattggttggtctgagatttggggaccaagtacttcagatcaatggtgaaaactgtgcaggatggagctctgataaagcgcacaaggtgctcaaacaggcttttggagagaagattaccatgaccattcgtgacaggccctttgaacggacgattaccatgcataaggatagcactggacatgttggttttatctttaaaaatggaaaaataacatccatagtgaaagatagctctgcagccagaaatggtcttctcacggaacataacatctgtgaaatcaatggacagaatgtcattggattgaaggactctcaaattgcagacatactgtcaacatctgggactgtagttactattacaatcatgcctgcttttatctttgaacatattattaagcggatggcaccaagcattatgaaaagcctaatggaccacaccattcctgaggtttaaaattcacggcaccatggaaatgtagctgaacgtctccagtttccttctttggcaacttctgtattatgcacgtgaagccttcccggagccagcgagcatatgctgcatgaggacctttctatcttacattatggctgggaatcttactctttcatctgataccttgttcagatttcaaaatagttgtagccttatcctggttttacagatgtgaaactttcaagagatttactgactttcctagaatagtttctctactggaaacctgatgcttttataagccattgtgattaggatgactgttacaggcttagctttgtgtgaaaaccagtcacctttctcctaggtaatgagtagtgctgttcatattactttagttctatagcatacttgcatctttaacatgctatcatagtacatttagaatgattgcctttgattttttttttaaattctgtgtgtgtgtgtgtaaaatgccaattaagaacactggtttcattccatgtaagcattaaacagtgtatgtaggtttcaagagattgtgatgattcttaaattttaactaccttcacttaatatgcttgaactgtcgccttaactatgttaagcatctagactaaaagccaaaatataattattgctgcctttctaaaaacccaaaatgtagttctctattaacctgaaatgtacactagcccagaacagtttaatggtacttactgagctatagcatagctgcttagttgtttttgagattttttagtcaacacataatggaaacttctttcttctaaaagttgccagtgccacttttaagaagtgaatcactatatgtgatgtaaaagttattacactaaacaggataaacttttgactccccttttgttcatttgtggattaagtggtataatacttaattttggcatttgactcttaagattatgtaacctagctactttgggatggtcttagaatatttttctgataacttgttccttttcctgactcctccttgcaaacaaaatgatagttgacactttatcgcggaatgttggacttctatggggggtacagtctaatcctaattacctatgtctcccttcacgttcaccttctagtctggccaacaacgaaaagagcaaaaacagcagaaaacacacagacagacaaacacaaggggggcacgagcaccagcaagaaacaacactatatcggcgagcaccgccacacagacagt

SEQ ID NO: 349 - DNA, 3955 bp, Homo sapiens
cgtccacccgcccagggagagtcagacctgggggggcgagggccccccaaactcagttcggatcctacccgagtgaggcggcgccatggagctccgggtgctgctctgctgggcttcgttggccgcagctttggaagagaccctgctgaacacaaaattggaaactgctgatctgaagtgggtgacattccctcaggtggacgggcagtgggaggaactgagcggcctggatgaggaacagcacagcgtgcgcacctacgaagtgtgtgaagtgcagcgtgccccgggccaggcccactggcttcgcacaggttgggtcccacggcggggcgccgtccacgtgtacgccacgctgcgcttcaccatgctcgagtgcctgtccctgcctcgggctgggcgctcctgcaaggagaccttcaccgtcttctactatgagagcgatgcggacacggccacggccctcacgccagcctggatggagaacccctacatcaaggtggacacggtggccgcggagcatctcacccggaagcgccctggggccgaggccaccgggaaggtgaatgtcaagacgctgcgtctgggaccgctcagcaaggctggcttctacctggccttccaggaccagggtgcctgcatggccctgctatccctgcacctcttctacaaaaagtgcgcccagctgactgtgaacctgactcgattcccggagactgtgcctcgggagctggttgtgcccgtggccggtagctgcgtggtggatgccgtccccgcccctggccccagccccagcctctactgccgtgaggatggccagtgggccgaacagccggtcacgggctgcagctgtgctccggggttcgaggcagctgaggggaacaccaagtgccgagcctgtgcccagggcaccttcaagcccctgtcaggagaagggtcctgccagccatgcccagccaatagccactctaacaccattggatcagccgtctgccagtgccgcgtcgggtacttccgggcacgcacagacccccggggtgcaccctgcaccacccctccttcggctccgcggagcgtggtttcccgcctgaacggctcctccctgcacctggaatggagtgcccccctggagtctggtggccgagaggacctcacctacgccctccgctgccgggagtgccgacccggaggctcctgtgcgccctgcgggggagacctgacttttgaccccggcccccgggacctggtggagccctgggtggtggttcgagggctacgtccggacttcacctatacctttgaggtcactgcattgaacggggtatcctccttagccacggggcccgtcccatttgagcctgtcaatgtcaccactgaccgagaggtacctcctgcagtgtctgacatccgggtgacgcggtcctcacccagcagcttgagcctggcctgggctgttccccgggcacccagtggggcgtggctggactacgaggtcaaataccatgagaagggcgccgagggtcccagcagcgtgcggttcctgaagacgtcagaaaaccgggcagagctgcgggggctgaagcggggagccagctacctggtgcaggtacgggcgcgctctgaggccggctacgggcccttcggccaggaacatcacagccagacccaactggatgagagcgagggctggcgggagcagctggccctgattgcgggcacggcagtcgtgggtgtggtcctggtcctggtggtcattgtggtcgcagttctctgcctcaggaagcagagcaatgggagagaagcagaatattcggacaaacacggacagtatctcatcggacatggtactaaggtctacatcgaccccttcacttatgaagaccctaatgaggctgtgagggaatttgcaaaagagatcgatgtctcctacgtcaagattgaagaggtgattggtgcaggtgagtttggcgaggtgtgccgggggcggctcaaggccccagggaagaaggagagctgtgtggcaatcaagaccctgaagggtggctacacggagcggcagcggcgtgagtttctgagcgaggcctccatcatgggccagttcgagcaccccaatatcatccgcctggagggcgtggtcaccaacagcatgcccgtcatgattctcacagagttcatggagaacggcgccctggactccttcctgcggctaaacgacggacagttcacagtcatccagctcgtgggcatgctgcggggcatcgcctcgggcatgcggtaccttgccgagatgagctacgtccaccgagacctggctgctcgcaacatcctagtcaacagcaacctcgtctgcaaagtgtctgactttggcctttcccgattcctggaggagaactcttccgatcccacctacacgagctccctgggaggaaagattcccatccgatggactgccccggaggccattgccttccggaagttcacttccgccagtgatgcctggagttacgggattgtgatgtgggaggtgatgtcatttggggagaggccgtactgggacatgagcaatcaggacgtgatcaatgccattgaacaggactaccggctgcccccgcccccagactgtcccacctccctccaccagctcatgctggactgttggcagaaagaccggaatgcccggccccgcttcccccaggtggtcagcgccctggacaagatgatccggaaccccgccagcctcaaaatcgtggcccgggagaatggcggggcctcacaccctctcctggaccagcggcagcctcactactcagcttttggctctgtgggcgagtggcttcgggccatcaaaatgggaagatacgaagaaagtttcgcagccgctggctttggctccttcgagctggtcagccagatctctgctgaggacctgctccgaatcggagtcactctggcgggacaccagaagaaaatcttggccagtgtccagcacatgaagtcccaggccaagccgggaaccccgggtgggacaggaggaccggccccgcagtactgacctgcaggaactccccaccccagggacaccgcctccccattttccggggcagagtggggactcacagaggcccccagccctgtgccccgctggattgcactttgagcccgtggggtgaggagttggcaatttggagagacaggatttgggggttctgccataataggaggggaaaatcaccccccagccacctcggggaactccagaccaagggtgagggcgcctttccctcaggactgggtgtgaccagaggaaaaggaagtgcccaacatctcccagcctccccaggtgcccccctcaccttgatgggtgcgttcccgcagaccaaagagagtgtgactcccttgccagctccagagtgggggggctgtcccagggggcaagaaggggtgtcagggcccagtgacaaaatcattggggtttgtagtcccaacttgctgctgtcaccaccaaactcaatcatttttttcccttgtaaatgcccctcccccagctgctgccttcatattgaaggtttttgagttttgtttttggtcttaatttttctccccgttccctttttgtttcttcgttttgtttttctaccgtccttgtcataactttgtgttggagggaacctgtttcactatggcctcctttgcccaagttgaaacaggggcccatcatcatgtctgtttccagaacagtgccttggtcatcccacatccccggaccccgcctgggacccccaagctgtgtcctatgaaggggtgtggggtgaggtagtgaaaagggcggtagttggtggtggaacccagaaacggacgccggtgcttggaggggttcttaaattatatttaaaaaagtaactttttgtataaataaaagaaaatgggacgtgtcccagctccaggggtaaaaaaaaaa

SEQ ID NO: 350 - DNA, 4417 bp, Homo sapiens
aggaggaggagggtgagagagaagctgggagagcagagaaaaggggccaccggtcgcccccccgcttccccgcacgcgctctccagccgcggccgcccgcctgccgcggtcaccccggcctctgcctctgtcccccagtgatcggatcaaggcgctgagcgaggccctgcctgcggggcggccatgcggcggtgacaggagcgcgaccgacacgcacgggcccctcgccccctctcgcctcccgtccgctcgccagctcccctcagccgaggctgctccgcggcggccgcagcccgcgcgcggcccacactcgcctcccctcggcacccccggccccggagctgcctggaggcggccgcactcggggatcatggcccaagttgcaatgtccaccctccccgttgaagatgaggagtcctcggagagcaggatggtggtgacattcctcatgtcagctctcgagtccatgtgtaaagaactggccaagtccaaagccgaagtggcctgcattgcagtgtatgaaacagacgtgtttgtcgtcggaactgaaagaggacgtgcttttgtcaataccagaaaggattttcaaaaagattttgtaaaatattgtgttgaagaagaagaaaaagctgcagagatgcataaaatgaaatctacaacccaggcaaatcggatgagtgtagatgctgtagaaattgaaacactcagaaaaacagttgaggactatttctgcttttgctatgggaaagctttaggcaaatccacagtggtacctgtaccatatgagaagatgctgcgagaccagtcggctgtggtagtgcaggggcttccggaaggtgttgcctttaaacaccccgagaactatgatcttgcaaccctgaaatggattttggagaacaaagcagggatttcattcatcattaagagaccttttttagagccaaagaagcatgtaggtggtcgtgtgatggtaacagatgctgacaggtcaatactatctccaggtggaagttgtggccccatcaaagtgaaaactgaacccacagaagattctggcatttccctggaaatggcagctgtgacagtaaaggaagaatcagaagatcctgattattatcaatataacattcaaggaagccaccattcttcagagggcaatgaaggcacagaaatggaagtaccagcagaagatgatgattattctccaccgtctaagagaccaaaggccaatgagctaccgcagccaccagtcccggaacccgccaatgctgggaagcggaaagtgagggagttcaacttcgagaaatggaatgctcgcatcactgatctacgtaaacaagttgaagaattgtttgaaaggaaatatgctcaagccataaaagccaaaggtccggtgacgatcccgtaccctcttttccagtctcatgttgaagatctttatgtagaaggacttcctgaaggaattccttttagaaggccatctacttacggaattcctcgcctggagaggatattacttgcaaaggaaaggattcgttttgtgattaagaaacatgagcttctgaattcaacacgtgaagatttacagcttgataaaccagcttcaggagtaaaggaagaatggtatgccagaatcactaaattaagaaagatggtggatcagcttttctgcaaaaaatttgcggaacgcttggggagcactgaagccaaggctgtaccgtaccaaaaatttgaggcacacccgaatgatctgtacgtggaaggactgccagaaaacattcctttccgaagtccctcatggtatggaatcccaaggctggaaaaaatcattcaagtgggcaatcgaattaaatttgttattaaaagaccagaacttctgactcacagtaccactgaagttactcagccaagaacgaatacaccagtcaaagaagattggaatgtcagaattaccaagctacggaagcaagtggaagagatttttaatttgaaatttgctcaagctcttggactcaccgaggcagtaaaagtaccatatcctgtgtttgaatcaaacccggagttcttgtatgtggaaggcttgccagaggggattcccttccgaagccctacctggtttggaattccacgacttgaaaggatcgtccgcgggagtaataaaatcaagttcgttgttaaaaaacctgaactagttatttcctacttgcctcctgggatggctagtaaaataaacactaaagctttgcagtcccccaaaagaccacgaagtcctgggagtaattcaaaggttcctgaaattgaggtcaccgtggaaggccctaataacaacaatcctcaaacctcagctgttcgaaccccgacccagactaacggttctaacgttcccttcaagccacgagggagagagttttcctttgaggcctggaatgccaaaatcacggacctaaaacagaaagttgaaaatctcttcaatgagaaatgtggggaagctcttggccttaaacaagctgtgaaggtgccgttcgcgttatttgagtctttcccggaagacttttatgtggaaggcttacctgagggtgtgccattccgaagaccatcgacttttggcattccgagactggagaagatactcagaaacaaagccaaaattaagttcatcattaaaaagcccgaaatgtttgagacggcgattaaggagagcacctcctctaagagccctcccagaaaaataaattcatcacccaatgttaatactactgcatcaggtgttgaagaccttaacatcattcaggtgacaattccagatgatgataatgaaagactctcgaaagttgaaaaagctagacagctaagagaacaagtgaatgacctctttagtcggaaatttggtgaagctattggtatgggttttcctgtgaaagttccctacaggaaaatcacaattaaccctggctgtgtggtggttgatggcatgcccccgggggtgtccttcaaagcccccagctacctggaaatcagctccatgagaaggatcttagactctgccgagtttatcaaattcacggtcattagaccatttccaggacttgtgattaataaccagctggttgatcagagtgagtcaaaaggccccgtgatacaagaatcagctgaaccaagccagttggaagttccagccacagaagaaataaaagagactgatggaagctctcagatcaagcaagaaccagaccccacgtggtagacctcttccctcctaggcttaaagtatcagtggttgagaagagcttttcggacctgttactaccccaagctgtgtaatatacttgtataacagaaataccttctatacaaacctttttttctacttttagatagaaatgtctactttttcagcagttctgtgaattaaagagcagagtgactgtgggtctggaatggctggtgtacttgggaatgtactatcaggattttacagcaatgctgggaaatgacagggaaaatgacaggaatgaatctcaccagattttttatgtacgcagcagagccttgagttacggtgtttattttccaatcaagtgaagatatctcctacttctcctactggaacatctcagcttctgcagtgaagaaaaattcctgtgatagttcagttctttagtttttctatttgaaaaaaaaaaatcatttaaatgatcctttgttcacggctctccttaatgactgagtgaacagttcctatctgtatatttggactaagaccttttcctaagctatctctcatggttcctatgtttttttatcataattaaaagcaaaaccatctggatcacctaacagtcagaggtcagtatctcagcgtgtgaattatagaggaaatacagagagaacctctcccactttttacttttcgtccaaataaaatgcatggtgtaccagaagttgaagatcgggttgaggattggggctagctcgatgacactaaggccccaacatcgcgggacctgctgtggcgcggattcttaggaacgctgttctagccggccccctctccaggggtcgccgtggccggcattatttcctagttcttcttgtaaccctgaggtgccagcgcggggagtgaggaggggtcagggggctaaggatgcaacctctgacgttctgcgccttcctaggagagtcttacatgtgttgagatttcacaagcaatgcgagttgtaaaataccagctctacaagaaactaggctctgtgacggcatagttttcagtagctttatcacaatattcacaatggagaattatatgacatggtagcagaaataggcccttttatgtgttgcttctattttacctcaaattgtagatatagggtaatcaataaaatccatccatgcctttcacacactaaaaaaaaaa

SEQ ID NO: 351 - DNA, 1868 bp, Homo sapiens
ttttttttttttccagttatttcatttttactatttcacattttcagcaaacaaatcgaggtgcaaacagggtttatttcacattaatatattaactggattttttgtcaaataaatagggaattctctttaaataaccatctcctcacttcatggccagtccagggacaaacaagagtgaatgttagcgcatccaggggcacaaagcttaaggggaagaagcaggctggggggctggtggcaggtcccggccagcacacagggtcaggggcccttgttcccggccccacccagcagccaccaagtggacagacatgcattctctggttccagtcaggaagctccttctagaaggaagtgagaggtgagggaaagcaaattccagaaacaccagcaaaaggcagaagggcttcctcccagcctcggcggccctgccccgacgccacccaagccctggaagctcattttacagcttcaaaagtcacacagggtggcaacaacatgacccaggacagggaagggaaggaagggtggcgggggctgcagctggaccctggctgagtggaatgcgggcgcggtggccttctgagaccagcacagaccagcagagggaatgtgagcagggtctggcagggcccgggaagacacctggctggtctgaagtggctcatgaggctgagtgtagcagtgggtgccagactgagggagctggactgcggtggaggaggtggccagagagtcccttcgaggggagaagctgagagtgaaacaggaacaggggatgctccgtgctcccagaagagccccagacggtgagggaggtacgctgggcagcactgtgggctccgggctggcatgggaagctgggcggcacctctcccgaggccgggggccctaatgtcccacaatgctagttcctggtaattgtttatgatcagacctggagggagaacaaggcgccccctcccctccccaagccccagcacagccccgatgggaggggtagggtagagagatgagggtgggaggcagggaggcaggagggcctactgggtcttcttatcttccggtgggtagtagggaggtggcggcggctggctcgtgggcatgtagacgttgtgaggattgcctgggttgtaataggcgctggcggctgcttctgcggccttggcttcggctgcaggagtggaggggacatcggggccgctgaccggaggttccatgggcccagggtagggcggtggtgggggctgcacgtatcccatggccccgtccatcatggggggtcctggatagaactcaggtgggggcggtggataggggtagccaggagggcaggggtacattccattggcgactggcgggggatagacataggccccgctgggcatgtaagagtagccataggctccactggggacttcacctctggaggcttgagatgccacctggagcatccgctgtccgaactcaatggcgccccctgccgtgaaagtcaacttgtaggaagcagagccttcccagccacctcccgcttccgccttcactgttcccttgatgtagtttgcaccaaatacgggctgcttgatctcacagtctttcatgagataaaatggcatcatgaaggactgcatggcatccttgcccttggacagaaagatgacccggtaaggggtaaggtagacagtgcctttcttggtccctttgaaggcttctggcacgttcttcatgtcattgaatgtgagttccacgtgatcataggacattaggatgctctcggtgttattgacgatcactccgccgccctccgagtgattcttgttgagcgccatagtctctccaacaggggtcccgagactcaaaacgca

SEQ ID NO: 352 - DNA, 6802 bp, Homo sapiens
cagctccgaggggagtcggaccggagcaaacagccacccccggcttcgtcccccacgaagaggaagggcaggagccgtgccctcgaggccgtgcccgccccgcccgccagcggcccccgggctcccgccaaggagtccccacccaagagggtgcccgatcccagcccagtcaccaagggcactgcggccgagagcggggaggaggcggcgcgggccatcccccgcgagctcccggtcaagagcagctcgctgctgccggagatcaagcccgagcacaagaggggcccgctccccaaccacttcaacggccgggcagagggaggtcgaagcagagagctgggcagagcggccggagcgcctggagcttctgacgccgacggcttgaagcccaggaaccatttcggcgtgggcaggtcgacagtgaccactaaagtgaccctccctgccaagcccaaacatgtggaactaaatcttaaaacccctaagaatcttgacagtttgggaaatgagcacaatccatttagccagccagttcacaaaggcaacactgccaccaaaatctccttatttgaaaacaaacggacaaacagtagcccaagacacactgacattcgaggcccaaggaatactcctgcctctagtaaaacgtttgttgggagggcaaagctgaatttagccaaaaaagccaaagaaatggagcaacctgaaaagaaagtaatgccaaacagtccccagaatggtgtgctggttaaggaaactgctatagaaaccaaagttaccgtctcggaagaagagattctgccagcaaccagaggaatgaatggagactcttctgagaatcaagctcttggtcctcagcctaaccaagatgataaagcagatgtacaaacagatgctggctgcctttcagaaccagtggcttctgctctgattcctgtcaaggatcataagctcttagagaaggaggactcagaggctgcagacagcaaaagccttgtacttgaaaatgtaaccgatacagcacaagacatccccaccactgtggataccaaagatttacctccaacggccatgccaaagccacagcatacattttctgactcacagtcccctgctgagtcatctcctgggccttctctttcactgtctgcacccgctcctggggatgttcccaaagacacatgtgttcaatcacccataagcagtttcccatgcactgatctaaaagtgtcagaaaaccataaaggatgtgttttgcctgtgtctcgtcagaacaatgagaaaatgccacttttagaacttggaggagaaacaacccctcctttgtccacagagcgtagtccagaagctgtgggaagtgagtgtccatccagagtcctcgtccaggtcaggtccttcgtgctccccgtggagagcacccaggatgtgagctcccaggtcatcccagagagctctgaagttagagaagtgcagttgccaacttgtcacagtaatgaacctgaagtggtttccgttgcaagttgtgctcccccacaagaggaagtactgggcaatgaacactctcattgcacagcagagctcgcggcaaaatctggcccacaagtcataccgccagcatcagagaaaactctgcctattcaggctcaaagtcagggcagcagaacacccctgatggctgaatccagtcccaccaactctcccagcagcggaaatcacttagccactcctcaaaggccagatcagactgttacaaatggccaggatagccctgccagccttttgaacatttctgctggtagtgatgatagtgtatttgattcttcttctgatatggaaaaattcactgaaattataaaacagatggatagcgcagtttgtatgcccatgaaaagaaagaaggccaggatgccaaactctcctgctcctcactttgccatgcctcctattcacgaagaccatttagaaaaggtgtttgatcccaaagtgtttacctttggtttggggaagaagaaggaaagtcagccagaaatgtcaccggctttacatttgatgcagaaccttgacacaaaatccaaactgagacccaaacgtgcatctgctgaacagagcgtcctcttcaagtccctgcacaccaacactaatgggaacagtgagcctctggtgatgccggaaatcaatgacaaagagaacagggacgtcacaaatggtggcattaagagatcgagactagaaaaaagtgcacttttctcaagcttgttatcttctttaccacaagacaaaatcttttctccttctgtgacatcagtcaacactatgaccacggctttcagtacttctcagaacggttccctatctcagtcttcagtgtcacagcccacgactgagggtgccccgccctgtggtttgaacaaagaacagtcaaatcttctgcccgacaactccttaaaggtcttcaatttcaactcgtcaagtacatcacactccagtttgaaaagtccaagccacatggaaaaatacccgcaaaaagagaaaaccaaagaagatctggattcacgaagcaacctacacttgccagaaactaaattttctgaattgtcaaaactgaagaatgatgatatggaaaaggctaatcatattgaaagtgttattaaatcaaacttgccaaactgtgcaaacagtgacaccgacttcatgggtcttttcaaatcaagccggtatgacccaagcatttctttttctggaatgtcattatcagacacaatgacacttagaggaagtgtccaaaataaactcaatccccgacctggaaaggtagtgatatatagtgaacccgacgtctctgagaagtgcattgaagttttcagtgacattcaggattgcagttcttggagcctctctccagtgatactcataaaagttgttagaggatgttggattttgtatgagcaaccaaattttgaagggcactccatccccttagaagaaggagaattggaactctctggtctctggggtatagaagacattttggaaaggcacgaagaagcagagtctgataagccagtggtgattggttccatcagacatgtggttcaggattacagagttagtcacattgacttatttactgaaccagaagggttaggaatcctaagttcctactttgatgatactgaagaaatgcagggatttggtgtaatgcagaagacttgttccatgaaagtacattggggcacgtggctgatttatgaagaacctggatttcagggtgttcctttcatcctggaacctggtgaataccctgacttgtccttctgggatacagaagcagcgtacattggatccatgcggcctctgaaaatgggtggccgtaaagttgaattccctacagatccaaaggtagttgtttatgaaaagcctttctttgaaggaaaatgtgtggaactagaaacaggaatgtgtagttttgtcatggagggaggtgaaacagaagaggcgactggagacgatcatttgccgtttacgtcagtggggtctatgaaagttctaagaggcatttgggttgcatatgagaagcctggatttaccggtcatcagtatttgctagaagaaggagaatacagggactggaaagcctggggaggttacaatggagagcttcagtctttacgacctatattaggtgatttttcaaatgctcacatgataatgtacagtgaaaaaaactttggatccaaaggttccagtattgatgtattgggaattgttgctaatttaaaggagactggatatggagtgaagacacagtctattaatgtactgagtggagtatgggtagcctatgaaaatcctgacttcacaggagaacagtatatactggataaaggattttataccagttttgaggactggggaggcaaaaattataagatctcttctgttcaacctatatgtttggattctttcactggcccaaggagacgaaatcagattcacttgttttcagaaccacagtttcaaggtcacagtcaaagttttgaagaaacaacaagtcaaattgatgattcattttctaccaagtcttgcagagtttcaggaggcagctgggttgtatatgatggagaaaatttcactggtaatcaatacgtgttggaagaaggccattatccttgtctgtctgcaatgggatgcccgcctggagcaactttcaagtctcttcgttttatagatgttgaattttctgaaccaacaattattctctttgaaagagaagacttcaaaggaaaaaagattgaacttaatgcagaaactgtcaatctccgatccctgggattcaacacacaaatacgctctgttcaggttattggtggcatatgggttacttatgaatatggcagttacagagggcgacagttcctattgtcacctgcagaagtacctaattggtatgaattcagtggctgtcgccaaataggttctctacgaccttttgttcagaagcgaatttatttcagacttcgaaacaaagcaacagggttattcatgtcaaccaatggaaacttagaggatctgaagcttctgaggatacaggtcatggaggatgtcggggccgatgatcagatttggatctatcaagaaggatgtatcaaatgcaggatagcagaagactgctgcctgacgattgtgggcagcctggtaacatctggctccaagctaggcctggccctggaccagaatgctgacagccagttctggagcttgaagtccgatggcaggatttacagcaagttgaagccaaatttagttttagacattaaagggggcacacagtatgatcaaaatcacattatcctcaacactgtcagcaaagagaagtttacacaagtgtgggaagccatggtcctatatacctgaacaaagaaggaagaagaatcttctggaggtccttccagccaccttatttcttaaaaaggacaatgctgatggaagaccagactggaaagtggatcgactcctccttcattgattctaaattcaaccttaaatcatgctgccatgactcagagaacttactcatcgtttcaaaagactatcatagctttaaaccaataatttgtcctcctttcatttcttgcctttcatttttggtagctgcttaaacaggttgcctaattagcagcttttgggtgattttgtaaaatgttatatcaagatttcaagactgtgtacattttaaattatttccaaagatagtgacaggagagaactggaacaaatttaccaactttgtggacctacaaagcccttacactttaaagggtaagacaaaggcttaagtttgaaaggtagagaactgtttagcatctgagaagaaatactttattaggcctgtaattttggttcttggccttaaacactttctggaacctttaaatatgctgcatagcacaatgggaaagccttaggtattcacacatttaaggaactctaaacaaaatactattttcctttagttcatattaaaaattaatacattttaaaaatttaatgtcaaagtctggtaacatttgttagtaggatttgagttattattttttgagacaggatctcaggctggagtgcagtggcacaatcacggctcactgcagcctctacctccccaggctcaggtgatcctcccacctcagcctcccaagtagctgggactataggcacacatcaccaagcccagccaaatttttttttttttttgtagagatggggtttcatcacgttgcccaggctgatctcgaacctctgggctcaagcaattcactcgcctcggcctcccaaaatgctgggattacaggcctgagccactgcgcccagccaggatttgaattattttaactcatccatgggctgccctagaatgtcacaaatgagggttgtttaatgcctttcttatagctgctactggaacactattatgacctaatttatgagccatccttactcatctacaagtgctgaagcaatgttacatacttttttgctaaactcagattttttagcctaatttcttgtcctcctatccacctgcatccacacatggcctgcatggggctgccttccctgcagtgttctgcagccatgcttcagggtatagctgttggtggacagcctcaggtcttgggggcactatagccactaaacgaggtgtgaaaggctcaagaggatgaccagcaattaattatccccagaaagtgaaggaaaagagacctttagggatgttgctggtcaagtcttgatttgaccggagtcaaatcaatcttcaagcaatcttggaatcctcaactgcagtaagcatttcaaaatgcaaacaaactgcttaacaactgacaagacaccagcccatacgctgctcttccaacagtgggttctagctttgaacaaaagtgctaaacatttccttgaatatattcttcctctttttgtcctcatcactcaatactggtgctcttgtcacaggtagaacagcttgtttcttttccatctattcaagtgtgtttctaattctaaaatgctgatcttctctggagtctatggtaggcaattatggtcactggaatagtttgtcttgttttaaaatattattggtgcatgtacaacagcatccaacatatctgtcttgttcctagatatatagctctgattttaggccttttgtgcataccattacaatatggtggggtaagacattctacagtagcctgtgctgaactgatctcttaaataaacttgcttctggttaaaaaaaaaa

SEQ ID NO: 353 - DNA, 432 bp, Homo sapiens
accggtccgtaattcccgggtcgaccctttcgttgcatgactcccagacctccttctgcttctcagactctattccgacaccctccaacatggaggaaacgcaacagaaatacaatctagagctgctccgcatctccctgctgctcatcgaggcgctgctggagcccgtgcgggtcctcaggagtatggtcgccaacaacctggagtatgacacctcggacagggatgactatcacctcctacaggacctagagggaggcatccaaacgctgaatgggcagtctggtagacggcagccgccggactgtgcagatcctcaagcagacctacagcaagattgacacaaactcgcacaatcatgacgcactgctcgagaactacgggctgctctactgcttcaggaaggacatggactacggcgagacattcctg

SEQ ID NO: 354 - DNA, 727 bp, Homo sapiens
tccgtgtggtggaattccgagattatgtaaatgagtggattctggctgatctatcctattggctatcgggacaaaatttgcttgagccaatcaaagtgctccgtggacaatcgccgttctgtctataaaaaggtgaagcagcggcgttttcggcgactttcccgatcgccaggcaggagtttctctcggtgactactatcgctgtcatgtctggtcgtggcaagcaaggaggcaaggcccgcgccaaggccaagtcgcgctcgtcccgcgctggccttcagttcccggtagggcgagtgcatcgcttgctgcgcaaaggcaactacgcggagcgagtgggggccggcgcgcccgtctacatggctgcggtcctcgagtatctgaccgccgagatcctggagctggcgggcaacgcggctcgggacaacaagaagacgcgcatcatccctcgtcacctccagctggccatccgcaacgacgaggaactgaacaagctgctgggcaaagtcaccatcgcccagggcggcgtcttgcctaacatccaggccgtactgctccctaagaagacggagagtcaccacaaggcaaagggcaagtgaggctgacgtccggcccaagtgggcccagcccggcccgcgtctcgaaggggcacctgtgaactcaaaaggctcttttcagagccacccacgttttcaaataaaagagttgttaatgctgaaaaaaaaaa

SEQ ID NO: 355 - DNA, 3328 bp, Homo sapiens
ttttttttttttaagattttcaaaatatttttatatagaaattttttacaaagattttacaacatagcaaatcattatgtcatactgtagaaagatgaagcaaaggattaaactccaaggataaagaaagtgctcatagcaacgtattgcagtctccatgaaagtgcatataaacggttaaggcaaagtaccatcttggtacagacatgttgcaaactgacttttaaaacaattttttaaaatatatacaaactttttttcttctattcttctcaaaggcatttgaaagggatacttttatgaatattcttgctgtagaacaatgtagaaataacttctgggtataaaacagtaaaaataaaaatattctacctgagtgtgttaaatcaagtgatttgtaaaacaaaaccttcacaagtgtgggctttctacatgtaacttgccaggctgaaggcttacaccctcatgttctacaacacagatcactaatgatgataacatgagttaaattgggattcttgcccttctgtgtggcttttggcttctaggttctatgaccaaactattgacatatttgaagtctgtatgcagtcattgtgtgataaatctactttacagctttgcttctacctgcagcttacatgataaccatgctgtgaagtgctacatatgcttcatacaatatgttgccccatctgataataaaaatacaaaggtgctctttaagctaaaccataaaccttattagagaattctagttaagtgttttgtttttccacatacatgtaaataccttaagatcaataggatcaataaggataatattagttatcaaaatttagtcttcatacttgaagaatttgtttttaaaaataactaagatgcaaaaaaataaattagctagtcttgaacaagagtgagttttgcagaaaactgacatatctgaattctagtacagataagaatctgtcaaatgataactgaattcacgtgactaaccactcttttacgtaagattgtatctactcatgagaaataggggaattcagtgttatcattatagtctccgtatttaaactgagtttttcttttccaattttttttccatgcctcaacataagggaaattaatcagttaatttctgctgacttaggtttcctaaacagcttttagttctcaaggcacagctgtggtaaaaacagagcaaaacacccagccatttattggaattctgcagtacaaaataagcacatgtgctctatataatctagtaacaggatagcaacagttaaactgtctcaaacaacagatgtatttgcttgattttccttcctaacttcttttgcatcaggaccgcaagcaaagagcttgtttcccagagtattttgggcaaatcggaaatacataatgtggcccattgccacaaaggagactgaaatcaatacgagcaagccaaaagcttcaggatttggagccaggatgaccatgatgaaatgcagaagatcaagaagatagttcatggagttctgtacaccatttataatgcctctttcagattcaattacattttcttgcagcaactgtgtcacagttaaatcaaaggaccaaagaccgattctagcagcaatgacgcctgcaaacagcagactgacagagattatgggcacagattcaggacttgtctccgggacaatattagcagaattagacccattagacatgtatatttcagttgtaatttcaggtatcttggtaggtgtaattgactctccttgaatgaaccttgatcggatatcttcaaaaggagaaacggacaagtccagggggcttccaggcatgaatacagagatcacacacaagatcaaacaggaaagctgtgccaatcctgagatcagacctgtccgaaccaaaccacattttcgacgtagccaagtaaaagctacagttcccattattccagttatagctgatgctcccatcaaaatactgaggatggaaccactcagtccctgagtgtaggcgtaccctgtggtgatgcagtcaaagcccaggacagtcatataaaggaaagcaagacccatgccagccagaaacacaggctggttgtagtaggagacccatccatctcggaaggtacggaagggctcagccatctgggaggcacaagtaggctcttgctcatgttcaagctcatggatgttagagtctttcacacccattagatgagttccctccaggggttttggctcagtatctttgtgtaaattcagctgtttcaattcagtttcctcttctttaagaccagctttcacagctagagctggggttttctggtaaaccttccagagcaggacgtactccacgcacatggataccaagttccatcccgaaataaagccacagccgatgactggggagccaaatgtcataatctggccaacagccatgggggctaagatgttggttaactggtcaatccttcgtattgtggcattcatatttgctagtttgcttctgtcttctcctgcaacaacaacaatccaatccctttggattgtgattgcagtagcagtactggccaaatttgcaatatttgcaatagtgatgatcaggatatagcaggaagtgagaacccatccatggtacatggtcagaagctcatgtttatgtaagaaaaccatcatcaggatgattccacacaggatgactgaaacattctgtaccaccagcgaggtctgggccactttaagtctagcattcttgtccacccagtcaccgatgatggctcccaggaccagaacagaccctgccaccaccagcccgtagactgctgtcaaaaggaggctgtttccatagagctctaccagaaacacagacaccgcaaagtgccacatccgatctccccaagtagagagagaatgaccaaggtagagaaggaattttgcagaggtcaggtagtcggccaaggatccacagcatcctctctggcggttgtgatctcccgccctggtcatgacactaggcgaccccgctggctcttctgcggctgctatcgctgctgctgctctcgctgaggtgcttgttaacaggagtgcaaggaactggagatagcacctctaaaaacacaacagccttgggcaaaaagactacaacgacgactttggcaaagaacaaaagaaaaggggcccagggattttcttttttccttctttccaaacttagctaacactgtagctgaagttggaaaggcaaagccttatggaagcggtttgggaggctcagcaggtcgtccgagcctagcggacgccctgagccagctcggacgcgt

SEQ ID NO: 356 - DNA, 1183 bp, Homo sapiens
aattcggcacgaggcttctgacagctggtgcgcctgcccgggaacatcctcctggactcaatcatggcttgggcttccccttggcttggtcagaggatgccgggcgggaacaaccccactcccacccccagccacccccggacacttcgagcagtggaggccttgtcctctaacccggctgggccggggcttgtctgtgcagggtctggtcgccagcaacctgaatctcaaacctggagagtgccttcgagtgcgaggcgaggtggctcctgacgctaagagcttcgtgctgaacctgggcaaagacagcaacaacctgtgcctgcacttcaaccctcgcttcaacgcccacggcgacgccaacaccatcgtgtgcaacagcaaggacggcggggcctgggggaccgagcagcgggaggctgtctttcccttccagcctggaagtgttgcagaggtgtgcatcaccttcgaccaggccaacctgaccgtcaagctgccagatggatacgaattcaagttccccaaccgcctcaacctggaggccatcaactacatggcagctgacggtgacttcaagatcaaatgtgtggcctttgactgaaatcagccagcccatggccccaatgggccccccaataaaggcagctgcctctgctccctctgaaaacacacagacaaaaacaaaaaaacaaaaaaaaacaaaaaacacaacaaatcaatccacaaccacaaaaccacccaaacaacaaacaaacacacacaacacacaaccaccaaccactacaccaccacaaaacgcccgcgagagcaaccatggccgagcctcagaaacggcgagcgcaacctccagtgcaagcagacacgatataggaaaacgaacgaccgacgacgacgaaaaagacacagacccagcgtaggagagggaagcaactagcgacgagaaggagaaaagcaagagaggaagaaccacaaacaaactgaggatacaaaacaaacagaggtggaacagccacgcaccacacggaacaatcaagaagaacaaagacgcaaacctacacactatacacagcagaacaagcagggtgcaatcaaccagagatgacagagaggagaggaaaaagaacagaccagccataccaattcaatactaccacaaatattccgctcgcgagagaagacaaaa

SEQ ID NO: 357 - DNA, 5234 bp, Homo sapiens
tactcaccagctcaaaacctgactcatctcccgtcaccccacccacagacccagccgatgactcctcttcctttgaccccgtggattttctccctcctcgacagcatcatgatcctccaccagagcatcatgatcctccaccgtatgtccctgctccggctctacccctctcccccactctctccaaccaacccacttctgactctgagacctctctgcctcctcccctcacccgctctcgggcccaatgtgctcagcaaccagctcccttgcttcctctccgggaagtagcgggagttgaggggatcgtccatgtccacgtccctttctccttctacgatctcttacagattgaagaacgtctcgggtccttctcctccgatcctgatacttacatcaaagaatttaaatatcttactcaatcttatgaactcacttggcatgatctctactttatcctctcttctaccctccttccagaagagaaggaaagagtgtggctcgcagcacaggcatatgccgacgaccttcatcagcaggatcctactaagcccgtaggagctgctgctgttccctgggaagagccttcctgggaataccaacccacagaacctggccaagtgtactgtagccatatgattacttgcctcattgcaggccttaacaaagctgcccataggctgtaaattttgaaaaacttaaagacatttcccaaaaggcagatgaaaatcctgcccaatctctttcccgccttacagaagctctccaaaaatatacccgcatcgaccctgcctcctgagaaggaactattgttctttctttaaaaaattttatttattttttaattattattatactttaagttttagggtacatgtgcacaatgtgcaggtttgttacatatgtaggaactattgttcttaatacccattttatttcccaatctgcccctgacatccggcacaaacttaaaaaggctgaagatggctctcaaaccccacaacaagacctccttaacctggctttcaaagtctttaataacagggacgagcaaaataaattagataaagcccaaagagatcgtgctaaataccagcttccagcagtggctatctgtcagtctagccatagtacccaagggcacaaaagacctgatagcagcaaacctcctgggccttgttttaagtgcggcaaagaaggccactggacgggggcatgtccccacccatgagtgccgaagagcccttgcctagtctgccagcagatgggcactggaagtctgactgtcctctcaacagatgggcagacaagcatgctcctcagagccaccatcccttcaacaagacaaaaagtgaagaatcacttgcactcccatagctccttggcctagccactgaagactgatgaagccagggcccctgggccccggctcccggcccccactgccatcactgcatcggagcccagggtaactctactagtagcaggtaagctgatctcttttttaattgatagtggggccacctactcagctttgcctgagttctcaggacccactcatccctctcaagtctcagttgtgggggttgacggactcatctcttgtccgcttgccaccagacctcttacttgttccctgtttgatgccattttctcacactctttccttatcatgcctcattgccccacccccattctaggctgagaccttttagccaaagtcaaagcttctatcaccttttcttgcccccttcaaccagagtcccctcctgctcctctccgctagtccggcccctgacccctttccccagtacccacttcctgcctctctcattaacccttccgtagctgctcaccatgaccccatcagaatccagttaaaagactcttccaaatttcccagcgttcctcaataccccatctctctaacccaccaaaagggcctacagcccatcgtaaacaagctctgctcatgcagtcttcttagaccaacacactctccatataacacccctatcctccctgttaaaaagtctgatggctcataccgactcgttcacaacctccaagccatcagtcaagctgtcctccctattcatcccatagtccataacccctatccacttctctctctcgtcgctaccaacaccaccctctacactgcaattgacctgaaggatgccttctttaccatttccctacaccctgattcccaaaacctatttgctttcacctggactgaccctgacaccctccagtcacaacaactcacatggactgtcctccctcagggcttcagggatagcccttctttggacaagctctagcccgaaacctcacttccttaaacctgtctcccagtcatcttcaatatgtggacgaccttcttctttgcagcccctctctaaaagactctcaaactcacacggccactgctctcttaaactttctcgctatcaaagggtatagggtctccccctccaaggcccaactctccatctccatgatgacttacttaggaattcaactttcccctggggcccaggctatgactccagccagggcagcattaatagaaaatctacccccaccctcctccaaaagcgaaatcctttccttcccagggctagcaggcttctttagaatatggatttccaactttgccctcctagctcatcccctctatgaagtggccaaaggccctcccaatgaacccctaaacccctcacataacatactccccagcttccacaaactccaaactgctcttgtcactgcgtcagctccgtccttacctgatatctcccaacctttcactctctatactgctgaaagctgaggaatagccctcggtgtcttaggacaacagaaaggaaatcctccttcctttgcccctgtagcttacctctctaaacaactagataacacagtcaaagggtggccagcctgctttaaagcactagaagtggtagccagcttagctctagaaagcaggaaactaactttcagccagaataccaccgtccacagttctcataatctacaagatctcctctcctcccaagcagtaagctcccttcctccttccaggattcaattactccatgccctctttataaaaaatcccaaattcagtcttaccagaagtgcttccctcaacccagcatccttactccccgtatcctcttcccttcctactcattcttccactgatatcctggaccacgtacagccacatttcccaaacacttcctccgagcctctcaccaaccccaatgatcaactattcatagatggctcctcttccaggcccaccagctaccccccagattgctggatatgcagttgtttcccttgaccaagtaattgaagccaggatcctcctcccaaaaagcagaactcatagctctcaccagggccctaaatctttccaaaggcaaacgagtcaacatttatacagactccaaatatgcctatcacattcctcgttcccacgctgctatctggcaaaagagaggactccttactgccaaaggaacccctatcactaatggccaccttatttactaactccttcaggccacacacctcccagctaaagcaggagttatacactgttgaggacatcgaacaggttcagatgaaatctcaaaaggaaatagaaagaccgacgaggcagcaaaacaggactccctttctcctctccctgcccccatcctccttgtcaccccagcagtcccgcccagataccctcccactgaaaagtcttcactactacagcaaggagcctcccttcaaggggactggataatcaaaaatcaaaagcctgttcttccccaagagcaaagcaaggaaattctaacacctcttcaccaacccttccatatcagtgcatgcccccatacctactccttcgcccttgtttctcctccccccatctattcatctcactaaaggacataacctcaaactgtcgtatatgctctgttacttcctcccaaggggccctctgccctctcctcatccttacataccagctcagaggaacactcccaggggagcactggcaagtaaacttcacccacatgcctcccgtcaaaaaatctaaatatcttcttaccctcgtagacactttttcaggttgagtagaagcatttcctaccccttcagaaaaagctgcagaagtctctcaaattcttgtaacagaaatcatccctagatttggtctccctggctccatacaatcagacaatcccctagcttcatctcccaaatcactcaacaggtttctcagtcccttggcatccagtggcgtctccatatcccatgctggccccagacatccggaaaagtcgaaagggcaaatgggatccttaaggctcagttaaccaaactcactcttgaagtccaaaaaccatggacctcccttttgcccatagcactggagagcattagagccagtccaaaagcaccctccttcctcagtccatttgagttaatatacggacgccctttcctcttacaaaacaggcccccttctaactctcagctaggagaatacctcccaacagtctccctcatgagctatctcctctgccaacaagccgaccaggccctcccaaaaccccacgaaggggtctccaatcccaaatagacttgctctccaattccaaaagactctttaagcagcagtgacacttcaaaaccatcgaggtttagatctcctcactgccgagaaaggcggcctgtgtatctttttagaagaggagtgctgtttctatactaaccagtcaggactagtacaagatgctgctggacgaataaatgaaaaagcttctggccgggtgcagtggctcacgcctgtaatcccagatctttgggaggctgaggcgggcggatcacgaggtcaggagatcgagaccatcttggctaacacggtgaaaccccgtctctactaaaaatagaaaaaattagccgggcgtggtggccggcggctgtactcccagctactcaggaggctgaggcaggagaatggcgtgtggggtgaacccgggaggcggagcttgcagtgagcagagatgatgccactgcactccagcctgggcgacagagcaagactccatctcaaaaaaaaaaaaaactcttgggggggcccggtccccaattttcccctttgggaggcccttttccttttattggcgccggttttactaacctgtgtaactgggaaaact

SEQ ID NO: 358 - DNA, 431 bp, Homo sapiens
agtgtggtggaattgcccttcaccatgaaagcccttatgctgctcaccctgtctgttctgctctgctgggtctcagctgacattcgctgtcactcctgctacaaggtccctgtgctgggctgtgtggaccggcagtcctgccgcctggagccaggacagcaatgcctgacaacacatgcataccttggtaagatgtgggttttctccaatctgcgctgtggcccaccagaagagccctgtcaggaggccttcaaccaaaccaaccgcaagctgggtctgacatataacaccacctgctgcaacaaggacaactgcaacagcgcaggaccccggcccactccagccctgggccttgtcttccttacctccttggctggccttggcctctggctgctgcactgagactcatacataggtatcaattaatgcac

SEQ ID NO: 359 - DNA, 2028 bp, Homo sapiens
ggcacgaggctcaggccccgctggccgcgggctcggtacccggtgggtcggtggagcgtctgttgggtccgggccgccggcttcgccctcgccatggcgccctggctgcagctcctgtcgctgctggggctgctcccgggcgcagtggccgcccccgcccagccccgagccgccagctttcaggcctgggggccgccgtccccggagctgctggcgcccacccgcttcgcgctggagatgttcaaccgcggccgggctgcggggacgcgggccgtgctgggccttgtgcgcggccgcgtccgccgggcgggccaggggtcgctgtactccctggaggccaccctggaggagccaccctgcaacgaccccatggtgtgccggctccccgtgtccaagaaaaccctgctctgcagcttccaagtcctggatgagctcggaagacacgtgctgctgcggaaggactgtggcccagtggacaccaaggttccaggtgctggggagcccaagtcagccttcactcagggctcagccatgatttcttctctgtcccaaaaccatccagacaacagaaacgagactttcagctcagtcatttccctgttgaatgaggatcccctgtcccaggacttgcctgtgaagatggcttcaatcttcaagaactttgtcattacctataaccggacatatgagtcaaaggaagaagcccggtggcgcctgtccgtctttgtcaataacatggtgcgagcacagaagatccaggccctggaccgtggcacagctcagtatggagtcaccaagttcagtgatctcacagaggaggagttccgcactatctacctgaatactctcctgagaaaagagcctggcaacaagatgaagcaagccaagtctgtgggtgacctcgccccacctgaatgggactggaggagtaagggggctgtcacaaaagtcaaagaccagggcatgtgtggctcctgctgggccttctcagtcacaggcaatgtggagggccagtggtttctcaaccaggggaccctgctctccctctctgaacaggagctcttggactgtgacaagatggacaaggcctgcatgggcggcttgccctccaatgcctactcggccataaagaatttgggagggctggagacagaggatgactacagctaccagggtcacatgcagtcctgcaacttctcagcagagaaggccaaggtctacatcaatgactccgtggagctgagccagaacgagcagaagctggcagcctggctggccaagagaggcccaatctccgtggccatcaatgcctttggcatgcagttttaccgccacgggatctcccgccctctccggcccctctgcagcccttggctcattgaccatgcggtgttgcttgtgggctacggcaaccgctctgacgttcccttttgggccatcaagaacagctggggcactgactggggtgagaagggttactactacttgcatcgcgggtccggggcctgtggcgtgaacaccatggccagctcggcggtggtggactgaagaggggcccccagctcgggacctggtgctgatcagagtggctgctgccccagcctgacatgtgtccaggcccctccccgggaggtacagctggcagagggaaaggcactgggtacctcagggtgagcagagggcactgggctggggcacagcccctgcttccctgcaccccattcccaccctgaagttctgcacctgcacctttgttgaattgtggtagcttaggaggatgtcggggtgaagggtggtatcttggcagttgaagctggggcaagaactctgggcttgggtaatgagcaggaagaaaattttctgatcttaagcccagctctgttctgcccccgctttcctctgtttgatactataaattttctggttcccttggatttagggatagtgtccctctccatgtccaggaaacttgtaaccacccttttctaacagcaataaagaggtgtccttgtcccgagaaaaaaaaaa

SEQ ID NO: 360 - DNA, 420 bp, Homo sapiens
agtgcgaaaatccaggtcgacgatttcgaggagtcggagcgagactgctcgtcagtttataccttcccgcgcgctcgcggtactgccaacgaaagcgcgtcctctgctgccatgaagaggaagactaagtgctggaacggcgtggccacttggctctgggtggccaacgatgagaactgtggcatctgcaggatggcatttaacggatgctgccctgactgcaaggtgcccggcgacgactgcccgctggtgtggggccagtgctcccactgcttccacatgcattgcatcctcaagtggctgcacgcacagcaggtgagcagcactgccccatgtgccgccaggaatggaagttcaaggagtgaggcccgacctggctctcgctggaggggcatcctgagactccttcctcatgttggg

SEQ ID NO: 361 - DNA, 425 bp, Homo sapiens
gtgtgtatatccagggagaggatgtcagttttgttttgtatgctcagtcataagggcgttcgattgccgtctatgtgtgtgtatgcaacgaggccctcctgacgctctgctttaccatagtgtactttgcaccggccagggaggagggtgctggggagacccaaacatcaagctgggggagggtgctgaggtggaggtagaagggggcagaggggcccctcagctgagtccttagggagggaagggatcctggggtctgcccagcttgaaacagaagctgggggccacaaggccctgaatcaggccaggcagggtacaggggcctgggagtcctgctcctttgctgtgagacctttagggaatgggatccatctctgagtggtttctcccgatgaaagacaggtccagagggcagagtggccatg

SEQ ID NO: 362 - DNA, 418 bp, Homo sapiens
accggtccggaattcccgggtcgacttcgctgtcgacgatttcgtgccgctacccggtgtgcgcaggacggcaccacctacccgagcggctgccagctgcgcgccgccagccagagggccgagagccgcggggagaaggccatcacccaggtcagcaagggcacctgcgagcaaggtccttccatagtgacgccccccaaggacatctggaatgtcactggtgcccaggtgtacttgagctgtgaggtcatcggaatcccgacacctgtcctcatctggaacaaggtaaaaaggggtcactatggagttcaaaggacagaactcctgcctggtgaccgggacaacctggccattcagacccggggtggcccagaaaagcatgaagtaactggctgggtgctggtatctcctctaagta

SEQ ID NO: 363 - DNA, 427 bp, Homo sapiens
cggtccggaattcccgggtcgacttcgctgtcgacgatttcgtctcgtcacaccaatgccggtgttcgggacaacacatccaacctgacccaccggtccggggattacctgaattaccaaatcaggacttctagggccaatatccacacacgaatgcggccgaaaacgtctgaactcccccagggggctgacccgcgcacgtccagatgcggggcaaaaaggaaatgaaaacaatcacggggaagacgttttcatcccgctaatcttgggaataggaggaggaagcggctggcaactgaaggctggaacacttgctactggataatcgtagcttttaatgttgcgcctcttcaggttcttaagggattctccgttttggttccattttgtacacgtttggaaaataatctgcagaaacgagctgtgt

SEQ ID NO: 364 - DNA, 430 bp, Homo sapiens
gacgctgcggtacggtcccaattcccggtcgacgattcgtgctgtgttgatgtggacgagtgcgcgccacctgctgagccctgtgggaagggacatcgctgcgtgtactctcccggctgtttccgctgcgaaatgaagacgtgttactattttgacggcatcagcaggatgtgtgtcgatgtcaacgagtgccagcgctaccccgggcgcctgtgtggccacaagtgcgagaacacgctgggctcctacctctgcagctgttccgtgggcttccggctctctgtggatggcaggtcatgtgaagacatcaatgagtgcagcagcagcccctgtagccaggagtgtgccaacgtctacggctcctaccagtgttactgccggcgaggtaccagctcagcgatgtggatggagtcacctgtgaagacatcga

SEQ ID NO: 365 - DNA, 432 bp, Homo sapiens
gcctgcggtacggtccggaattcccgggtcgacttcgctgtcgacgatttcgtggtgtgcccgcggcacagtcgtgcgtcgtggaccagacgggcagcgccactgcgtggtgtgtcgagcggcgccctgccctgtgccctccagccccggccaggagctttgcggcaacaacaacgtcacctacatctcctcgtgccacatgcgccaggccacctgcttcctgggccgctccatcggcgtgcgccacgcgggcagctgcgcaggcacccctgaggagccgccaggtggtgagtctgcagaagaggaagagaacttcgtgtgagcctgcaggacaggcctgggcctggtgcccgaggccccccatcatcccctgttatttattgccacagcagagtctaatttatatgccacggacactccttagagcccgga

SEQ ID NO: 366 - DNA, 406 bp, Homo sapiens
cggccgaattccggtcgacttcgctgtcgacgatttcgttggaagagaactttgccgttgaagctgctaactaccaagacactattggccgcctgcaggatgagattcagaatatgaaggaggaaatggctcgtcaccttcgtgaataccaagacctgctcaatgttaagatggcccttgacattgagattgccacctacaggaagctgctggaaggcgaggagagcaggatttctctgcctcttccaaacttttcctccctgaacctgagggaaactaatctggattcactccctctggttgatacccactcaaaaaggacacttctgattaagacggttgaaactagagatggacaggttatcaacgaaacttctcagcatcacgatgaccttgaataaaaatt

SEQ ID NO: 367 - DNA, 5221 bp, Homo sapiens
ggatccggattcggattagcagcccgggaagagtgccgtggcacaggcgccggagggagcgcgaccctcggaccccgcctggcccgcggggctgggacccggccccggcctgcccgatggggcgcgcggccccggagatgcgccctcgcccggccccgcgcccccggccccgcgcccccggcccgcccgccccggcccgcgcctccgcctgagtcccccgcgccttggcccgccaccccccgccccgcgcccccggcccgcctgcgccatggagcccggccgcggcggcacagagaccgtgggcaagttcgagttctcccgcaaggacctgatcggccacggcgccttcgcggtggtcttcaagggccgccaccgcgagaagcacgatttggaggtcgccgtcaagtgcattaacaagaagaacctcgccaagtctcagacgctgctggggaaggaaatcaaaatcctgaaggaactgaaacatgaaaacatcgtggccctgtacgacttccaggaaatggctaattctgtctacctggttatggagtactgcaacggtggggacctggccgactacctgcacgccatgcgcacgctgagcgaggacaccatcaggctcttcctgcagcagatcgcgggcgccatgcggcttctgcacagcaaaggcatcatccaccgcgacctgaaaccgcagaacatcctgctgtccaaccccgccggccgccgcgccaaccccaacagcatccgcgtcaagatcgctgacttcggcttcgcgcggtacctccagagcaacatgatggcggccacactctgcggctcccccatgtacatggcccccgaggtcatcatgtcccagcactacgacgggaaggcggacctgtggagcatcggcaccatcgtctaccagtgcctgacggggaaggcgcccttccaggccagcagcccccaggacctgcgcctgttctacgagaagaacaagacgttggtccccaccatcccccgggagacctcggccccgctgcggcagctgctcctggccctactgcaacgcaaccacaaggaccgcatggacttcgatgagttttttcatcaccctttcctcgatgccagcccctcggtcaggaaatccccacccgtgcctgtgccctcgtacccaagctcggggtccggcagcagctccagcagcagctccacctcccacctggcctccccgccgtccctgggcgagatgcagcagctgcagaagaccctggcctccccggctgacaccgctggcttcctgcacagctcccgggactctggtggcagcaaggactcttcctgtgacacagacgacttcgtcatggtccccgcgcagtttccaggtgacctggtggctgaggcgcccagtgccaaacccccgccagacagcctgatgtgcagtgggagctcactggtggcctctgcgggcttggagagccacggccggaccccatctccatccccaccctgcagcagctcccccagtccctcaggccgggctggcccgttctccagcagcaggtgcggcgcctctgtccccatcccagtccccacgcaggtgcagaactaccagcgcattgagcgaaacctgcagtcacccacccagttccaaacacctcggtcctctgccatccgcaggtcaggcagcaccagccccctgggctttgcaagggccagcccctcgccccctgcccacgctgagcatggaggcgtcctggccaggaagatgtctctgggtggaggccggccctacacgccatctcctcaagttggaaccatccctgagcggccaggctggagcgggacgccctccccacagggagctgagatgcggggtggcaggtcccctcgtccaggctcctctgcacccgagcactctccccgcacttccgggctgggctgccgcctgcacagcgcccccaacctgtctgacttgcacgtcgtccgccccaagctgcccaaaccccccacggaccccctgggagctgtgttcagcccaccacaggccagccctccccagccgtcccacggcctgcagtcctgccggaacctgcggggctcacccaagctgcccgacttcctgcagcgaaaccccctgccccccatcctgggctcccccaccaaggctgtgccctcctttgacttcccgaagacccccagctcccagaacctgctggccctcctagcccggcagggcgtggtgatgacgccccctcgaaaccggacgctgcccgacctctcggaggtgggacccttccatggtcagccgttgggccctggcctgcggccaggcgaggaccccaagggcccctttggccggtctttcagcaccagccgcctcactgacctgctccttaaggcggcgtttgggacacaagccccggacccgggcagcacggagagcctgcaggagaagcccatggagatcgcaccctcagctggctttggagggagcctgcacccaggagcccgtgctgggggcaccagcagcccctccccggtggtcttcaccgtgggctctcccccgagcgggagcacgcccccccagggcccccgcaccaggatgttctcagcgggccccactggctctgccagctcttctgcccgccacctggtgcctgggccctgcagcgaggccccagcccctgagctccctgctccaggacacggctgcagctttgccgaccccattgctgcgaacctggagggggctgtgaccttcgaggcccccgacctccctgaggagaccctcatggagcaagagcacacggagatcctgcgtggcctgcgcttcacgctgctgttcgtgcagcacgtcctggagatcgcagccctgaagggcagcgccagtgaggcggcggggggccctgagtaccagctgcaggagagtgtggtggccgaccagatcagcctgctgagccgagaatggggcttcgcggaacagctggtgctgtacctgaaggtggccgagctactgtcctccggcctgcaaagtgccatcgaccagatccgggccggcaagctctgcctgtcgtccactgtgaagcaggtggtgcgcaggctgaatgagctgtacaaggccagcgtggtgtcctgccagggcctgagcctgcggctgcagcgcttcttcctggacaagcagcggctcctggaccgcattcacagcatcactgccgagaggctcatcttcagccacgctgtgcagatggtgcagtcggctgccctggacgagatgttccagcaccgtgagggctgcgtcccacgctaccacaaggccctgctgctcctggaggggctgcagcacatgctctcggaccaggccgacatcgagaacgtcaccaagtgcaagctgtgcattgagcggagactctcggcgctgctgactggcatctgtgcctgacctttctggcctggctgggccccccgtcctgccgagccctgcagagtgggctctgtgtgctggctggactcctcgggacaagcccatggcgctgatcgctggtgctgagccctgccctgggccccacggacagtcagcctgccggcctccctgcagctcacggggcagaaccagcacatctggagccacacagcttggggggtgtctcccatcttttacaggtggggatcacagaatttctgcccctccagctgcctggctcagcaggcgtgggtgccaccaccctctagccccagggcagccccggaggacaggcaagggcctgagaccactgccgactcaaagccaaagcgagctcctgcttagggcaggtcagcaggcactgtgcccaggaagagcctgcggcctcggcgtcccccagtctccaggagcctctccctccgagatacccacccagctttgtcaatcacccaagcactttatgcatatagagacagaacctggacctcaccagggactgctgggcagcgattcctggcagtggcctggtgtttgtacatacacatatgcagacacatgccagggccccccaagcccgagcaccggaccacgttgctgcccaggtctggacctcagcgggagaactggctccggggggagtggggccctgcgctagaggcagaggcagttctttgttcaagcgttcctctggggaccggcagcagaggcaccgtgttctctcagccctggatacgtcttgtaatctttcacactttattcctaaaacgtgtcttatttttatgcagctcattttttctttaaaggagaaaacttgtaggtgtttaagaattggttttgggagggcgaggactgggccaggttagaggcagatggcacaggggcgtgtggcgggcgggtgaggctgctttgcacacctgtgttggtggctgtcccctgccgcccctccctgtggcagcagcaggacaggtgtgtgcccagcaccctccctacctgggcctggaagcagatgaggggaatacttcatgcaaagaaaaaagtaacatgtgcaaaagctccccgtccagctttgacagtcagttttgatgtcagctcctcggcagggtaggcctgatgacagccctgtccctccctgcctctgccttgcccaaggccacggagggcatctgcagagaggcctgccttccggattccaggcgggcatgccctgcaaaccccgcctgggcctcccttggtctgcccagccctcggttagccctgcctgaatcagtagatacttgaacgagtccccagtctgcgggaggcagtggtggggccatggacccatgcggggggttccagggtcacacgccacataacagacaaaaatacacacacgtgtgtttttctttgcaatacttgaaatattgccactgtgcttggacttagaagaagaaaatccccgtgacttcttcctcatcaccttgatggctttattctcaccttgtggggcatgtttgtatttattgcttcatggccgactggaatcctgagtcctgggaagctggcactgcggggatcttgcccggtgtcctggtcctcttgcttccgtcgcggccgcatgtgcgtgtgtccaagcaggtcctgggcgcctcaactgctgcccctggttgaatgttctcttgatagtgctggaccctttgtctattttaaagcgaattttgtgtgatttcctgccctttgcgttatattgtataataccaacgtaaggaaataaacctttggaattgttgaaaaaaaaaa

SEQ ID NO: 368 - DNA, 419 bp, Homo sapiens
actgtacggtgcgaattccggtcgacttgctgtcgagatttcgtacgaaatgcagcagccgattcccatttgggggcaagtttttttcttcaccttcaatatgagaattcagcgaacttgaaagaaaaatcatctgtgagttccttcaggttctcactcatagtcatgatccttcagagggaatatgcactggcgagtttaaagtaagggctatgatatttgatggtcccaaagtacggcagctgcaaaaagtagtggaaggaaattgtctacgtgtcttggaaaaattagttaggaatttggatgggtaaaaggtacccttgccttactccatcttattttcttagccccctttgagtgttttaactggtttcatgtcctagtaggaagtgcattctccatcctcatcctctgccctc

SEQ ID NO: 369 - DNA, 408 bp, Homo sapiens
aggaccgaattctcggtcgcagttcgctgtcgcgatttcgttgtccctatagcgggccgcattaacagcaacctcttcaaggaggactgccaccagaagatcgatgacctcttctccgggaagctgtacctcatcggcattgctgccatcgtggtcgctgtgatcatgatcttcgagatgatcctgagcatggtgctgtgctgtggcatccggaacagctccgtgtactgaggccccgcagctctggccacagggacctctgcagtgccccctaagtgacccggacacttccgagggggccatcaccgcctgtgtatataacgtttccggtattactctgctacacgtagcctttttacttttggggttttgtttttgttctgaactttcctgttaccttttcaggcg

SEQ ID NO: 370 - DNA, 379 bp, Homo sapiens
gaactttgccaaatactttcttcaccaatctcatgaggagagggaacatgctgagaaactgatgaagctgcagaaccaacgaggtggccgaatcttccttcaggatatcaagaaaccagactgtgatgactgggagagcgggctgaatgcaatggagtgtgcattacatttggaaaaaaatgtgaatcagtcactactggaactgcacaaactggccactgacaaaaatgacccccatttgtgtgacttcattgagacacattacctgaatgagcaggtgaaagccatcaaagaattgggtgaccacgtgaccaacttgcgcaagatgggagcgcccgaatctggcttggcggaatatctctttgacaagcacaccctg

SEQ ID NO: 371 - DNA, 439 bp, Homo sapiens
  misc_feature (1)...(439): n = a,t,c or g
cactggacgctctgtgatgtgccgtaattcccggtcgacgatttcgtgccagcgtgcatcctccgtgacattgcgagacgcagtagagaacatccagaaatccctatagtgaggcggatttacacggggctccagcggcaccagcggagaccacggtgagctcgtcgtccggattgccagtctggaagtggagaaccagagtctgcgtggcgtggtacaggagctgcagcaggccatctccaagctggaggcccggctgaacgtgctggagaagagctcgcctggccaccgggcacggccccacagacccagcacgtatctcccatgcgccaagtggagcccccagccaagaagccagccacaccagcagaggatgacgaggatgatgacattgacctgtttggcagtgacaatgaggaggaggacaaggaggcggcan

SEQ ID NO: 372 - DNA, 399 bp, Homo sapiens
cggacgtccctgctcctggcttttgccctgctctgcctgccctggcttcaagaggctggtgccgtccaaaccgttccgttatccaggctttttgaccacgctatgctccaagcccatcgcgcgcaccagctggccattgacacctaccaggagtttgaagaaacctatatcccacagtaccagaagtattcattcctgcatgactcccagatcgtcttctgcttatcagactctattccgacaccctccaacatggaggaaacgcaacagcaatcctatctagagctgctcgcatcttcctgctgctccatcgagcgtggatgggggccgaggcggtcctcaagagtatggtcgccaacaaactggtggattacacctccgacagcgatgactatcact

SEQ ID NO: 373 - DNA, 442 bp, Homo sapiens
gtacggtccggaattcccgggtcgacttcgctgtcgacgatttcgtaggattcaccatgattggagagcactctatttattgtactgtgaataatgatgaaggagagtggagtggcccaccacctgaatgcagaggaaaatctctaacttccaaggtcccaccaacagttcagaaacctaccacagtaaatgttccaactacagaagtctcaccaacttctcagaaaaccaccacaaaaaccaccacaccaaatgctcaagcaacacggagtacacctgtttccaggacaaccaagcattttcatgaaacaaccccaaataaaggaagtggaaccacttcaggtactacccgtcttctatctggttctcgtcctgtcacccaggctggtatgcggtggtgtgatcgtagctcactgcagtctcgaactcctgggttcaagcg

SEQ ID NO: 374 - DNA, 439 bp, Homo sapiens
  misc_feature (1)...(439): n = a,t,c or g
gaccggtccgnaagtcccgggtcgacttcgctgtcgacgatttcgtgtggtgcacacctgtagtcctagctacttgggaggctgaggcaggagaattgcttgaacccaggaggtggaggttgcagtaagccaagatcacaccactgcactccaacctggacaacagagcgagactccatctcaaaaaaaaaaaaaaaagttgtgttgcctcatacgaaatgtatttggttttgttggagagtgtcagactgatctggaagtgaaacacagtttatgtacagggaaaaggattttattatccttaggaatgtcatccaagacgtagagcttgaatgtgacgttatttaaaaacaacaacaaagaaggcagagccaggatataactagaaaaaggatgtctttttttttttttttactccccctctaaacactgctgctgc

SEQ ID NO: 375 - DNA, 441 bp, Homo sapiens
taccggtccggaattcccgggtcgacttcgctgtcgactgttttcgtcccctttttttttttttttttttttttttttttttaaaaaaaaggaggtagcatttaaggaaactccctccgtgtggcttcaggccaccaggtctctccccttgggggggctcttaaacttctcctcagctcttctgctgaagaatttggccttcacgatgacaggctgctttgggagctttccctttcccagaactttatagtagcccgatcgcaccacatcaatgatgggagcagccccagtcttgtttttagcagcattcacccgtgtctgttcactgaccaaagtccacaatttgtcaaggttgacagttgggcagaagctctggttcctctttaagtggtaatgcttcataccaactttcccaaagtagcctgggtggtatttgtcgaa

SEQ ID NO: 376 - DNA, 372 bp, Homo sapiens
  misc_feature (1)...(372): n = a,t,c or g
acgttaccggaattcccggatcgacgatttcgtatgatcattacatttgctgctattgattcatttttgcccatagagaggcggagttaagaaatgtactttctggcacataaagaaatcttgaggactttgtttaaaccttccataaaaaaacaattttcggtttctcgggttctctctctctctctctctgtctctctgtctctctgtctctctgtctctctctctctctctctctctctctttctttctttgtgtattttattcaagatgagttggacccattgccagtgagtctgaatgtcactgacagccctgtgttgtgctcaggactcactctgctgctggnggaaactcatggcttctctctct

SEQ ID NO: 377 - DNA, 428 bp, Homo sapiens
ccgtaccgaaattcccgggtcgacgatttcgtcccaggccaacagctggtccctggaggagctctgcctggaagtcaacgtcaccacctcacagggcgccacccttgacgcttgcagcttcggagtcacgggtttgaaacttcaaggggacacgtgcaacaacaacaagctgtcactgtccaatgccatctcaaccgcccttctcctgagcagatgactgggacaagcagacaaacaccgagaagaaggccagtgtggtaaccttacctgtctacctgaacttcacccgtgcagacctcatcttcaccgtggacttcgaaattgctacaaaggaggatcctcgcagcttctacgagcggggtgtcgcagtcttgtgcacagagtaaacttttctagctgcccctttctgtaatagtgaaagttggtat

SEQ ID NO: 378 - DNA, 442 bp, Homo sapiens
accgttccggaattcccgggtcgacgatttcgtggagctgagaaatctaatcaagcaaatcagaaactttttgacccaggatagtgctgatttggacagcattgaagcagttgctaatgaagtattgaaaatggagatgcctagcaccccacagcagttacagaacttgacagaagatatacgtgaacgagttgaaagcctttctcaagtagaggttattcttcagcatagtgctgctgacattgccagagctgagatgttgttagaagaagctaaaagagcaagcaaaagtgcaacagatgttaaagtcactgcagatatggtaaaggaagctctggaagaagcagaaaaggcccaggtcgcagcagagaaggcaattaaacaagcagatgaagacattcaaggaacccagaacctgttaacttcgattgagtctgaaaca

SEQ ID NO: 379 - DNA, 436 bp, Homo sapiens
actggtccgacattccagcagcggcttcgctgactccgatttcgggctgcctgcccggcgctactacatgatgcagaagcgccctgcctgcagcctgaagtctgcgagtgtccagcagctgctggattgctcccaggaggcctagaagtcagcctactgtccctatagtgagtcgtattaaggggctgccctgctcacccaggaggggagaatcttcaaagggtgcaacatagaaaatgcctgctacccgctgggcatctgtgctgaacggaccgctatccagaaggccgtctcagaagggtacaaggatttcagggcaattgctatcgccagtgacatgcaagatgattttatctctccatgtggggcctgcaggcaagtcatgagagagtttggcaccaactggcccgtgtacatgaccaagccggatggtacg

SEQ ID NO: 380 - DNA, 438 bp, Homo sapiens
gccggagcgtccattccgcagcgacttcgctgtcgacgtatattcggcccagccgcgtgctgcaccacgtacgataacctcaaaggggcgctggagaacggccactttcacggcataggcagagctttgcagatgcgctgctgcttacgggcgccaaggtagcgctgcgggatatggcatctcgaagcctgcggacagagcagagctgccctataggaggcggaataaactcagaagactctgttcatccagtgcgatgtggctgaccagcaacaactgagagacacttttagaaaagttgtagaccactttggaagactggacattttggtcaataatgctggagtgaataatgagaaaaactgggaaaaaactctgcaaattaatttggtttctgttatcagtggaacctatcttggtttggattacatgagtaag

SEQ ID NO: 381 - DNA, 389 bp, Homo sapiens
ccgattccggatctcattgccacgcgcccccgacgaccgcccgacgtgcattcccgattccttttggttccaagtccaatatggcaactctaaaggatcagctgatttataatcttctaaaggaagaacagaccccccagaataagattacagttgttggggttggtgctgttggcatggcctgtgccatcagtatcttaatgaaggacttggcagatgaacttgctcttgttgatgtcatcgaagacaaattgaagggagagatgatggatctccaacatggcagccttttccttagaacaccaaagattgtctctggcaaagactataatgtaactgcaaactccaagctggtcattatcacggctggggcacgtcagcaagaggga

SEQ ID NO: 382 - DNA, 511 bp, Homo sapiens
tgtcctcgtacgccttcttcgtgcagacctgccgggaagagcacaagaagaaacacccggactcttccgtcaatttcgcggaattctccaagaagtgttcggagagatggaagaccatgtctgcaaaggagaagtcgaagtttgaagatatggcaaaaagtgacaaagctcgctatgacagggagatgaaaaattacgttcctcccaaaggtgataagaaggggaagaaaaaggaccccaatgctcctaaaaggccaccatctgccttcttcctgttttgctctgaacatcgcccaaagatcaaaagtgaacaccctggcctatccattggggatactgcaaagaaattggatgaaatgtggtctgagcagtcaggccaagataaacaaccatatgaacaggaagcagcttatgctaaggagggaatatggaaaggattttgctcctattctgcccaagggtaaaaggtaagcgagaaaagagggctctggaagcccaacgagctcaaaaa

SEQ ID NO: 383 - DNA, 429 bp, Homo sapiens
cgtgccggaattcccgggtcgacgatttcgtgacatagaggagcgcacgtgcgagcagcatgtgtttttccctaaggtgaatgaagcaggtgaattcggcctgattctggtccaaaggaaagcgctaacttccaaactggaacataaagatttaaatatctcggttgactgcagcttcaatcatgggatctgtgactggaaacaggacagagaagattgatttgactggaatcctgcctgaccgagataatgctattggcttctatatggcagttccggccttggcagggcacaagaaagacattggccgattgatacttctctctacctgacctgcgaccccgaagcaacttctgtttgctctttgattaccgcctgccgaagacaaagcgggaaactcgagcgtttttgaaaacagtaccatgcccg

SEQ ID NO: 384 - DNA, 393 bp, Homo sapiens
  misc_feature (1)...(393): n = a,t,c or g
gaccacaggatgtacagatgtggatgagtgtgaaattggtgctcataactgcgacatgcatgcctcatgtctgaatatcccaggaagcttcaagtgtagctgcagagaaggctggattggaaacggcatcaagtgtattgatctggacgaatgttctaatggaacccaccagtgtagcatcaatgctcagtgtgtaaataccccgggctcataccgctgtgcctgctccgaaggtttcactggtgatggctttacctgctcagatgttgatgagtgtgcagaaaacataaacctctgtgagaacggacagtgccttaatgtcccgggtgcatatcgctgcgagtgtgagatgngcttcactccagcctcagacagcagatcctgccaaggggg

SEQ ID NO: 385 - DNA, 398 bp, Homo sapiens
  misc_feature (1)...(398): n = a,t,c or g
cggcgtgcactggactttgccgtcgcgagtacaacaaagccagcaacgacatgtaccacagccgcgcgctgcaggtggtgcgcgcccgcaagcagatcgtagctggggtgaactacttcttggacgtggagctgggccgaaccacgtgtaccaagacccagcccaacttggacaactgccccttccatgaccagccacatctgaaaaggaaagcattctgctctttccagatctacgctgtgccttggcagggcacaatgaccttgtcgaaatccacctgtcaggacgcctagnggtctgtaccgggctggcctgtgcctatcacctcttatgcacacctcccaccccctgtattcccacccctggactggtggcccctgccttggggaaggtctccc

SEQ ID NO: 386 - DNA, 442 bp, Homo sapiens
gtaccggtccgtaattcccgggtcgacgatttcgtcctactggtttctctggagaaccctaatacatttcccatctctctgcagctagaatcagccagaaacatataaggagactccaccaggagtggggagttcttgggaaagcttttgcttctgaaaaaagataaaagtacacaggagagctgtctggtgccattccttgagcatgtgagagactgtgtcaccgggagcagcagttatctgtggccacaatgcataggagtgaatgagacagaaagcaagaccatgaggatgactaagaagagcaagcacaacatggctgagactaagtgtccagggagttgagaataagtggcctattgtcatgtcctatataagtagagtatatggatgggaggccaagaatacaccaacaaataaaatattgaatatatcggtcaag

SEQ ID NO: 387 - DNA, 447 bp, Homo sapiens
accggtccgcaattcccgggtcgacatggacagccccgtcaacatgaagttcaacctctcccacctcggctctaaggagcacatcctggaactaaggcccgccatccagcccctcaacaaccacatccgttatgtcatctctcaagggaacgatgacagcgtcttccgcatccaccaaaggaatgggctcagctacttgcacacggccaagaagaagctcatgcccggcacatacacactggaaatcactagcatccctctctacaagaagaaggagcttaagaaactggaagagagcaatgaggatgactacctcctaggggagcttggggaggctctcagaatgaggctgcagattcagctctattaacccttcacagacttgggcccaggctcaaatcctagcacagccagtctgcagaagcatttgaaaagtcaaggactaat

SEQ ID NO: 388 - DNA, 1306 bp, Homo sapiens
cacgtcagccggggctagaaaaggcggcggggctgggcccagcgaggtgacagcctcgcttggacgcagagcccggcccgacgccgccatgacggccgcgctcttcagcctggacggcccggccggcggcgcgccctggcctgcggagcctgcgcccttctacgaaccgggccgggcgggcaagccgggccgcggggccgagccaggggccctaggcgagccaggcgccgccgcccccgccatgtacgacgacgagagcgccatcgacttcagcgcctacatcgactccatggccgccgtgcccaccctggagctgtgccacgacgagctcttcgccgacctcttcaacagcaatcacaaggcgggcggcgcggggcccctggagcttcttcccggcggccccgcgcgccccttgggcccgggccctgccgctccccgcctgctcaagcgcgagcccgactggggcgacggcgacgcgcccggctcgctgttgcccgcgcaggtgggcccgtgcgcacagaccgtggtgagcttggcggccgcagggcagcccaccccgcccacgtcgccggagccgccgcgcagcagccccaggcagacccccgcgcccggccccgcccgggagaagagcgccggcaagaggggcccggaccgcggcagccccgagtaccggcagcggcgcgagcgcaacaacatcgccgtgcgcaagagccgcgacaaggccaagcggcgcaaccaggagatgcagcagaagttggtggagctgtcggctgagaacgagaagctgcaccagcgcgtggagcagctcacgcgggacctggccggcctccggcagttcttcaagcagctgcccagcccgcccttcctgccggccgccgggacagcagactgccggtaacgcgcggccggggcgggagagactcagcaacgacccatacctcagacccgacggcccggagcggagcgcgccctgccctggcgcagccagagccgccgggtgcccgctgcagtttcttgggacataggagcgcaaagaagctacagcctggacttaccaccactaaactgcgagagaagctaaacgtgtttattttcccttaaattatttttgtaatggtagctttttctacatcttactcctgttgatgcagctaaggtacatttgtaaaaagaaaaaaaaccagacttttcagacaaaccctttgtattgtagataagaggaaaagactgagcatgctcacttttttatattaatttttacagtatttgtaagaataaagcagcatttgaaatcgcaaaaaaaaaa

SEQ ID NO: 389 - DNA, 377 bp, Homo sapiens
ccgctgagacctcagccttgacctccctcagcgtggccgggaccctgagcctctgcgcagagccacccgccccgacgtacttaggcggcatagcctgagacctctggccagcgccaggcaggcagcgggggcggcagaggcctgggcctgagtcttctggctctgcctctccctggggacaggagggagcctgggggtgtgggtggggagccggccggccgtgacccagcgcctggctctgcccgcaggagtggacagtgcaatgaaggaagaagtgcagaggctgcagtccagggtggacctgctggaggagaagctgcagctggtgctggccccactgcacagcctggcctcgcaggcactggagcatgggctcc

SEQ ID NO: 390 - DNA, 454 bp, Homo sapiens
gtctgcggtacggtccggaattcccgggtcgacgatttcgtaggaccagtccatgggcaattggcagatcaagcgccagaatggagatgatcccttgctgacttaccggttcccaccaaagttcaccctgaaggctgggcaggtggtgacgatctgggctgcaggagctggggccacccacagcccccctaccgacctggtgtggaaggcacagaacacctggggctggcgggacagcctgcgtacggttctcatcaactccactggggaagaagtggccatgcgcaacgtggtgcgctcagtgactgtggttgaggacgacgaggatgaggatggagatgacctgctccatcaccaccacggctcccactgcagcagctcgggggaccccgctgagtacaacctgcgctcgccaccgtgctgtgcgggacctgcgggcagcctgccgacaagc

SEQ ID NO: 391 - DNA, 399 bp, Homo sapiens
  misc_feature (1)...(399): n = a,t,c or g
cctgcggcngccgcttcctgcaggccttcttcatcagtcactgtctgcctcgagcactgcagcctggccagcctggcactaccccaccacaggacgcagcccaggacccaaacctgagccccggcccttccccagcagtggctcggtgagccatgtgcacctatggcccagccactgcagcacaggaggctccgtgagcccttggttcctccccgaaaacccccagcattacgatcccccaagtgtcctggaccctggcctaaagaatcccacccccacttcatgcccactgccgatgcccaatccaggcccggtgaggccaaggtttcccagtgagcctctgcgcctctccactgtttcatgagcccaaacaccctcctggcacaacgctctaccctg

SEQ ID NO: 392 - DNA, 451 bp, Homo sapiens
ctgaccctgcggtaccggccggaattcccgggtcgacttcgctgtcgacgatttcgtgtttcctttcaaccagtggggcctgcagcctcgaagtctcctcctccaggccgcgcgcggatatgtcgtccggaaaccagcccagtctaggctggatgatgacccacctccttctacgctgctcaaagactaccagaatgtccctggaattgagaaggttgatgatgtcgtgaaaagactcttgtctttggaaatggccaacaagaaggagatgctaaaaatcaagcaagaacagtttatgaagaagattgttgcaaacccagaggacaccagatccctggaggctcgaattattgccttgtctgtcaagatccgcagttatgaagaacacttggagaaacatcgaaaggacaaagcccacaaacgctatctgctaatgagcattgaccagagg

SEQ ID NO: 393 - DNA, 449 bp, Homo sapiens
  misc_feature (1)...(449): n = a,t,c or g
ctggagcctgcggtaccggccggaattcccgggtcgacttcgctgtcgacgatttcgtatttggtgtctccagagctgtccaggaatttggtcttgcccggttcaaaagcaacgtgaccaagactatgaagggttttgaatatatcttggctaagctgcaaggcgaggccccttccaaaacacttgttgagacagccaagggagccaaggagaaggcaaaggagacggcactggcagctacagagaaaggcaaggacctcgccagcaaggcgccaccaagaagcagcagcagcagcaacagtttgtgtagccagtctaccaccaccacagcaccccagacagctaggcttagcccctctgccctcccttcattgtactttatcattaaaaatcaacttccagccctgtctgctgtctacgtggtgggttgtggggatgcagtttggcan

SEQ ID NO: 394 - DNA, 391 bp, Homo sapiens
attattcctcagatcgtcaagtacagtcctgattgcatcataattgtggtttccaacccagtggacattcttacgtatgttacctggaaactaagtggattacccaaacaccgcgtgattggaagtggatgtaatctggattctgctagatttcgctaccttatggctgaaaaacttggcattcatcccagcagctgccatggatggattttgggggaacatggcgactcaagtgtggctgtgtggagtggtgtgaatgtggcaggtgtttctctccaggaattgaatccagaaatgggaactgacaatgatagtgaaaattggaaggaagtgcataagatggtggttgaaagtgcctatgaagtcatcaagctaaaaggatataccaact

SEQ ID NO: 395 - DNA, 458 bp, Homo sapiens
ggtatcctgcaggtaccggtccggaattcccgggtcgacttcgctgtcgacgatttcgtagcttcacaatattaacagacccctgactatgaagaaggaaggcatccagaccagaaaccgaaaaatgtctagcaaatccaaaaagtgcaaaaaagtgcatgactcactggaggacttccccaagaacagctcgtttaaccccgggccgccttctccagacacatgtcctccctgagccacatctcgccccttcagccactccagccacatgctgaccacgcccacgccgatgcacccgccatccagcctgtcctttggaccacaccacccctccagcatggtcaccgccatgggttagagccctgctcgatgctcacagggcccccagcgagagtccctgcagtccctttcgacttgcatttttgcaggagcagtatcatgaagcctaaacgcgatgg

SEQ ID NO: 396 - DNA, 441 bp, Homo sapiens
  misc_feature (1)...(441): n = a,t,c or g
gtaccggtccggaattcccgggtcgacttcgctgtcgacgatttgtgtttagcacaagacacagcggcgtcgggattggctaaactcccatagtatttatggtggccgccgcgggggccccagcccagcttgcaggccacctctagctttcttcctaccccattcccggcttccctcctcctcccctgcagcctggttaggtggatacctgccctgacatgtgaggcaagctaaggcctggagggtcagatgggagaccaggtcccaagggagcaagacctcgcgaagcagcagccccggcccttcccccgttttgaacatgtgtaaccgacagtctgcctgggccacagccctctcaccctggtactgcatgcacgcaatgctagctgcccctttcccgtcctgggcaccccgagtctcccccgaccccgggtcccaggn

SEQ ID NO: 397 - DNA, 402 bp, Homo sapiens
  misc_feature (1)...(402): n = a,t,c or g
acaggccgccatttcctacgattttgtcacaacaacaaaaaaagccaacggtaacctttcttctggtttggggggggggggaacaaatgcttcaggctccggctttatctccaagattccacataatcttgaaggagatgtacgatgcagaccttttagaagaggaggccatcatcagctggccgggaaaaggcctctaagaaatatggtctccaaagaactttgccaaagagattcgtgtcanagcagaaccatttataaaatggttgaaggaggcagaggaagaatcttctggtggcgaagaagaagatgaagatgagaacattgaggtggtgtattcgaaggctgccagtgtaccgaaagttgagactgtaaagtcagacaacaaggatgacgacatcg

SEQ ID NO: 398 - DNA, 441 bp, Homo sapiens
  misc_feature (1)...(441): n = a,t,c or g
ggtaccggtccggaattcccgggtcgacgatttcgtctccccgctgccctgagctcggcgggctggcattcggcccgggggaaaagcggccgaggtctgcgaggctaagtgtctccgcggcgcacctcgcggcgagaatccggaggagaaggagactgcaaggataggcccagaaaacgaagagatggagcagcctatgcagaatggagagggagaccgcccttttggaggaggtgaaggccaccagcctgcaggaaatcgacggggacaggctcgccgacttgcccctaattttcgatgggccatacccaataggcagatcaatgatgggatgggtggagatggagatgatatggaaatattcatggaggagatgagagaaatcagaagaaaacttagggagctgcagttgaggaattgtctgcgtatccttatgggggn

SEQ ID NO: 399 - DNA, 4649 bp, Homo sapiens
ttttttttttttccaaaagtgttcttttatttctagtaacatatattgtataaatactctattttatatgcacttccacaaaagcgatataatttaaaagttttttttcattagaaataaatgtataaaaataaatatgttattataggcatttattactaactatagtccttcttggaaggaacacccaaaccaatacttataaagtacatgtaatttatagtaacatattttactatatacatatggaaaaaatcatattctcacagaagagctgaacagacattcaccaggatacgactgttggaccagctgctggagatggacctgctacccctcagcagcctccccaccacaagacaagtgatctcaatgtccccaaacctgtgggaccctgttctacacacctcatttttgttccggcgtttcatcctccttgtgtgattgtactgattttcatgagacacaagttacttctttacatccatattcccaaagcagggttacatggtaggaaagaaaggaagttggaggtactaagctcattgtgtctcctctagcttttaccagcatctaatgcttcactgctttttttccattgtagactttaatgcacttgaataaatacatggagttgttttttcctcaaaatgaattacacaaataaagactgagatggtccaaaaaaggaaagaggaagccatttgcgttatttcacgttgctgagcctttctctcatgttgaacaatctgaagttttaattctcggtagaaataatgtataaacattctctgaaaccatagcagccataaacagtgctggtcaaagatcctatttgtactcctttctccccccattgttagtgaggtaaagtaaaacaggtcttagtaaaatctcacttttctcctacttttcatttcccaacccccatgatactaagtatttgataagtaccaggaaacaggggttgtaatagttctaactttttttgacaattgctttgttttttctaaacttgtaatagatgtaacaaaagaaataataataataatgcccggggctttattatgctatatcactgctcagaggttaataatcctcactaactatcctatcaaatttgcaactggcagtttactctgatgattcaactccttttctatctacccccataatcccaccttactgatacacctcactggttactggcaagatacgctggatccctccagccttcttgctttccctgcaccagcccttcctcactttgccttgccctcaaagctaacaccacttaaaccacttaactgcattctgccattgtgcaaaagtctatgaaatgtttaggtttctttaaaggatcacagctctcatgagataacacccctccatcatgggacagacacttcaagcttctttttttgtaacccttcccacaggtcttagaacatgatgaccactcccccagctgccactgggggcagggatggtctgcacaaggtctggtgctggctggcttcacttcctttgcacactcggaagcaggctgtccattaatgtctcggcattctaccagtcttctctgccaacccaattcacatgacttagaacattcgccccactcttcaatgacccatgctgaaaaagtggggatagcattgaaagattccttcttcttctttacgaagtaggtgtatttaattttaggtcgaagggcattgcccacagtaagaacctggatggtcaagggctctttgagagggctaaagctgcgaattctttccaatgccgcagaggagccgctgtacctcaagacaacacctttgtacataatgtcttgctctaaggtggacaaagtgtagtcaccattaagaatatatgtgccatcagcagctttgatggcaagaaagctgccattgttcctggatcccctctggttccgctgtttcacttcgatgttggtggctccagttggaattgtgatgatatcatgatatccaggttttgcactagtaactgatcctgatatttttttacaagtagatccatttcccccgcaaacaccacatttatcaaacttctttttggagtctatgatgcgatcacaaccagcttttacacactgtccttgcacacagacagaggtggaatctgggctacatggagtaccatctacaaccttgggctgcaaaacgaagaagtagccaatgcctttggcttggcagatgagcttgcacctgtcctttggtgagacgccagcgtacttgggaatccattccaccgcaggcccactcccaaaggaagcttttgaaaactcgttgtgtgcttcacattgttcctctctaaaggtttttccattattgtctggacagtcctcaaggttacaggatctgtagcgcactcgtttgccttcacagtacttccctccattctttgggactgggttgtcacattccctcatcgtgtactggactcctccaccgcacgttctcgaacagtctccccaaggcccccacattccccagcttccatgaaaaggcgtatcaaaatgctttctgtcggttttgttcacacacttgccgttgatacaccatttcccttctccacagctggtgccatccgcccacgggaagtgtttggtttgacacaccagcaccccaccagaggtgccggtacaccacaaggtgctacatgtgctggctgcatcggggcagtgtttggagtcctccccaaatgtaaactggcactgccggttggcatcgtacgaggtgccagggagatcgcctgggagctgtatgggattctgaggcttgtccatcaaacattccccatgaccattatccagaaatgatgtaatcatgtaggcactgcaaggagaccaaggctggctgtggtccaggttggaaagcattgacgccatcatgtgggaatcctggttcacaccattaaggctggcacactgctttgcatcatcatgtggcatgttaaacacgtggcctaattcatgggctgtggtgaaggcagcttgtaaaccatcatcttctatgacggagcagcttctgctcggatcacacacagttccaacatcagccatcccaagagtatcacatgtctgggacccacacaagtcctgtctggtgaaaagaattgctgtgtcatagtgctctgcatcccggtcactgggtgggttgtgctgcttctgccagttgcaaaagttccgcagagtgagggcagcattggaggtcacttccggccccttctgttcatcgtggatgaccaagatcttcaccaccaccaggctaactgaattacgaatgctggggtgtttgtacaatctggctgccaccgaaaacaacgtgagaaggtaatgctttagaccactgccgtggaattctgccatcgactggtctgccacaagcatggtttccacatagcggtgactggacacaaatcgcttctttcttatgcttccagttcctgtgggctgtcctacgccttgcagtgccgggtcctgcggcgaccactgagccccttcgtcctcgccctcagtcccttcgtcctcgtcttcggtctccgctttcccagtcggccggggctcgtcgtccacgaccccgcacgtgccgccgacgtcgccctgccgattccgccgcaggaggtggaactgtagtggtgccggcggcttctcccctggggcggcggtggcgaggcgctcgctggcggcgggcagcggctggatgaaatacgcctcccccagcaggtagaaggcgccgcgcacgccctcgcagaggctgagggcggcagccgagctgggatcgccattcacggtgccggagtagaagcagtgcgccaggtcggtttccggaagcggcgtctcggacccggatttgcgccccacgttctggagcgtgaagccgggcgccaaaaagctgctgtcgggccgcagctccagatccagctgctggtcaaaggcgtgcaggcggaggcgcgtggtcccgtgtcccggggcgcgctccagctccggcaccactagctcctcgtcctcctcggaggggcgcccgagtgcgtccgacacggccagtagcgccgcggcgagcagcagcagcgtgggtacgggcccaaagctccgagaccccggagcccgctccgcgttccccatgtcgctgcccagcttgcgccttccgaacccctcgggcacagctcgctgcattggagccccaggagacaccgctcgtagcagcgcacggagcgagggagctttagttcgggtcgggagagcaaagcctcgttggcctgctctggattgttaaaattaacaatttctattattcgttggaagggcgcgcagagccggctacagccgaagctcccggagtcactaaaaggaggcgctgcagttctgccggcgcgcgggaagtttttcttccagcgcaaagttggagacactgagaggcaggcgcaggcagagtggctctgctgggacaagaagcgctctggggcgcctccggggctgaggcaacgcggagattggtgcccggcgcccctcttcggcctccgccttggctgcgatgttgctcactctgctcagggctctcccctctccgtccggtagcgcaccctggctttgcaatagcccctggctcggagccgct

SEQ ID NO: 400 - DNA, 469 bp, Homo sapiens
accggtccggaattcccgggtcgacgatttcgtcctgcagccacctggacgtcaaatgattgccatcagaaagagacaacctgaagaaaccaacaatgactattaaacagctgacggcggctacatgactctgaaccccagggcacctaacttgcgatgataaaaaacttctaactggactctttctcccaacggacatggcaacagtaataactaaagagtaacgttatgccatgtggtcacactctcagcttgcttgagtggatgacaaaaagaggggaattgttaaaggaaaatttaaatggagactggaaaaattcctgagcaaacaaaaccacctggcccttagaaatagctttaactttgcttaaactacaaacacaagcaaaacttcacggggtcatactacatacaagcataagcaaaacttaacttggatcatttctggtaaatgcttatgttagaaata

SEQ ID NO: 401 - DNA, 468 bp, Homo sapiens
taccggtccggaattcccgggtcgacgatttcgtcggacttcgaggaacaggcggattttcggcaaaacccttctttttcgaccacccacctaacaattcttggaaccatggcggcagtggcggcgcctcggttgaacttgctcatcatcggctggaacatcttccgcgtgctgctgcaggtgttcctggaatgctgcatttactgggtaggattcgcttttcgaaatcctccagggacacagcccattgcgagaagtgaggtgttcaggtactccctgcagaagctggcatacacggtgtcgcggaccgggcggcaggtgttgggggagcgcaggcagcgagcccccaactgaggccccagctcccagccctgggcggccgtatcatcaggtgctcctgtgcatctcggccagcacgggagccagtgccgcgcaggaatgtggggtcccctgtgttccctcgccaga

SEQ ID NO: 402 - DNA, 437 bp, Homo sapiens
gaccgttccgaaattcccgagtcgacccccttcgtagagagagagagaccgaggacgaggatgaggatgaagatgatattgaaccagcagcgatgaaagcagcagctgctgcccctgcctcagaggatgaggacgatgaggatgacgaagatgatgaggatgacgatgacgatgaggaagatgactctgaagaagaagctatggtagactacaccagccaaaggaaagaaagctgcaaaagttgttcctgtgaaagccaagaacgtggctgaggatgaagatgaagaagaggatgatgaggacgaggatgacgacgacgacgaagatgatgaagatgatgatgatgaagatgatgaggaggaggaagaagaggaggaggaagagcctgtcaaagaagcacctggaaaacgaaagaaggaaatggccaaacagaaagc

SEQ ID NO: 403 - DNA, 433 bp, Homo sapiens
gaccgatgcggaattcccgcctcgacgctttcgactgacccatgcctgctgccagccacccagacgccgttgtccaatggcagatcattctgctgaccctatagagagtcgcattaacttcatgacgggcaccatttccagtatgtaccaaaccaaagccgtcatcattgcaatgatcatcactgcgcgggtatccatttcagtcaccatcttctgctttcagaccaaggtggacttcacctcgtgcacaggcctcttctgtgtcctgggaattgtgctcctggtgactgggattgtcactagcattgtgctctacttccaatacgtttactggctccacatgctctatgctgctctgggggccatttgtttcaccctgttcctggcttacgacacacagctggtcctggggaaccggaagcacaccatcagt

SEQ ID NO: 404 - DNA, 436 bp, Homo sapiens
aacggctccggcatgtgcaaggccgcgcttcgcgggcgacgatgccccccggccgtcttcccctccatcgtggggcgccccaggcaccagggcgtgatggtgggcatgggtcagaaggattcctatgtgggcgacgaggcccagagcaagagaggcatcctcaccctgaagtaccccatcgagcacggcatcgtcaccaactgggacgacatggagaaaatctggcaccacaccttctacaatgagctgcgtgtggctcccgaggagcaccccgtgctgctgaccgaggcccccctgaaccccaaggccaaccgcgagaagatgacccagatcatgtttgagaccttcaacaccccagccatgtacgttgctatccaggctgtgctatccctgtacgcctctggccgtaacactggcatcgtgatggactccggtg

SEQ ID NO: 405 - DNA, 424 bp, Homo sapiens
  misc_feature (1)...(424): n = a,t,c or g
ggtacggtccggaattcccgggtcgacgatttcgtttttttttaggaccacaagaagatcttaaagacacaaagaacattctacatagtttgtcaaatccagcatttgacggtcctctgggtgacccggagaacaccaaggctgtgagaaatgggaggcctcctggcagctccactccccagacccgcctctgccagggctccaggctcagcaggcgcctgggggcgaactccttctggcacatggggcagctgcgcagggccgcggcaccctccacagacggctgctgctccaccctgggggccctgcaggnatcaggtgccgggcgctggggcagggacctggcgggggattccaggtgccctcctgccccgtgaagcagccggtaggaacggcccgggccccacaggtccggcggaaaggt

SEQ ID NO: 406 - DNA, 642 bp, Homo sapiens
atggctgccccagcagtgtccgggctctcccggcaggtgcgatgcttcagtacctctgtggtcagaccatttgccaagcttgtgaggcctcctgttcaggtatacggtattgaaggtcgctatgccacagctctttattctgctgcatcaaaacagaataagctggagcaagtagaaaaggagttgttgagagtagcacaaatcctgaaggaacccaaagtggctgcttctgttttgaatccctatgtgaagcgttccattaaagtgaaaagcctaaatgacatcacagcaaaagagaggttctctcccctcactaccaacctgatcaatttgcttgctgaaaatggtcgattaagcaatacccaaggagtcgtttctgccttttctaccatgatgagtgtccatcgcggagaggtaccttgcacagtgacctctgcatctcctttagaagaagccacactctctgaattaaaaactgtcctcaagagcttcctaagtcaaggccaagtattgaaattggaggctaagactgatccgtcaatcttgggtggaatgattgtgcgcattggcgagaaatatgttgacatgtctgtcaagaccaagattcagaagctgggcagggctatgcgggagattgtctaa

SEQ ID NO: 407 - DNA, 720 bp, Homo sapiens
atggccaagccgtgtggggtgcgcctgagcggggaagcccgcaaacaggtggaggtcttcaggcagaatcttttccaggaggctgaggaattcctctacagattcttgccacagaaaatcatatacctgaatcagctcttgcaagaggactccctcaatgtggctgacttgacttccctccgggccccactggacatccccatcccagaccctccacccaaggatgatgagatggaaacagataagcaggagaagaaagaagtccctaagtgtggatttctccctgggaatgagaaagtcctgtccctgcttgccctggttaagccagaagtctggactctcaaagagaaatgcattctggtgattacatggatccaacacctgatccccaagattgaagatggaaatgattttggggtagcaatccaggagaaggtgctggagagggtgaatgccgtcaagaccaaagtggaagctttccagacaaccatttccaagtacttctcagaacgtggggatgctgtggccaaggcctccaaggagactcatgtaatggattaccgggccttggtgcatgagcgagatgaggcagcctatggggagctcagggccatggtgctggacctgagggccttctatgctgagctttatcatatcatcagcagcaacctggagaaaattgtcaccccaaagggtgaagaaaagccatctatgtactga

SEQ ID NO: 408 - DNA, 1278 bp, Homo sapiens
atggcgagtaaagagatgtttgaagatactgtggaggagcgtgtcatcaatgaagaatataaaatctggaagaagaatacaccgtttctatatgacctggttatgacccatgctcttcagtggcccagtcttaccgttcagtggcttcctgaagtgactaaacctgaaggaaaagattatgcccttcattggctagtgctggggactcatacgtctgatgagcagaatcatctggtggttgctcgagtacatattcccaatgatgatgcacagtttgatgcttcccattgtgacagtgacaagggtgaatttggtggctttggttctgtaacaggaaaaattgaatgtgaaattaaaatcaatcacgaaggagaagtaaaccgtgctcgttacatgccgcagaatcctcacatcattgctacaaaaacaccatcttctgatgtgttggtttttgactatacaaaacaccctgctaaaccagacccaagtggagaatgtaatcctgatctcagattaagaggtcaccagaaggaaggctatggtctctcctggaattcaaatttgagtggacatctcctaagtgcatctgatgaccatactgtttgtctgtgggatataaacgcaggaccaaaagaaggcaaaattgtggatgctaaagccatctttactggccactcagctgttgtagaggatgtggcctggcacctgctgcacgagtcattgtttggatctgttgctgatgatcagaaacttatgatatgggacaccaggtccaataccacctccaagccgagtcacttggtggatgcgcacactgccgaagtcaactgcctctcattcaatccctacagcgaatttattctagccaccggctctgcggataagaccgtagctttatgggatctgcgtaacttaaaattaaaactccataccttcgaatctcataaagatgaaattttccaggtccactggtctccacataatgaaactattctggcttcaagtggtactgaccgccgcctgaatgtgtgggatttaagtaaaattggggaagaacaatcagcagaagatgcagaagatgggcctccagaactcctgtttattcatggaggacacactgctaagatttcagattttagctggaaccccaatgagccttgggtcatttgctcagtgtctgaggataacatcatgcagatatggcaaatggctgaaaatatttacaatgatgaagagtcagatgtcacgacatccgaactggagggacaaggatcttaa

SEQ ID NO: 409 - DNA, 978 bp, Homo sapiens
atgaagccgatcctactgcagggccatgagcggtccattacgcagattaagtataaccgcgaaggagacctcctctttactgtggccaaggaccctatcgtcaatgtatggtactctgtgaatggtgagaggctgggcacctacatgggccataccggagctgtgtggtgtgtggacgctgactgggacaccaagcatgtcctcactggctcagctgacaacagctgtcgtctctgggactgtgaaacaggaaagcagctggcccttctcaagaccaattcggctgtccggacctgcggttttgactttgggggcaacatcatcatgttctccacggacaagcagatgggctaccagtgctttgtgagcttttttgacctgcgggatccgagccagattgacaacaatgagccctacatgaagatcccttgcaatgactctaaaatcaccagtgctgtttggggacccctgggggagtgcatcatcgctggccatgagagtggagagctcaaccagtatagtgccaagtctggagaggtgttggtgaatgttaaggagcactcccggcagatcaacgacatccagttatccagggacatgaccatgtttgtgaccgcgtccaaggacaacacagccaagctttttgactccacaactcttgaacatcagaagactttccggacagaacgtcctgtcaactcagctgccctctcccccaactatgaccatgtggtcctgggcggtggtcaggaagccatggatgtaaccacaacctccaccaggattggcaagtttgaggccaggttcttccatttggcctttgaagaagagtttggaagagtcaagggtcactttggacctatcaacagtgttgccttccatcctgatggcaagagctacagcagcggcggcgaagatggttacgtccgtatccattacttcgacccacagtacttcgaatttgagtttgaggcttaa

SEQ ID NO: 410 - DNA, 9471 bp, Homo sapiens
ggcggccaggggcgggcggccgcagagcagcaccggccgtggctccggtagcagcaagttcgaaccccgctcccgctccgcttcggttctcgctccttcggcccttgggcctccaaacaccagtccccggcagctcgttgcgcattgcgctctccccgccaccaggatgccggtaaccgagaaggatctagctgaggacgcgccttggaagaagatccagcagaacacgttcacacgctggtgcaacgagcacctcaagtgcgtgaacaaacgcatcggcaacctgcagaccgacctgagcgacgggctgcggctcatcgcgctgctcgaggtgctcagccagaagcgcatgtaccgcaagtaccatcagcggcccacctttcgccagatgcagctcgagaatgtgtccgtggcgctcgagttcctggaccgtgagagcatcaagctcgtgtccatcgatagcaaagccattgtggatgggaacctgaagctcatcttgggtctggtgtggacgctgatcctccactactccatctccatgcccgtgtgggaggatgaaggggatgatgatgccaagaagcagacgccaaagcagaggctgctggggtggattcagaacaagatcccctacttgcccatcaccaactttaaccagaactggcaagacggcaaagccctgggagccctggtagacagctgtgctccaggtctgtgcccagactgggaatcctgggacccgcagaagcctgtggataatgcacgagaagccatgcagcaggcagatgactggctgggtgtcccacaggtcatcactcctgaagaaatcattcacccggatgtggacgagcactcagttatgacttacctgtcccagttccccaaagccaagctcaagccgggggctcctctcaaacccaaactcaacccgaagaaagccagggcctatggcagaggaatcgagcccactggaaacatggtgaagcagccagccaagttcactgtggacaccatcagcgccgggcaaggagacgtgatggtgtttgttgaggacccagaagggaacaaagaggaggcacaagtgacccctgacagcgacaagaacaagacatactctgtggagtatctgcccaaggtcaccgggctacacaaagtcacagtcctctttgcaggacagcacatctccaagagcccatttgaagtgagtgttgacaaggcccagggagatgccagtaaagtcactgcaaaaggtccagggttggaagctgtagggaacatcgccaataagcccacctactttgacatctatacggcaggagctggtgtgggtgacattggtgtggaggtggaagatccccaggggaagaacaccgtggagttgctcgtggaagacaaaggaaaccaggtgtatcgatgtgtgtacaaacccatgcagcctggccctcacgtggtcaagatcttctttgctggggacactattcctaagagtcccttcgttgtgcaggttggggaagcctgcaatccaaatgcctgccgggccagtggccgaggcctacaacccaaaggcgtccgtatccgggagaccacagatttcaaggttgacaccaaagctgcaggaagtggggagctcggggtaaccatgaagggtcctaagggtctggaggagctggtgaagcagaaagactttctggatggggtctacgcattcgagtattaccccagcaccccggggagatacagcattgccatcacatgggggggacaccacattccaaagagcccctttgaagttcaagttggccctgaagcgggtatgcagaaagtccgtgcttggggccctgggctccatggtgggattgtcgggcggtcagcggacttcgtggtagaatccattggctctgaagtggggtctctggggtttgccattgaaggcccctctcaggcaaagattgagtacaacgaccagaatgatggatcgtgtgatgtcaaatactggcccaaggagcctggcgaatatgctgttcacatcatgtgtgacgacgaagacatcaaggacagcccgtacatggccttcatccacccagccacgggaggctacaaccctgatctggttcgagcatacgggccaggtttggagaaatctggatgcattgtcaacaacctggccgagttcactgtggatcctaaggatgctggaaaagctcccttaaagatatttgctcaggatggggaaggccaacgcattgacatccagatgaagaaccggatggacggcacatatgcatgctcatacaccccggtgaaggccatcaagcacaccattgctgtggtctggggaggcgtgaacatcccgcacagcccctacagggtcaacatcgggcaaggtagccatcctcagaaggtcaaagtgtttgggccaggtgtggagagaagtggtctgaaggcaaatgaacctacacacttcacggtggactgtactgaggctggggaaggtgatgtcagtgttggcattaagtgtgatgcccgggtgttaagtgaagatgaggaagacgtggattttgacattattcacaatgccaatgatacgttcacagtcaaatatgtgcctcctgctgctgggcgatacactatcaaagttctctttgcatctcaggaaatccccgccagccctttcagagtcaaagttgacccttcccacgatgccagcaaagtgaaggcagaaggcccagggctcagcaaagcaggtgtggaaaatgggaaaccgacccacttcactgtctacaccaagggggctgggaaagccccgctcaacgtgcagttcaacagccctcttcctggcgatgcagtgaaggatttggatatcatcgataattatgactactctcacacggttaaatatacacccacccaacagggcaacatgcaggttctggtgacttacggtggcgatcccatccctaaaagccctttcactgtgggtgttgctgcaccgctggatctgagcaagataaaactcaatgggctggaaaacagggtggaagttgggaaggatcaggagttcaccgttgataccaggggggcaggaggccaggggaagctggacgtgacaatcctcagcccctctcggaaggtcgtgccatgcctagtgacacctgtgacaggccgggagaacagcacggccaagttcatccctcgggaggaggggctgtatgctgtagacgtgacctacgatggacaccctgtgcccgggagcccctacacagtggaggcctcgctgccaccagatcccagcaaggtgaaggcccacggtcccggcctcgaaggtggtctcgtgggcaagcctgccgagttcaccatcgataccaaaggagctggtactggaggtctgggcttaacggtggaaggtccgtgcgaggccaaaatcgagtgctccgacaatggtgatgggacctgctccgtctcttaccttcccacaaaacccggggagtacttcgtcaacatcctctttgaagaagtccacatacctgggtctcccttcaaagctgacattgaaatgccctttgacccctctaaagtcgtggcatcggggccaggtctcgagcacgggaaggtgggtgaagctggcctccttagcgtcaactgctcggaagcgggaccgggggccctgggcctggaagctgtctcggactcgggaacaaaagccgaagtcagtattcagaacaacaaagatggcacctacgcggtgacctacgtgcccctgacggccggcatgtacacgttgaccatgaagtatggtggcgaactcgtgccacacttccccgcccgggtcaaggtggagcccgccgtggacaccagcaggatcaaagtctttggaccaggaatagaagggaaagatgtgttccgggaagctaccaccgactttacagttgactctcggccgctgacccaggttgggggtgaccacatcaaggcccacattgccaacccctcaggggcctccaccgagtgctttgtcacagacaatgcggatgggacctaccaggtggaatacacaccctttgagaaaggtctccatgtagtggaggtgacatatgatgacgtgcctatcccaaacagtcccttcaaggtggctgtcactgaaggctgccagccatctagggtgcaagcccaaggacctggattgaaagaggcctttaccaacaagcccaatgtcttcaccgtggttaccagaggcgcaggaattggtgggcttggcataactgttgagggaccatcagagtcgaagataaattgcagagacaacaaggatggcagctgcagtgctgagtacattcctttcgcgccgggggattacgatgttaatatcacatatggaggagcccacatccctggcagccccttcagggttcctgtgaaggatgttgtggaccccagcaaggtcaagattgccggccccgggctgggctcaggcgtccgagcccgtgtcctgcagtccttcacggtggacagcagcaaggctggcctggctccgctggaagtgagggttctgggcccacgaggcttggtggagccagtgaacatggtggacaatggagatggcacacacacagtaacctacaccccatctcaggagggaccttacatggtctcagttaaatatgctgatgaagagattcctcgcagtcccttcaaggtcaaggtccttcccacatatgatgccagcaaagtgactgccagtggccccggccttagttcctatggtgtgcctgccagtctacctgtggactttgcaattgatgcccgagatgccggggaaggcctgcttgctgttcaaataacggaccaagaaggaaaacccaaaagagccattgtccatgacaataaagatggcacgtatgctgtcacctacatccccgacaagactgggcgctatatgattggagtcacctacgggggtgacgacatcccactttctccttatcgcatccgagccacacagacgggtgatgccagcaagtgcctggccacgggtcctggaatcgcctccactgtgaaaactggcgaagaagtaggctttgtggttgatgccaagactgccgggaagggtaaagtgacctgcacggttctgaccccagatggcactgaggccgaggccgatgtcattgagaatgaagatggaacctatgacatcttctacacagctgccaagccgggcacatatgtgatctatgtgcgcttcggtggtgttgatattcctaacagccccttcactgtcatggccacagatggggaagtcacagccgtggaggaggcaccggtaaatgcatgtccccctggattcaggccctgggtgaccgaagaggcctatgtcccagtgagtgacatgaacggcctgggatttaagccttttgacctggtcattccgtttgctgtcaggaaaggagaaatcactggagaggtccacatgccttctgggaagacagccacacctgagattgtggacaacaaggacggcacggtcactgttagatatgcccccactgaggtcgggctccatgagatgcacatcaaatacatgggcagccacatccctgagagcccactccagttctacgtgaactaccccaacagtggaagtgtttctgcatacggtccaggcctcgtgtatggagtggccaacaaaactgccaccttcaccatcgtcacagaggatgcaggagaaggtggtctggacttggctattgagggcccctcaaaagcagaaatcagctgcattgacaataaagatgggacatgcacagtgacctacctgccgactctgccaggcgactacagcattctggtcaagtacaatgacaagcacatccctggcagccccttcacagccaagatcacagatgacagcaggcggtgctcccaggtgaagttgggctcagccgctgacttcctgctcgacatcagtgagactgacctcagcagcctgacggccagcattaaggccccatctggccgagacgagccctgtctcctgaagaggctgcccaacaaccacattggcatctccttcatcccccgggaagtgggcgaacatctggtcagcatcaagaaaaatggcaaccatgtggccaacagccccgtgtctatcatggtggtccagtcggagattggtgacgcccgccgagccaaagtctatggccgcggcctgtcagaaggccggactttcgagatgtctgacttcatcgtggacacaagggatgcaggttatggtggcatatccttggcggtggaaggccccagcaaagtggacatccagacggaggacctggaagatggcacctgcaaagtctcctacttccctaccgtgcctggggtttatatcgtctccaccaaattcgctgacgagcacgtgcctgggagcccatttaccgtgaagatcagtggggagggaagagtcaaagagagcatcacccgcaccagtcgggccccgtccgtggccactgtcgggagcatttgtgacctgaacctgaaaatcccagaaatcaacagcagtgatatgtcggcccacgtcaccagcccctctggccgtgtgactgaggcagagattgtgcccatggggaagaactcacactgcgtccggtttgtgccccaggagatgggcgtgcacacggtcagcgtcaagtaccgtgggcagcacgtcaccggcagccccttccagttcaccgtggggccacttggtgaaggaggcgcccacaaggtgcgggcaggaggccctggcctggagagaggagaagcgggagtcccagctgagttcagcatttggacccgggaagcaggcgctggaggcctctccatcgctgttgagggccccagtaaggccgagattacattcgatgaccataaaaatgggtcgtgcggtgtatcttatattgcccaagagcctggtaactacgaggtgtccatcaagttcaatgatgagcacatcccggaaagcccctacctggtgccggtcatcgcaccctccgacgacgcccgccgcctcactgttatgagccttcaggaatcgggattaaaagttaaccagccagcatcctttgctataaggttgaatggcgcaaaaggcaagattgatgcaaaggtgcacagcccctctggagccgtggaggagtgccacgtgtctgagctggagccagataagtatgctgttcgcttcatccctcatgagaatggtgtccacaccatcgatgtcaagttcaatgggagccacgtggttggaagccccttcaaagtgcgcgttggggagcctggacaagcggggaaccctgccctggtgtccgcctatggcacgggactcgaagggggcaccacaggtatccagtcggaattctttattaacaccacccgagcaggtccagggacattatccgtcaccatcgaaggcccatccaaggttaaaatggattgccaggaaacacctgaagggtacaaagtcatgtacacccccatggctcctggtaactacctgatcagtgtcaaatacggtgggcccaaccacatcgtgggcagtcccttcaaggccaaggtgacaggccagcgtctagttagccctggctcagccaacgagacctcatccatcctggtggagtcagtgaccaggtcgtctacagagacctgctatagcgccattcccaaggcatcctcggacgccagcaaggtgacctctaagggggcagggctctcaaaggcctttgtgggccagaagagttccttcctggtggactgcagcaaagctggctccaacatgctgctgatcggggtccatgggcccaccaccccctgcgaggaggtctccatgaagcatgtaggcaaccagcaatacaacgtcacatacgtcgtcaaggagaggggcgattatgtgctggctgtgaagtggggggaggaacacatccctggcagcccttttcatgtcacagtgccttaaaacagttttctcaaatcctggagagagttcttgtggttgcctttgttgcttgtttgtaattcattttatacaaagccctccagcctgtttgtggggctgaaaccccatccctaaaatattgctgttgtaaaatgccttcagaaataagtcctagactggactcttgagggacatattggagaatcttaagaaatgcaagcttgttcagggggctgagaagatcctgagtacactaggtgcaaaccagaactcttggtggaacagaccagccactgcagcagacagaccaggaacacaatgagactgacatttcaaaaaaacaaaactggctagcctgagctgctggttcactcttcagcatttatgaaacaaggctaggggaagatgggcagagaaaaaggggacacctagtttggttgtcatttggcaaaggagatgacttaaaatccgcttaatctcttccagtgtccgtgttaatgtatttggctattagatcactagcactgctttaccgctcctcatcgccaacacccccatgctctgtggccttcttacacttctcagagggcagagtggcagccgggcaccctacagaaactcagagggcagagtggcagccaggcccacatgtctctcaagtacctgtcccctcgctctggtgattatttcttgcagaatcaccacacgagaccatcccggcagtcatggttttgctttagttttccaagtccgtttcagtcccttccttggtctgaagaaattctgcagtggcgagcagtttcccacttgccaaagatcccttttaaccaacactagcccttgtttttaacacacgctccagcccttcatcagcctgggcagtcttaccaaaatgtttaaagtgatctcagaggggcccatggattaacgccctcatcccaaggtccgtcccatgacataacactccacacccgccccagccaacttcatgggtcactttttctggaaaataatgatctgtacagacaggacagaatgaaactcctgcggctctttggcctgaaagttgggaatggttgggggagagaagggcagcagcttattggtggtcttttcaccattggcagaaacagtgagagctgtgtggtgcagaaatccagaaatgaggtgtagggaattttgcctgccttcctgcagacctgagctggctttggaatgaggttaaagtgtcagggacgttgcctgagcccaaatgtgtagtgtggtctgggcaggcagacctttaggttttgctgcttagtcctgaggaagtggccactcttgtggcaggtgtagtatctggggcgagtgttgggggtaaaagcccaccctacagaaagtggaacagcccggagcctgatgtgaaaggaccacgggtgttgtaagctgggacacggaagccaaactggaatcaaacgccgactgtaaattgtatcttataacttattaaataaaacatttgctccgtaaaaaaaaaa

SEQ ID NO: 411 - DNA, 1122 bp, Homo sapiens
atggagcttccctcagggccggggccggagcggctctttgactcgcaccggcttccgggtgactgcttcctactgctcgtgctgctgctctacgcgccagtcgggttctgcctcctcgtcctgcgcctgtttctcgggatccacgtcttcctggtcagctgcgcgctgccagacagcgtccttcgcagattcgtagtgcggaccatgtgtgcggtgctagggctcgtggcccggcaggaggactccggactccgggatcacagtgtcagggtcctcatttccaaccatgtgacacctttcgaccacaacatagtcaatttgcttaccacctgtagcacccctctactcaatagtccccccagctttgtgtgctggtctcggggcttcatggagatgaatgggcggggggagttggtggagtcactcaagagattctgtgcttccacgaggcttccccccactcctctgctgctattccctgaggaagaggccaccaatggccgggaggggctcctgcgcttcagttcctggccattttctatccaagatgtggtacaacctcttaccctgcaagttcagagacccctggtctctgtgacggtgtcagatgcctcctgggtctcagaactgctgtggtcacttttcgtccctttcacggtgtatcaggtaaggtggcttcgtcctgttcatcgccaactaggggaagcgaatgaggagtttgcactccgtgtacaacagctggtggccaaggaattgggccagacagggacacggctcactccagctgacaaagcagagcacatgaagcgacaaagacaccccagattgcgcccccagtcagcccagtcttctttccctccctcccctggtccttctcctgatgtgcaactggcaactctggctcagagagtcaaggaagttttgccccatgtgccattgggtgtcatccagagagacctggccaagactggctgtgtagacttgactatcactaatctgcttgagggggccgtagctttcatgcctgaagacatcaccaagggaactcagtccctacccacagcctctgcctccaaggcattcgatgcgtgtttaatgatgatgactccgcaagccctctga

SEQ ID NO: 412 - DNA, 735 bp, Homo sapiens
atggagacagttaataacttactgactatgatgtccacatcaaactctaaggaccccactgttgctaaagaagaacaaatcagcttcagagactgtgctgaagtattcaaatcaggacacaccacgaatggcatctacacgttaacattccctaattctacagaagagatcaaggcctactgtgacatggaagctggaggaggcgggtggacaattattcagcgacgtgaggatggcagcgttgattttcagaggacttggaaagaatataaagtgggatttggtaacccttcaggagaatattggctgggaaatgagtttgtttcgcaactgactaatcagcaacgctatgtgcttaaaatacaccttaaagactgggaagggaatgaggcttactcattgtatgaacatttctatctctcaagtgaagaactcaattataggattcaccttaaaggacttacagggacagccggcaaaataagcagcatcagccaaccaggaaatgattttagcacaaaggatggagacaacgacaaatgtatttgcaaatgttcacaaatgctaacaggaggctggtggtttgatgcatgtggtccttccaacttgaacggaatgtactatccacagaggcagaacacaaataagttcaacggcattaaatggtactactggaaaggctcaggctattcgctcaaggccacaaccatgatgatccgaccagcagatttctaa

SEQ ID NO: 413 - DNA, 540 bp, Homo sapiens
atgtccaccggctccctcagcgatgtggaggaccttcaagaggtggagatgttggaatgtgacgggttgaaaatggattcgaacaaggaatttgtgacttccaacgagagcaccgaggagagctccaactgcgagaatgggtctccccagaagggccgcggcggcctgggcaagaggaggaaggcgcccaccaagaagagccccctgagcggggtcagccaggaggggaagcaggtccagcgcaacgccgccaacgcgcgagagcgggcccgcatgcgagtgctgagcaaggccttctccagactcaagaccaccctgccctgggtgccccccgacaccaagctctccaagctggacacgctcaggctggcgtccagctacatcgcccacttgaggcagatcctggctaacgacaaatacgagaacgggtacattcacccggtcaacctgacgtggccctttatggtggccgggaaacccgagagtgacctgaaagaagtggtgaccgcgagccgcttatgtggaaccaccgcgtcctga

SEQ ID NO: 414 - DNA, 687 bp, Homo sapiens
atgccggtcaaaggaggcaccaagtgcatcaaatacctgctgttcggatttaacttcatcttctggcttgccgggattgctgtccttgccattggactatggctccgattcgactctcagaccaagagcatcttcgagcaagaaactaataataataattccagcttctacacaggagtctatattctgatcggagccggcgccctcatgatgctggtgggcttcctgggctgctgcggggctgtgcaggagtcccagtgcatgctgggactgttcttcggcttcctcttggtgatattcgccattgaaatagctgcggccatctggggatattcccacaaggatgaggtgattaaggaagtccaggagttttacaaggacacctacaacaagctgaaaaccaaggatgagccccagcgggaaacgctgaaagccatccactatgcgttgaactgctgtggtttggctgggggcgtggaacagtttatctcagacatctgccccaagaaggacgtactcgaaaccttcaccgtgaagtcctgtcctgatgccatcaaagaggtcttcgacaataaattccacatcatcggcgcagtgggcatcggcattgccgtggtcatgatatttggcatgatcttcagtatgatcttgtgctgtgctatccgcaggaaccgcgagatggtctag

SEQ ID NO: 415 - DNA, 2727 bp, Homo sapiens
atggaggagggaggccgggacaaggcgccggtgcagccccagcagtctccagcggcggcccccggcggcacggacgagaagccgagcggcaaggagcggcgggatgccggggacaaggacaaagaacaggagctgtctgaagaggataaacagcttcaagatgaactggagatgctcgcggaacgactaggggagaaggatacatccctgtatcgaccagcgctggaggaattgcgaaggcagattcgttcttctacaacttccatgacttcagtgcccaagcctctcaaatttctgcgtccacactatggcaaactgaaggaaatctatgagaacatggcccctggggagaataagcgttttgctgctgacatcatctccgttttggccatgaccatgagtggggagcgtgagtgcctcaagtatcggctagtgggctcccaggaggaattggcatcatggggtcatgagtatgtcaggcatctggcaggagaagtggctaaggagtggcaggagctggatgacgcagagaaggtccagcgggagcctctgctcactctggtgaaggaaatcgtcccctataacatggcccacaatgcagagcatgaggcttgcgacctgcttatggaaattgagcaggtggacatgctggagaaggacattgatgaaaatgcatatgcaaaggtctgcctttatctcaccagttgtgtgaattacgtgcctgagcctgagaactcagccctactgcgttgtgccctgggtgtgttccgaaagtttagccgcttccctgaagctctgagattggcattgatgctcaatgacatggagttggtagaagacatcttcacctcctgcaaggatgtggtagtacagaaacagatggcattcatgctaggccggcatggggtgttcctggagctgagtgaagatgtcgaggagtatgaggacctgacagagatcatgtccaatgtacagctcaacagcaacttcttggccttagctcgggagctggacatcatggagcccaaggtgcctgatgacatctacaaaacccacctagagaacaacaggtttgggggcagtggctctcaggtggactctgcccgcatgaacctggcctcctcttttgtgaatggctttgtgaatgcagcttttggccaagacaagctgctaacagatgatggcaacaaatggctttacaagaacaaggaccacggaatgttgagtgcagctgcatctcttgcgatgattctgctgtgggatgtggatggtggcctcacccagattgacaagtacctgtactcctctgaggactacattaagtcaggagctcttcttgcctgtggcatagtgaactctggggtccggaatgagtgtgaccctgctctggcactgctctcagactatgttctccacaacagcaacaccatgagacttggttccatctttgggctaggcttggcttatgctggctcaaatcgtgaagatgtcctaacactgctgctgcctgtgatgggagattcaaagtccagcatggaggtggcaggtgtcacagctttagcctgtggaatgatagcagtagggtcctgcaatggagatgtaacttccactatccttcagaccatcatggagaagtcagagactgagctcaaggatacttatgctcgttggcttcctcttggactgggtctcaaccacctggggaagggtgaggccatcgaggcaatcctggctgcactggaggttgtgtcagagccattccgcagttttgccaacacactggtggatgtgtgtgcatatgcaggctctgggaatgtgctgaaggtgcagcagctgctccacatttgtagcgaacactttgactccaaagagaaggaggaagacaaagacaagaaggaaaagaaagacaaggacaagaaggaagcccctgctgacatgggagcacatcagggagtggctgttctggggattgcccttattgctatgggggaggagattggtgcagagatggcattacgaacctttggccacttgctgagatatggggagcctacactccggagggctgtacctttagcactggccctcatctctgtttcaaatccacgactcaacatcctggataccctaagcaaattctctcatgatgctgatccagaagtttcctataactccatttttgccatgggcatggtgggcagtggtaccaataatgcccgtctggctgcaatgctgcgccagttagctcaatatcatgccaaggacccaaacaacctcttcatggtgcgcttggcacagggcctgacacatttagggaagggcacccttaccctctgcccctaccacagcgaccggcagcttatgagccaggtggccgtggctggactgctcactgtgcttgtctctttcctggatgttcgaaacattattctaggcaaatcacactatgtattgtatgggctggtggctgccatgcagccccgaatgctggttacgtttgatgaggagctgcggccattgccagtgtctgtccgtgtgggccaggcagtggatgtggtgggccaggctggcaagccgaagactatcacagggttccagacgcatacaaccccagtgttgttggcccacggggaacgggcagaattggccactgaggagtttcttcctgttacccccattctggaaggttttgttatccttcggaagaaccccaattatgatctctaa

SEQ ID NO: 416 - DNA, 966 bp, Homo sapiens
atggccatggcaaccaaaggaggtactgtcaaagctgcttcaggattcaatgccatggaagatgcccagaccctgaggaaggccatgaaagggctcggcaccgatgaagacgccattattagcgtccttgcctaccgcaacaccgcccagcgccaggagatcaggacagcctacaagagcaccatcggcagggacttgatagacgacctgaagtcagaactgagtggcaacttcgagcaggtgattgtggggatgatgacgcccacggtgctgtatgacgtgcaagagctgcgaagggccatgaagggagccggcactgatgagggctgcctaattgagatcctggcctcccggacccctgaggagatccggcgcataagccaaacctaccagcagcaatatggacggagccttgaagatgacattcgctctgacacatcgttcatgttccagcgagtgctggtgtctctgtcagctggtgggagggatgaaggaaattatctggacgatgctctcgtgagacaggatgcccaggacctgtatgaggctggagagaagaaatgggggacagatgaggtgaaatttctaactgttctctgttcccggaaccgaaatcacctgttgcatgtgtttgatgaatacaaaaggatatcacagaaggatattgaacagagtattaaatctgaaacatctggtagctttgaagatgctctgctggctatagtaaagtgcatgaggaacaaatctgcatattttgctgaaaagctctataaatcgatgaagggcttgggcaccgatgataacaccctcatcagagtgatggtttctcgagcagaaattgacatgttggatatccgggcacacttcaagagactctatggaaagtctctgtactcgttcatcaagggtgacacatctggagactacaggaaagtactgcttgttctctgtggaggagatgattaa

SEQ ID NO: 417 - DNA, 2313 bp, Homo sapiens
atgtctaacgaagtagaaacaagtgcaaccaatggtcagcccgaccaacaggccgcaccaaaagcaccctcaaagaaggaaaaaaagaaaggccctgaaaagacagatgaatatctcttagcaaggttcaaaggcgatggtgtaaaatataaggccaagctgattggcattgatgatgtgccagatgcaagaggggataaaatgagccaagactctatgatgaaactaaagggaatggcggcacgtggtcggtctcagggacaacacaaacaaaggatctgggtcaacatttccctttctgggataaaaataattgatgagaaaactggggtaatagagcatgaacatccagtaaataagatttctttcattgcccgtgatgtgacagacaaccgggcatttggttacgtgtgtggaggagaaggccagcatcagttttttgccataaaaaccgggcaacaggctgaaccattagttgttgatcttaaagacctttttcaagttatctataatgtaaagaaaaaggaagaagaaaagaaaaagatagaggaagccagcaaagcagttgagaatgggagtgaggccctaatgattctagatgaccaaactaacaaactgaaatcgggtgttgaccagatggatttgtttggggacatgtctacacctcctgacctaaatagtccaacagaaagcaaagatatcctgttagtggatctaaactctgaaatcgacaccaatcagaattctttaagagaaaatccattcttaacaaacggcatcacctcctgttctcttcctcgaccaacgcctcaggcatccttctcgcctgaaaatgccttttctgccaatctcaacttctttcccacccctaatcctgatcctttccgtgacgatcctttcacacagccagaccaatcgacaccttcttcgtttgattctctcaaatctccagatcagaagaaagagaattcgagtagctcgtctactccgctgagtaatgggcccctgaatggtgatgttgactactttggtcagcaatttgaccagatctctaaccggactggcaaacaggaagctcaggcaggcccatggcccttttcaagttcgcaaacccagccagcagtgagaactcaaaatggggtatctgaaagagaacagaacggcttctctgtcaaatcctccccgaacccttttgtgggaagccctcccaaaggactgtccatacagaatggcgtaaagcaggacttggaaagctctgtccagtcctcaccacatgactccatagccattatcccacctccacaaagtaccaaaccaggaagaggcagaaggactgctaagtcttcagccaatgacttgcttgcatcagacatctttgctcctcccgtctcagaaccttcaggccaggcgtcacccacaggacaacctacagccctgcagcccaaccctctggatctcttcaaaacaagtgctcctgccccagtggggcccctggtgggtctaggtggtgtaactgtcacactccctcaggcaggaccatggaacacagcatctttggtcttcaatcagtccccttcaatggctccgggagccatgatgggtggtcaaccttcaggttttagtcagcccgtcatttttggtacaagtccagctgtttcaggttggaaccagccttcaccctttgcagcctcaactccccctccagtgcctgttgtctgggggccttctgcatctgtggcacccaatgcttggtcaacaacaagccctttggggaatccttttcagagcaatatttttccagctcctgctgtgtccactcagcccccatccatgcactcctctctcctggtcactcctcctcagccacctcccagagctggccctcccaaggacatctccagtgatgccttcactgccttagacccacttggggataaagagatcaaggatgtgaaagaaatgtttaaggatttccaactgcggcagccacctgctgtgcccgcgcggaagggagagcagacttcttctgggactttgagtgcctttgccagttatttcaacagcaaggttggcattcctcaggagaatgcagaccatgatgactttgatgctaatcaactattgaacaagatcaatgaaccaccaaagccagctcccagacaagtttccctgccagttaccaaatctactgacaatgcatttgagaaccctttctttaaagattcttttggttcatcacaagcctctgtggcttcttctcaacctgtatcttctgagatgtatagggatccatttggaaatccttttgcctaa

SEQ ID NO: 418 - DNA, 444 bp, Homo sapiens
atggtgcacctgactcctgaggagaagtctgccgttactgccctgtggggcaaggtgaacgtggatgaagttggtggtgaggccctgggcaggctgctggtggtctacccttggacccagaggttctttgagtcctttggggatctgtccactcctgatgctgttatgggcaaccctaaggtgaaggctcatggcaagaaagtgctcggtgcctttagtgatggcctggctcacctggacaacctcaagggcacctttgccacactgagtgagctgcactgtgacaagctgcacgtggatcctgagaacttcaggctcctgggcaacgtgctggtctgtgtgctggcccatcactttggcaaagaattcaccccaccagtgcaggctgcctatcagaaagtggtggctggtgtggctaatgccctggcccacaagtatcactaa

SEQ ID NO: 419 - DNA, 2316 bp, Homo sapiens
atgggccgggctggcaccgggaccgggggcgaggcggtggccgcggtggtggcggggccgctgctgctgctgctgcttgcccggcccccgcctgcctccgccggctacagcgggaagagcgaggtggggctggtgtccgagcacttctcacaggccccgcagaggctgtccttctacagctggtatggcagtgccaggctcttccgcttccgcgtgcccccagatgctgtgcttctacgctggctcctgcaggtctcccgggagagcggcgctgcctgcaccgacgcggagatcaccgtgcacttccgttccggcgcccctccggtcatcaacccgctgggcaccagcttcccggacgacaccgcggtgcagccctccttccaggtcggggtgccgctgagcaccgcaccgagaagcaatgcctccgtcaacgtttcccacccggcccccggggactggttcgtggccgcccacctgcccccctcatcccagaagatcgagttgaagggcttggctcccacctgtgcctacgtcttccagcctgaactgctggtcacgcgggtggtcgagatttccatcatggagccggacgtgccccttcctcagaccctcctctcccatcccagctacctcaaggtctttgtccccgattacacgcgggagcttctgctggagctgcgggactgcgtgtccaatgggagcctgggctgccccgtgcgtctcaccgtgggcccggtcaccctgcctagcaacttccagaaggtgctcacctgcaccggtgccccctggccctgccgcctgctgctgccctcaccgccctgggaccggtggctgcaagtgacagctgagagcctggtggggcccctcgggacagtggctttcagtgctgtagctgccctcacagcttgcaggccacggagcgtgaccgtccagccccttctgcagagcagccaaaaccagagcttcaatgcctcctctggtctgctgtccccgagccccgaccaccaggacctgggcaggagtggcagggtggaccgcagccccttctgcctcacaaactacccagtcacgcgggaggacatggacgtggtgtcggtgcacttccagcccctggacagggtctcggtgagggtgtgttcggacacgccctccgtgatgcggctgcgcctgaacaccggcatggacagcgggggttccctcaccatctccctgcgggccaacaagacagagatgcggaacgagaccgtcgtagtggcctgcgtgaatgctgcctcgcccttccttggcttcaatacttcgctcaactgcaccacagccttcttccagggctaccctttgtctctgagcgcctggtctcgcagggccaacctcatcatcccctacccagagacagacaactggtacctctccctgcagctcatgtgccctgagaatgctgaggactgtgagcaggctgtggtccacgtggagaccaccttgtacctggtgccctgtttgaacgattgtggaccctatggccagtgcctcctgctccgcagacacagctacctgtatgccagctgcagctgcaaggcaggctggcgtgggtggagctgcacggacaacagcacagcccagacggtggcccagcagagggcggccacactgctgctcacgctcagcaacctcatgttcctggcccccatcgccgtctcagtgcggcgattcttcctggtggaggcctccgtctacgcctacaccatgttcttctccacgttctaccacgcctgcgaccagcccggggaggcggtgctgtgcatcctcagctacgacacgctgcagtactgcgacttcttgggctccggggcggccatctgggtcaccatcctgtgcatggcacggctcaagacagtcctgaaatacgtgctgtttcttctgggtacactggtcatcgccatgtccttgcagctggaccgcagggacatgtggaacatgctggggccctgcctctttgccttcgtgatcatggcctccatgtgggcttaccgctgcgggcaccggcgccagtgctaccccacctcgtggcagcgctgggccttctacctcctgcccggcgtctctatggcctctgtgggcatcgccatctacacctccatgatgactagcgacaactactactacacccacagcatctggcacatcctgctggccgggagcgcagccttgctgctgccgccacctgaccagcccgccgagccctgggcctgctcgcagaaattcccctgccactatcagatctgcaagaacgatcgggaggaactgtacgcagtgacgtga

SEQ ID NO: 420 - DNA, 519 bp, Homo sapiens
atgctacatggggatgctggacggctcagcccctgttccaaggattttggggtgctgagattctcccctagagacctgaaattcaccagctacagatgccaaatgacttacatcttaagaagtctcagaacgtccagcccttcagcagctctcgttctgagacatgagccttgggatgtggcagcatcagtgggacaagatggacactgggccaccctcccaggcaccagacacagggcacggtggagagacttctcccccgtggccgccttggctcccccgttttgcccgaggctgctcttctgtcagacttcctctttgtaccacagtggctctggggccaggcctgcctgcccactggccatcgccaccttccccagctgcctcctaccagcagtttctctgaagatctgtcaacaggttaagtcaatctggggcttccactgcctgcattccagtccccagagcttggtggtcccgaaacgggaagtacatattggggcatggtggcctccgtga

SEQ ID NO: 421 - DNA, 3094 bp, Homo sapiens
acaaaaaagcttttacgaggtatcagcacttttctttcattagggggaaggcgtgaggaaagtaccaaacagcagcggagttttaaactttaaatagacaggtctgagtgcctgaacttgccttttcattttacttcatcctccaaggagttcaatcacttggcgtgacttcactacttttaagcaaaagagtggtgcccaggcaacatgggtgactggagcgccttaggcaaactccttgacaaggttcaagcctactcaactgctggagggaaggtgtggctgtcagtacttttcattttccgaatcctgctgctggggacagcggttgagtcagcctggggagatgagcagtctgcctttcgttgtaacactcagcaacctggttgtgaaaatgtctgctatgacaagtctttcccaatctctcatgtgcgcttctgggtcctgcagatcatatttgtgtctgtacccacactcttgtacctggctcatgtgttctatgtgatgcgaaaggaagagaaactgaacaagaaagaggaagaactcaaggttgcccaaactgatggtgtcaatgtggacatgcacttgaagcagattgagataaagaagttcaagtacggtattgaagagcatggtaaggtgaaaatgcgaggggggttgctgcgaacctacatcatcagtatcctcttcaagtctatctttgaggtggccttcttgctgatccagtggtacatctatggattcagcttgagtgctgtttacacttgcaaaagagatccctgcccacatcaggtggactgtttcctctctcgccccacggagaaaaccatcttcatcatcttcatgctggtggtgtccttggtgtccctggccttgaatatcattgaactcttctatgttttcttcaagggcgttaaggatcgggttaagggaaagagcgacccttaccatgcgaccagtggtgcgctgagccctgccaaagactgtgggtctcaaaaatatgcttatttcaatggctgctcctcaccaaccgctcccctctcgcctatgtctcctcctgggtacaagctggttactggcgacagaaacaattcttcttgccgcaattacaacaagcaagcaagtgagcaaaactgggctaattacagtgcagaacaaaatcgaatggggcaggcgggaagcaccatctctaactcccatgcacagccttttgatttccccgatgataaccagaattctaaaaaactagctgctggacatgaattacagccactagccattgtggaccagcgaccttcaagcagagccagcagtcgtgccagcagcagacctcggcctgatgacctggagatctagatacaggcttgaaagcatcaagattccactcaattgtggagaagaaaaaaggtgctgtagaaagtgcaccaggtgttaattttgatccggtggaggtggtactcaacagccttattcatgaggcttagaaaacacaaagacattagaatacctaggttcactgggggtgtatggggtagatgggtggagagggaggggataagagaggtgcatgttggtatttaaagtagtggattcaaagaacttagattataaataagagttccattaggtgatacatagataagggctttttctccccgcaaacacccctaagaatggttctgtgtatgtgaatgagcgggtggtaattgtggctaaatatttttgttttaccaagaaactgaaataattctggccaggaataaatacttcctgaacatcttaggtcttttcaacaagaaaaagacagaggattgtccttaagtccctgctaaaacattccattgttaaaatttgcactttgaaggtaagctttctaggcctgaccctccaggtgtcaatggacttgtgctactatattttttttttttttgtatcagtttaaaattcagacaaggcccacagaataagattttccatgcatttgcaaatacgtatattctttttccatccacttgcacaatatcattaccatcactttttcatcattcctcagctactactcacattcatttaatggtttctgtaaacatttttaagacagttgggatgtcacttaacattttttttttgagctaaagtcagggaatcaagccatgcttaatatttaacaatcacttatatgtgtgtcgaagagtttgttttgtttgtcatgtattggtacaagcagatacagtataaactcacaaacacagatttgaaaataatgcacatatggtgttcaaatttgaacctttctcatggatttttgtggtgtgggccaatatggtgtttacattatataattcctgctgtggcaagtaaagcacactttttttttctcctaaaatgtttttccctgtgtatcctattatggatactggttttgttaattatgattctttattttctctcctttttttaggatatagcagtaatgctattactgaaatgaatttcctttttctgaaatgtaatcattgatgcttgaatgatagaattttagtactgtaaacaggctttagtcattaatgtgagagacttagaaaaaatgcttagagtggactattaaatgtgcctaaatgaattttgcagtaactggtattcttgggttttcctacttaatacacagtaattcagaacttgtattctattatgagtttagcagtcttttggagtgaccagcaactttgatgtttgcactaagattttatttggaatgcaagagaggttgaaagaggattcagtagtacacatacaactaatttatttgaactatatgttgaagacatctaccagtttctccaaatgccttttttaaaactcatcacagaagattggtgaaaatgctgagtatgacacttttcttcttgcatgcatgtcagctacataaacagttttgtacaatgaaaattactaatttgtttgacattccatgttaaactacggtcatgttcagcttcattgcatgtaatgtagacctagtccatcagatcatgtgttctggagagtgttctttattcaataaagttttaatttagtataaacaaaaaaaaaa

SEQ ID NO: 422 - DNA, 1006 bp, Homo sapiens
ctgcgcggcgccgccccgtggtcggatcctgggcggcagagaggccgaggcgcacgcgcggccctacatggcgtcggtgcagctgaacggcgcgcacctgtgcggcggcgtcctggtggcggagcagtgggtgctgagcgcggcgcactgcctggaggacgcggccgacgggaaggtgcaggttctcctgggcgcgcactccctgtcgcagccggagccctccaagcgcctgtacgacgtgctccgcgcagtgccccacccggacagccagcccgacaccatcgaccacgacctcctgctgctacagctgtcggagaaggccacactgggccctgctgtgcgccccctgccctggcagcgcgtggaccgcgacgtggcaccgggaactctctgcgacgtggccggctggggcatagtcaaccacgcgggccgccgcccggacagcctgcagcacgtgctcttgccagtgctggaccgcgccacctgcaaccggcgcacgcaccacgacggcgccatcaccgagcgcttgatgtgcgcggagagcaatcgccgggacagctgcaagggtgactccgggggcccgctggtgtgcgggggcgtgctcgagggcgtggtcacctcgggctcgcgcgtttgcggcaaccgcaagaagcccgggatctacacccgcgtggcgagctatgcggcctggatcgacagcgtcctggcctagggtgccggggcctgaaggtcagggtcacccaagcaacaaagtcccgagcaatgaagtcatccactcctgcatcctggttgggtctttattgagcacctactatatgcagaagggaggccgaggtgggaggagtcctggtcttcacgggttcgagataggtgggcagtagggatcattttaaaattataaaattgtgggcataccaaaaaaaaaaacaaaaaaaaaaaggaggggaaaagaggggaaaaatgttagaagagctatttaggggggaaaggagaaaaatgaagacta

SEQ ID NO: 423 - DNA, 294 bp, Homo sapiens
atgatttcagggggagaggtggagggcagatgtcctgggcaaaccgggcccctttgcccacacacctcacttgatccttttgccaaacttgtcaaactcaggggaactggcttcccagttgcccctttgccatattccaagtccccctcagacttcatgtctctgctcatcagcactgtcccaggatcctggagagggagaacccctggccccaggggaaagaggggggggtctcccgtttcctgtgcctgcaccagccctgcccccattgcgtctgcacacccctgcgtgtaa

SEQ ID NO: 424 - DNA, 2337 bp, Homo sapiens
atggctcagaaaatggactgtggtgcgggcctcctcggcttccaggctgaggcctccgtagaagacagcgccttgcttatgcagaccttgatggaggccatccagatctcagaggctccacctactaaccaggccaccgcagctgctagtccccagagttcacagcccccaactgccaatgagatggctgacattcaggtttcagcagctgccgctaggcctaagtcagcctttaaagtccagaatgccaccacaaaaggcccaaatggtgtctatgatttctctcaggctcataatgccaaggatgtgcccaacacgcagcccaaggcagcctttaagtcccaaaatgctaccccaaagggtccaaatgctgcctatgatttttcccaggcagcaaccactggtgagttagctgctaacaagtctgagatggccttcaaggcccagaatgccactactaaagtgggcccaaatgccacctacaatttctctcagtctctcaatgccaatgacctggccaacagcaggcctaagacccctttcaaggcttggaatgataccactaaggccccaacagctgatacccagacccagaatgtaaatcaggccaaaatggccacttcccaggctgacatagagaccgacccaggtatctctgaacctgacggtgcaactgcacagacatcagcagatggttcccaggctcagaatctggagtcccggacaataattcggggcaagaggacccgcaagattaataacttgaatgttgaagagaacagcagtggggatcagaggcgggccccactggctgcagggacctggaggtctgcaccagttccagtgaccactcagaacccacctggcgcaccccccaatgtgctctggcagacgccattggcttggcagaacccctcaggctggcaaaaccagacagccaggcagaccccaccagcacgtcagagccctccagctaggcagaccccaccagcctggcagaacccagtcgcttggcagaacccagtgatttggccaaacccagtaatctggcagaacccagtgatctggccaaaccccattgtctggcccggccctgttgtctggccgaatccactggcctggcagaatccacctggatggcagactccacctggatggcagaccccaccgggctggcagggtcctccagactggcaaggtcctcctgactggccgctaccacccgactggccactgccacctgattggccacttcccactgactggccactaccacctgactggatccccgctgattggccaattccacctgactggcagaacctgcgcccctcgcctaacctgcgcccttctcccaactcgcgtgcctcacagaacccaggtgctgcacagccccgagatgtggcccttcttcaggaaagagcaaataagttggtcaagtacttgatgcttaaggactacacaaaggtgcccatcaagcgctcagaaatgctgagagatatcatccgtgaatacactgatgtttatccagaaatcattgaacgtgcatgctttgtcctagagaagaaatttgggattcaactgaaagaaattgacaaagaagaacacctgtatattctcatcagtacccccgagtccctggctggcatactgggaacgaccaaagacacacccaagctcggtctcctcttggtgattctgggtgtcatcttcatgaatggcaaccgtgccagtgaggctgtcctctgggaggcactacgcaagatgggactgcgtcctggggtgagacatcccctccttggagatctaaggaaacttctcacctatgagtttgtaaagcagaaatacctggactacagacgagtgcccaacagcaaccccccggagtatgagttcctctggggcctccgttcctaccatgagactagcaagatgaaagtgctgagattcattgcagaggttcagaaaagagaccctcgtgactggactgcacagttcatggaggctgcagatgaggccttggatgctctggatgctgctgcagctgaggccgaagccagggctgaagcaagaacccgcatgggaattggagatgaggctgtgtctgggccctggagctgggatgacattgagtttgagctgctgacctgggatgaggaaggagattttggagatccctggtccagaattccatttaccttctgggccagataccaccagaatgcccgctccagattccctcagacctttgccggtcccattattggtcctggtggtacagccagtgccaacttcgctgccaactttggtgccattggtttcttctgggttgagtga

SEQ ID NO: 425 - DNA, 378 bp, Homo sapiens
atgctggacttgcagaagcagctgggcagatttcccggcaccttcgtgggcaccacagagcccgcctccccacccctgagcagcacctcacccaccactgctgcggccactatgcctgtggtgccctctgtggccagcctggcccctccgggggaggcctcgctctgcctggaagaggtggccccccctgccagtgggacccgcaaagctcgggtgctctatgactacgaggcagccgacagcagtgagctggccctgctggctgatgagctcatcactgtttacagcctgcctggcatggaccctgactggctcattggcgagagaggcaacaagaagggcaaggtccctgtcacctacttggaactgctcagctag

SEQ ID NO: 426 - DNA, 486 bp, Homo sapiens
atgaatgccagaggacttggatctgagctaaaggacagtattccagttactgaactttcagcaagtggaccttttgaaagtcatgatcttcttcggaaaggtttttcttgtgtgaaaaatgaacttttgcctagtcatccccttgaattatcagaaaaaaatttccagctcaaccaagataaaatgaatttttccacactgagaaacattcagggtctatttgctccgctaaaattacagatggaattcaaggcagtgcagcaggttcagcgtcttccatttctttcaagctcaaatctttcactggatgttttgaggggtaatgatgagactattggatttgaggatattcttaatgatccatcacaaagcgaagtcatgggagagccacacttgatggtggaatataaacttggttactgtaatagtgtgctgttcatggaaaccgagggctgcatcttgtttatagtcatctttgtactgtaa

SEQ ID NO: 427 - DNA, 264 bp, Homo sapiens
atgcagaaggtgaccctgggcctgcttgtgttcctggcaggctttcctgtcctggacgccaatgacctagaagataaaaacagtcctttctactatgactggcacagcctccaggttggcgggctcatctgcgctggggttctgtgcgccatgggcatcatcatcgtcatgagtgcaaaatgcaaatgcaagtttggccagaagtccggtcaccatccaggggagactccacctctcatcaccccaggctcagcccaaagctga

SEQ ID NO: 428 - DNA, 855 bp, Homo sapiens
atgtttgacaagacgcggctgccgtacgtggccctcgatgtgctctgcgtgttgctggctggattgccttttgcaattcttacttcaaggcatacccccttccaacgaggagtattctgtaatgatgagtccatcaagtacccttacaaagaagacaccataccttatgcgttattaggtggaataatcattccattcagtattatcgttattattcttggagaaaccctgtctgtttactgtaaccttttgcactcaaattcctttatcaggaataactacatagccactatttacaaagccattggaacctttttatttggtgcagctgctagtcagtccctgactgacattgccaagtattcaataggcagactgcggcctcacttcttggatgtttgtgatccagattggtcaaaaatcaactgcagcgatggttacattgaatactacatatgtcgagggaatgcagaaagagttaaggaaggcaggttgtccttctattcaggccactcttcgttttccatgtactgcatgctgtttgtggcactttatcttcaagccaggatgaagggagactgggcaagactcttacgccccacactgcaatttggtcttgttgccgtatccatttatgtgggcctttctcgagtttctgattataaacaccactggagcgatgtgttgactggactcattcagggagctctggttgcaatattagttgctgtatatgtatcggatttcttcaaagaaagaacttcttttaaagaaagaaaagaggaggactctcatacaactctgcatgaaacaccaacaactgggaatcactatccgagcaatcaccagccttga

SEQ ID NO: 429 - DNA, 1620 bp, Homo sapiens
atggcgcttcacgttcccaaggctccgggctttgcccagatgctcaaggagggagcgaaacacttttcaggattagaagaggctgtgtatagaaacatacaagcttgcaaggagcttgcccaaaccactcgtacagcatatggaccaaaaggaatgaacaaaatggttatcaaccacttggagaagttgtttgtgacaaacgatgcagcaactattttaagagaactagaagtacagcatcctgctgcaaaaatgattgtaatggcttctcatatgcaagagcaagaagttggagatggcacaaactttgttctggtatttgctggagctctcctggaattagctgaagaacttctgaggattggcctgtcagtttcagaggtcatagaaggttatgaaatagcctgcagaaaagctcatgagattcttcctaatttggtatgttgttctgcaaaaaaccttcgagatattgatgaagtctcatctctacttcgtacctccataatgagtaaacaatatggtaatgaagtatttctggccaagcttattgctcaggcatgcgtatctatttttcctgattccggccatttcaatgttgataacatcagagtttgtaaaattctgggctctggtatcagttcctcttcagtattgcatggcatggtttttaagaaggaaaccgaaggtgatgtaacatctgtcaaagatgcaaaaatagcagtgtactcttgtccttttgatggcatgataacagaaactaagggaacagtgttgataaagactgctgaagaattgatgaattttagtaagggagaagaaaacctcatggatgcacaagtcaaagctattgctgatactggtgcaaatgtcgtagtaacaggtggcaaagtggcagacatggctcttcattatgcaaataaatataatatcatgttagtgaggctaaactcaaaatgggatctccgaagactttgtaaaactgttggtgctacagctcttcctagattgacacctcctgtccttgaagaaatgggacactgtgacagtgtttacctctcagaagttggagatactcaggtggtggtttttaagcatgaaaaggaagatggcgccatttctaccatagtacttcgaggctctacagacaatctgatggatgacatagaaagggcagtagacgatggtgttaatactttcaaagttcttacaagggataaacgtcttgtacccggaggtggagcaacagaaattgaattagccaaacagatcacatcatatggagagacatgtcctggacttgaacagtatgctattaagaagtttgctgaggcatttgaagctattccccgcgcactggcagaaaactctggagttaaggccaatgaagtaatctctaaactttatgcagtacatcaagaaggaaataaaaacgttggattagatattgaggctgaagtccctgctgtaaaggacatgctggaagctggtattctagatacttacctgggaaaatattgggctatcaaactcgctactaatgctgcagtcactgtacttagagtggatcagatcatcatggcaaaaccagctggtgggcccaagcctccaagtgggaagtga

SEQ ID NO: 430 - DNA, 1323 bp, Homo sapiens
atggctctcctggtgctcggtctggtgagctgtaccttctttctggcagtgaatggtctgtattcctctagtgatgatgtgatcgaattaactccatcaaatttcaaccgagaagttattcagagtgatagtttgtggcttgtagaattctatgctccatggtgtggtcactgtcaaagattaacaccagaatggaagaaagcagcaactgcattaaaagatgttgtcaaagttggtgcagttgatgcagataagcatcattccctaggaggtcagtatggtgttcagggatttcctaccattaagatttttggatccaacaaaaacagaccagaagattaccaaggtggcagaactggtgaagccattgtagatgctgcgctgagtgctctgcgccagctcgtgaaggatcgcctcgggggacggagcggaggatacagttctggaaaacaaggcagaagtgatagttcaagtaagaaggatgtgattgagctgacagacgacagctttgataagaatgttctggacagtgaagatgtttggatggttgagttctatgctccttggtgtggacactgcaaaaacctagagccagagtgggctgccgcagcttcagaagtaaaagagcagacgaaaggaaaagtgaaactggcagctgtggatgctacagtcaatcaggttctggcctcccgatacgggattagaggatttcctacaatcaagatatttcagaaaggcgagtctcctgtggattatgacggtgggcggacaagatccgacatcgtgtcccgggcccttgatttgttttctgataacgccccacctcctgagctgcttgagattatcaacgaggacattgccaagaggacgtgtgaggagcaccagctctgtgttgtggctgtgctgccccatatccttgatactggagctgcaggcagaaattcttatctggaagttcttctgaagttggcagacaaatacaaaaagaaaatgtgggggtggctgtggacagaagctggagcccagtctgaacttgagaccgcgttggggattggagggtttgggtaccccgccatggccgccatcaatgcacgcaagatgaaatttgctctgctaaaaggctccttcagtgagcaaggcatcaacgagtttctcagggagctctcttttgggcgtggctccacggcacctgtaggaggcggggctttccctaccatcgttgagagagagccttgggacggcagggatggcgagcttcccgtggaggatgacattgacctcagtgatgtggagcttgatgacttagggaaagatgagttgtga

SEQ ID NO: 431 - DNA, 4884 bp, Homo sapiens
atgcggctctggagttgggtgctgcacctggggctgctgagcgccgcgctgggctgcgggctggccgagcgtccccgccgggcccggagagacccgcgggccggccgacccccgcgccccgccgccggcccggccacctgcgccacccgcggcccgcggccgccgcgcctcgccgccgccgccgccgccgccgggcgtgcctgggaagccgtgcgcgtcccccggcggcggcagcagcgggaggcgaggggcgccaccgaggagccgagcccgccgagccgggcgctctatttcagcgggcgaggcgagcagctgcgagtcctccgggccgacctcgagctgccccgggacgcgttcacgctgcaagtgtggctgcgagcggaggggggccagaggtctccggcagtgatcacagggctgtatgacaaatgttcttatatctcacgtgaccgaggatgggtcgtgggcattcacaccatcagtgaccaagacaacaaagacccacgctactttttctccttgaagacagaccgagcccggcaagtgaccaccatcaatgcccaccgcagctacctcccaggccagtgggtatacctagctgccacctatgatgggcagttcatgaagctctatgtgaatggtgcccaggtggccacctctggggaacaagtgggtggcatattcagcccactgacccagaagtgcaaagtgctcatgttagggggcagtgccctgaatcacaactaccggggctacatcgagcacttcagtctgtggaaggtggccaggactcagcgggagatactgtctgacatggaaacccatggcgcccacactgctctacctcagctcctcctccaggagaactgggacaatgtgaagcatgcctggtcccccatgaaggatggcagcagccccaaagtggaattcagcaatgcccacggctttctgctggacacgagtctggagcctcctctgtgcggacagacattgtgtgacaacacagaggtcattgccagctacaatcagctctcaagtttccgccagcccaaggtggtgcgctaccgcgtggtcaacctctatgaagatgatcataagaacccgacggtgacgcgcgagcaggtggacttccagcaccatcagctggctgaggccttcaagcaatacaacatctcctgggagctggacgtgctggaggtgagcaactcctcccttcgccgccgcctcatcctggccaactgtgacatcagcaagattggggatgagaactgtgaccccgagtgcaaccacacgctgacgggccacgacggcggggattgccgccacctgcgccaccctgccttcgtgaagaagcagcacaacggggtgtgtgacatggactgcaactatgaacggttcaactttgatggtggagagtgctgtgaccctgaaatcaccaatgtcactcagacttgctttgaccccgactctccacacagagcctacttggatgttaatgagctgaagaacattcttaaattggatggatcaacacatctcaatattttctttgcaaaatcctcagaggaggagttggcaggagtagcaacttggccatgggacaaggaggccctgatgcacttaggtggcattgtcttgaacccatctttctatggcatgcctgggcacacccacaccatgatccatgagattggtcacagcctgggcctctatcacgtcttccgaggcatctcagaaatccagtcctgcagtgacccctgcatggagacagagccctccttcgagactggagacctctgcaatgataccaacccagcccctaaacacaagtcctgtggtgacccagggccaggaaatgacacctgtggctttcatagcttcttcaacactccttacaacaacttcatgagctatgcagatgacgactgtacggactccttcacgcccaatcaagtcgccagaatgcactgttacctggacctggtctaccagggctggcagccctccaggaaaccagcgcctgttgccctcgccccccaagttctgggccacacaacggactctgtgacactggagtggttcccacctatagatggccatttctttgaaagagaattgggatcagcatgtcatctttgcctggaagggagaatcctggtgcagtatgcttccaacgcttcctccccaatgccctgcagcccatcaggacactggagccctcgtgaagcagaaggtcatcctgatgttgaacagccctgtaagtccagtgtccgcacctggagcccaaattcagctgtcaacccacacacggttcctccagcctgccctgagcctcaaggctgctacctcgagctggagttcctctaccccttggtccctgagtctctgaccatttgggtgacctttgtctccactgactgggactctagtggagctgtcaatgacatcaaactgttggctgtcagtgggaagaacatctccctgggtcctcagaatgtcttctgtgatgtcccactgaccatcagactctgggacgtgggcgaggaggtgtatggcatccaaatctacacgctggatgagcacctggagatcgatgctgccatgttgacctccactgcagacaccccactctgtctacagtgtaagcccctgaagtataaggtggtccgggaccctcctctccagatggatgtggcctccatcctacatctcaataggaaattcgtagacatggatctaaatcttggcagtgtgtaccagtattgggtcataactatttcaggaactgaagagagtgagccatcacctgctgtcacatacatccatggacgtgggtactgtggcgatggcattatacaaaaagaccaaggtgaacaatgcgacgacatgaataagatcaatggtgatggctgctcccttttctgccgacaagaagtctccttcaattgtattgatgaacccagccggtgctatttccatgatggtgatggggtatgtgaggagtttgaacaaaaaaccagcattaaggactgtggtgtctacacgccccagggattcctggatcagtgggcatccaatgcttcagtatctcatcaagaccagcaatgcccaggctgggtcatcatcggacagccagcagcatcccaggtgtgtcgaaccaaggtgatagatctcagtgaaggcatttcccagcatgcctggtacccttgcaccatcagctacccatattcccagctggctcagaccactttttggctccgggcgtatttttctcaaccaatggttgccgcagctgtcattgtccacctggtgacggatgggacatattatggggaccaaaagcaggagaccatcagcgtgcagctgcttgataccaaagatcagagccacgatctaggcctccatgtcctgagctgcaggaacaatcccctgattatccctgtggtccatgacctcagccagcccttctaccacagccaggcggtacgtgtgagcttcagttcgcccctggtcgccatctcgggggtggccctccgttccttcgacaactttgaccccgtcaccctgagcagctgccagagaggggagacctacagccctgccgagcagagctgcgtgcacttcgcatgtgagaaaactgactgtccagagctggctgtggagaatgcttctctcaattgctccagcagcgaccgctaccacggtgcccagtgtactgtgagctgccggacaggctacgtgctccagatacggcgggatgatgagctgatcaagagccagacgggacccagcgtcacagtgacctgtacagagggcaagtggaataagcaggtggcctgtgagccagtcgactgcagcatcccagatcaccatcaagtctatgctgcctccttctcctgccctgagggcaccacctttggcagtcaatgttccttccagtgccgtcaccctgcacaattgaaaggcaacaacagcctcctgacctgcatggaggatgggctgtggtccttcccagaggccctgtgtgagctcatgtgcctcgctccaccccctgtgcccaatgcagacctccagaccgcccggtgccgagagaataagcacaaggtgggctccttctgcaaatacaaatgcaagcctggataccatgtgcctggatcctctcggaagtcaaagaaacgggccttcaagactcagtgtacccaggatggcagctggcaggagggagcttgtgttcctgtgacctgtgacccacctccaccaaaattccatgggctctaccagtgtactaatggcttccagttcaacagtgagtgtaggatcaagtgtgaagacagtgatgcctcccagggacttgggagcaatgtcattcattgccggaaagatggcacctggaacggctccttccatgtctgccaggagatgcaaggccagtgctcggttccaaacgagctcaacagcaacctcaaactgcagtgccctgatggctatgccatagggtcggagtgtgccacctcgtgcctggaccacaacagcgagtccatcatcctgccaatgaacgtgaccgtgcgtgacatcccccactggctgaaccccacacgggtagagagagttgtctgcactgctggtctcaagtggtatcctcaccctgctctgattcactgtgtcaaaggctgtgagcccttcatgggagacaattattgtgatgccatcaacaaccgagccttttgcaactatgacggtggggattgctgcacctccacagtgaagaccaaaaaggtcaccccattccctatgtcctgtgacctacaaggtgactgtgcttgtcgggacccccaggcccaagaacacagccggaaagacctccggggatacagccatggctaa

SEQ ID NO: 432 - DNA, 825 bp, Homo sapiens
atgaagaagaaaacccggcgccgctcgacccggagcgaggagttgacccggagcgaggagttgaccctgagtgaggaagcgacctggagtgaagaggcgacccagagtgaggaggcgacccagggcgaagagatgaatcggagccaggaggtgacccgggacgaggagtcgacccggagcgaggaggtgaccagggaggaaatggcggcagctgggctcaccgtgactgtcacccacagcaatgagaagcacgaccttcatgttacctcccagcagggcagcagtgaaccagttgtccaagacctggcccaggttgttgaagaggtcataggggttccacagtcttttcagaaactcatatttaagggaaaatctctgaaggaaatggaaacaccgttgtcagcacttggaatacaagatggttgccgggtcatgttaattgggaaaaagaacagtccacaggaagaggttgaactaaagaagttgaaacatttggagaagtctgtggagaagatagctgaccagctggaagagttgaataaagagcttactggaatccagcagggttttctgcccaaggatttgcaagctgaagctctctgcaaacttgataggagagtaaaagccacaatagagcagtttatgaagatcttggaggagattgacacactgatcctgccagaaaatttcaaagacagtagattgaaaaggaaaggcttggtaaaaaaggttcaggcattcctagccgagtgtgacacagtggagcagaacatctgccaggagactgagcggctgcagtctacaaactttgccctggccgagtga

SEQ ID NO: 433 - DNA, 2113 bp, Homo sapiens
aaccgcatctgcagcgagcaactgagaagccaagactgagccggcggccgcggcgcagcgaacgagcagtgaccgtgctcctacccagctctgcttcacagcgcccacctgtctccgcccctcggcccctcgcccggctttgcctaaccgccacgatgatgttctcgggcttcaacgcagactacgaggcgtcatcctcccgctgcagcagcgcgtccccggccggggatagcctctcttactaccactcacccgcagactccttctccagcatgggctcgcctgtcaacgcgcaggacttctgcacggacctggccgtctccagtgccaacttcattcccacggtcactgccatctcgaccagtccggacctgcagtggctggtgcagcccgccctcgtctcctctgtggccccatcgcagaccagagcccctcaccctttcggagtccccgccccctccgctggggcttactccagggctggcgttgtgaagaccatgacaggaggccgagcgcagagcattggcaggaggggcaaggtggaacagttatctccagaagaagaagagaaaaggagaatccgaagggaaaggaataagatggctgcagccaaatgccgcaaccggaggagggagctgactgatacactccaagcggagacagaccaactagaagatgagaagtctgctttgcagaccgagattgccaacctgctgaaggagaaggaaaaactagagttcatcctggcagctcaccgacctgcctgcaagatccctgatgacctgggcttcccagaagagatgtctgtggcttcccttgatctgactgggggcctgccagaggttgccaccccggagtctgaggaggccttcaccctgcctctcctcaatgaccctgagcccaagccctcagtggaacctgtcaagagcatcagcagcatggagctgaagaccgagccctttgatgacttcctgttcccagcatcatccaggcccagtggctctgagacagcccgctccgtgccagacatggacctatctgggtccttctatgcagcagactgggagcctctgcacagtggctccctggggatggggcccatggccacagagctggagcccctgtgcactccggtggtcacctgtactcccagctgcactgcttacacgtcttccttcgtcttcacctaccccgaggctgactccttccccagctgtgcagctgcccaccgcaagggcagcagcagcaatgagccttcctctgactcgctcagctcacccacgctgctggccctgtgagggggcagggaaggggaggcagccggcacccacaagtgccactgcccgagctggtgcattacagagaggagaaacacatcttccctagagggttcctgtagacctagggaggaccttatctgtgcgtgaaacacaccaggctgtgggcctcaaggacttgaaagcatccatgtgtggactcaagtccttacctcttccggagatgtagcaaaacgcatggagtgtgtattgttcccagtgacacttcagagagctggtagttagtagcatgttgagccaggcctgggtctgtgtctcttttctctttctccttagtcttctcatagcattaactaatctattgggttcattattggaattaacctggtgctggatattttcaaattgtatctagtgcagctgattttaacaataactactgtgttcctggcaatagtgtgttctgattagaaatgaccaatattatactaagaaaagatacgactttattttctggtagatagaaataaatagctatatccatgtactgtagtttttcttcaacatcaatgttcattgtaatgttactgatcatgcattgttgaggtggtctgaatgttctgacattaacagttttccatgaaaacgttttattgtgtttttaatttatttattaagatggattctcagatatttatatttttattttatttttttctaccttgaggtcttttgacatgtggaaagtgaatttgaatgaaaaatttaagcattgtttgcttattgttccaagacattgtcaataaaagcatttaagttgaatgcgaaaaaaaaaa

SEQ ID NO: 434 - DNA, 1962 bp, Homo sapiens
atgaagctctccctggtggccgcgatgctgctgctgctcagcgcggcgcgggccgaggaggaggacaagaaggaggacgtgggcacggtggtcggcatcgacttggggaccacctactcctgcgtcggcgtgttcaagaacggccgcgtggagatcatcgccaacgatcagggcaaccgcatcacgccgtcctatgtcgccttcactcctgaaggggaacgtctgattggcgatgccgccaagaaccagctcacctccaaccccgagaacacggtctttgacgccaagcggctcatcggccgcacgtggaatgacccgtctgtgcagcaggacatcaagttcttgccgttcaaggtggttgaaaagaaaactaaaccatacattcaagttgatattggaggtgggcaaacaaagacatttgctcctgaagaaatttctgccatggttctcactaaaatgaaagaaaccgctgaggcttatttgggaaagaaggttacccatgcagttgttactgtaccagcctattttaatgatgcccaacgccaagcaaccaaagacgctggaactattgctggcctaaatgttatgaggatcatcaacgagcctacggcagctgctattgcttatggcctggataagagggagggggagaagaacatcctggtgtttgacctgggtggcggaaccttcgatgtgtctcttctcaccattgacaatggtgtcttcgaagttgtggccactaatggagatactcatctgggtggagaagactttgaccagcgtgtcatggaacacttcatcaaactgtacaaaaagaagacgggcaaagatgtcaggaaggacaatagagctgtgcagaaactccggcgcgaggtagaaaaggccaaggccctgtcttctcagcatcaagcaagaattgaaattgagtccttctatgaaggagaagacttttctgagaccctgactcgggccaaatttgaagagctcaacatggatctgttccggtctactatgaagcccgtccagaaagtgttggaagattctgatttgaagaagtctgatattgatgaaattgttcttgttggtggctcgactcgaattccaaagattcagcaactggttaaagagttcttcaatggcaaggaaccatcccgtggcataaacccagatgaagctgtagcgtatggtgctgctgtccaggctggtgtgctctctggtgatcaagatacaggtgacctggtactgcttcatgtatgtccccttacacttggtattgaaactgtaggaggtgtcatgaccaaactgattccaagtaatacagtggtgcctaccaagaactctcagatcttttctacagcttctgataatcaaccaactgttacaatcaaggtctatgaaggtgaaagacccctgacaaaagacaatcatcttctgggtacatttgatctgactggaattcctcctgctcctcgtggggtcccacagattgaagtcacctttgagatagatgtgaatggtattcttcgagtgacagctgaagacaagggtacagggaacaaaaataagatcacaatcaccaatgaccagaatcgcctgacacctgaagaaatcgaaaggatggttaatgatgctgagaagtttgctgaggaagacaaaaagctcaaggagcgcattgatactagaaatgagttggaaagctatgcctattctctaaagaatcagattggagataaagaaaagctgggaggtaaactttcctctgaagataaggagaccatggaaaaagctgtagaagaaaagattgaatggctggaaagccaccaagatgctgacattgaagacttcaaagctaagaagaaggaactggaagaaattgttcaaccaattatcagcaaactctatggaagtgcaggccctcccccaactggtgaagaggatacagcagaaaaagatgagttgtag

SEQ ID NO: 435 - DNA, 1518 bp, Homo sapiens
atgcgcctccgccgcctagcgctgttcccgggtgtggcgctgcttcttgccgcggcccgcctcgccgctgcctccgacgtgctagaactcacggacgacaacttcgagagtcgcatctccgacacgggctctgcgggcctcatgctcgtcgagttcttcgctccctggtgtggacactgcaagagacttgcacctgagtatgaagctgcagctaccagattaaaaggaatagtcccattagcaaaggttgattgcactgccaacactaacacctgtaataaatatggagtcagtggatatccaaccctgaagatatttagagatggtgaagaagcaggtgcttatgatggacctaggactgctgatggaattgtcagccacttgaagaagcaggcaggaccagcttcagtgcctctcaggactgaggaagaatttaagaaattcattagtgataaagatgcctctatagtaggttttttcgatgattcattcagtgaggctcactccgagttcctaaaagcagccagcaacttgagggataactaccgatttgcacatacgaatgttgagtctctggtgaacgagtatgatgataatggagagggtatcatcttatttcgtccttcacatctcactaacaagtttgaggacaagactgtggcatatacagagcaaaaaatgaccagtggcaaaattaaaaagtttatccaggaaaacatttttggtatctgccctcacatgacagaagacaataaagatttgatacagggcaaggacttacttattgcttactatgatgtggactatgaaaagaacgctaaaggttccaactactggagaaacagggtaatgatggtggcaaagaaattcctggatgctgggcacaaactcaactttgctgtagctagccgcaaaacctttagccatgaactttctgattttggcttggagagcactgctggagagattcctgttgttgctatcagaactgctaaaggagagaagtttgtcatgcaggaggagttctcgcgtgatgggaaggctctggagaggttcctgcaggattactttgatggcaatctgaagagatacctgaagtctgaacctatcccagagagcaatgatgggcctgtgaaggtagtggtagcagagaattttgatgaaatagtgaataatgaaaataaagatgtgctgattgaattttatgccccttggtgtggtcattgtaagaacctggagcccaagtataaagaacttggcgagaagctcagcaaagacccaaatatcgtcatagccaagatggatgccacagccaatgatgtgccttctccatatgaagtcagaggttttcctaccatatacttctctccagccaacaagaagctaaatccaaagaaatatgaaggtggccgtgaattaagtgattttattagctatctacaaagagaagctacaaacccccctgtaattcaagaagaaaaacccaagaagaagaagaaggcacaggaggatctctaa

SEQ ID NO: 436 - DNA, 846 bp, Homo sapiens
atggctatgatggaggtccaggggggacccagcctgggacagacctgcgtgctgatcgtgatcttcacagtgctcctgcagtctctctgtgtggctgtaacttacgtgtactttaccaacgagctgaagcagatgcaggacaagtactccaaaagtggcattgcttgtttcttaaaagaagatgacagttattgggaccccaatgacgaagagagtatgaacagcccctgctggcaagtcaagtggcaactccgtcagctcgttagaaagatgattttgagaacctctgaggaaaccatttctacagttcaagaaaagcaacaaaatatttctcccctagtgagagaaagaggtcctcagagagtagcagctcacataactgggaccagaggaagaagcaacacattgtcttctccaaactccaagaatgaaaaggctctgggccgcaaaataaactcctgggaatcatcaaggagtgggcattcattcctgagcaacttgcacttgaggaatggtgaactggtcatccatgaaaaagggttttactacatctattcccaaacatactttcgatttcaggaggaaataaaagaaaacacaaagaacgacaaacaaatggtccaatatatttacaaatacacaagttatcctgaccctatattgttgatgaaaagtgctagaaatagttgttggtctaaagatgcagaatatggactctattccatctatcaagggggaatatttgagcttaaggaaaatgacagaatttttgtttctgtaacaaatgagcacttgatagacatggaccatgaagccagttttttcggggcctttttagttggctaa

SEQ ID NO: 437 - DNA, 870 bp, Homo sapiens
atgagcggcttcagcaccgaggagcgcgccgcgcccttctccctggagtaccgagtcttcctcaaaaatgagaaaggacaatatatatctccatttcatgatattccaatttatgcagataaggatgtgtttcacatggtagttgaagtaccacgctggtctaatgcaaaaatggagattgctacaaaggaccctttaaaccctattaaacaagatgtgaaaaaaggaaaacttcgctatgttgcgaatttgttcccgtataaaggatatatctggaactatggtgccatccctcagacttgggaagacccagggcacaatgataaacatactggctgttgtggtgacaatgacccaattgatgtgtgtgaaattggaagcaaggtatgtgcaagaggtgaaataattggcgtgaaagttctaggcatattggctatgattgacgaaggggaaaccgactggaaagtcattgccattaatgtggatgatcctgatgcagccaattataatgatatcaatgatgtcaaacggctgaaacctggctacttagaagctactgtggactggtttagaaggtataaggttcctgatggaaaaccagaaaatgagtttgcgtttaatgcagaatttaaagataaggactttgccattgatattattaaaagcactcatgaccattggaaagcattagtgactaagaaaacgaatggaaaaggaatcagttgcatgaatacaactttgtctgagagccccttcaagtgtgatcctgatgctgccagagccattgtggatgctttaccaccaccctgtgaatctgcctgcacagtaccaacagacgtggataagtggttccatcaccagaaaaactaa

SEQ ID NO: 438 - DNA, 1719 bp, Homo sapiens
atggcggccccccgcccgtctcccgcgatctccgtttcggtctcggctccggctttttacgccccgcagaagaagttcggccctgtggtggccccaaagcccaaagtgaatcccttccggcccggggacagcgagcctcccccggcacccggggcccagcgcgcacagatgggccgggtgggcgagattcccccgccgcccccggaagactttcccctgcctccacctccccttgctggggatggcgacgatgcagagggtgctctgggaggtgccttcccgccgccccctcccccgatcgaggaatcatttccccctgcgcctctggaggaggagatcttcccttccccgccgcctcctccggaggaggagggagggcctgaggcccccataccgcccccaccacagcccagggagaaggtgagcagtattgatttggagatcgactctctgtcctcactgctggatgacatgaccaagaatgatcctttcaaagcccgggtgtcatctggatatgtgcccccaccagtggccactccattcagttccaagtccagtaccaagcctgcagccgggggcacagcacccctgcctccttggaagtccccttccagctcccagcctctgccccaggttccggctccggctcagagccagacacagttccatgttcagccccagccccagcccaagcctcaggtccaactccatgtccagtcccagacccagcctgtgtctttggctaacacccagccccgagggcccccagcctcatctccggctccagcccctaagttttctccagtgactcctaagtttactcctgtggcttccaagttcagtcctggagccccaggtggatctgggtcacaaccaaatcaaaaattggggcaccccgaagctctttctgctggcacaggctcccctcaacctcccagcttcacctatgcccagcagagggagaagccccgagtgcaggagaagcagcaccccgtgcccccaccggctcagaaccaaaaccaggtgcgctcccctggggccccagggcccctgactctgaaggaggtggaggagctggagcagctgacccagcagctaatgcaggacatggagcatcctcagaggcagaatgtggctgtcaacgaactctgcggccgatgccatcaacccctggcccgggcgcagccagccgtccgcgctctagggcagctgttccacatcgcctgcttcacctgccaccagtgtgcgcagcagctccagggccagcagttctacagtctggagggggcgccgtactgcgagggctgttacactgacaccctggagaagtgtaacacctgcggggagcccatcactgaccgcatgctgagggccacgggcaaggcctatcacccgcactgcttcacctgtgtggtctgcgcccgccccctggagggcacctccttcatcgtggaccaggccaaccggccccactgtgtccccgactaccacaagcagtacgccccgaggtgctccgtctgctctgagcccatcatgcctgagcctggccgagatgagactgtgcgagtggtcgccctggacaagaacttccacatgaagtgttacaagtgtgaggactgcgggaagcccctgtcgattgaggcagatgacaatggctgcttccccctggacggtcacgtgctctgtcggaagtgccacactgctagagcccagacctga

SEQ ID NO: 439 - DNA, 522 bp, Homo sapiens
atgtcgctcttgggacccaaggtgctgctgtttcttgctgcattcatcatcacctctgactggatacccctgggggtcaatagtcaacgaggagacgatgtgactcaagcgactccagaaacattcacagaagatcctaatctggtgaatgatcccgctacagatgaaacagttttggctgttttggctgatattgcaccttccacagatgacttggcctccctcagtgaaaaaaataccactgcagagtgctgggatgagaaatttacctgcacaaggctctactctgtgcatcggccggttaaacaatgcattcatcagttatgcttcaccagtttacgacgtatgtacatcgtcaacaaggagatctgctctcgtcttgtctgtaaggaacacgaagctatgaaagatgagctttgccgtcagatggctggtctgccccctaggagactccgtcgctccaattacttccgacttcctccctgtgaaaatgtggatttgcagagacccaatggtctgtga

SEQ ID NO: 440 - DNA, 1182 bp, Homo sapiens
atggcgctgaaggtagcgaccgtcgccggcagcgccgcgaaggcggtgctcgggccagcccttctctgccgtccctgggaggttctaggcgcccacgaggtcccctcgaggaacatcttttcagaacaaacaattcctccgtccgctaagtatggcgggcggcacacggtgaccatgatcccaggggatggcatcgggccagagctcatgctgcatgtcaagtccgtcttcaggcacgcatgtgtaccagtggactttgaagaggtgcacgtgagttccaatgctgatgaagaggacattcgcaatgccatcatggccatccgccggaaccgcgtggccctgaagggcaacatcgaaaccaaccataacctgccaccgtcgcacaaatctcgaaacaacatccttcgcaccagcctggacctctatgccaacgtcatccactgtaagagccttccaggcgtggtgacccggcacaaggacatagacatcctcattgtccgggagaacacagagggcgagtacagcagcctggagcatgagagtgtggcgggagtggtggagagcctgaagatcatcaccaaggccaagtccctgcgcattgccgagtatgccttcaagctggcgcaggagagcgggcgcaagaaagtgacggccgtgcacaaggccaacatcatgaaactgggcgatgggcttttcctccagtgctgcagggaggtggcagcccgctaccctcagatcaccttcgagaacatgattgtggataacaccaccatgcagctggtgtcccggccccagcagtttgatgtcatggtgatgcccaatctctatggcaacatcgtcaacaatgtctgcgcgggactggtcgggggcccaggccttgtggctggggccaactatggccatgtgtacgcggtgtttgaaacagctacgaggaacaccggcaagagtatcgccaataagaacatcgccaaccccacggccaccctgctggccagctgcatgatgctggaccacctcaagctgcactcctatgccacctccatccgtaaggctgtcctggcatccatggacaatgagaatatgcacactccggacatcgggggccagggcacaacatctgaagccatccaggacgtcatccgccacatccgcgtcatcaacggccgggccgtggaggcctag

SEQ ID NO: 441 - DNA, 501 bp, Homo sapiens
atggcctccggtgtggctgtctctgatggtgtcatcaaggtgttcaacgacatgaaggtgcgtaagtcttcaacgccagaggaggtgaagaagcgcaagaaggcggtgctcttctgcctgagtgaggacaagaagaacatcatcctggaggagggcaaggagatcctggtgggcgatgtgggccagactgtcgacgatccctacgccacctttgtcaagatgctgccagataaggactgccgctatgccctctatgatgcaacctatgagaccaaggagagcaagaaggaggatctggtgtttatcttctgggcccccgagtctgcgccccttaagagcaaaatgatttatgccagctccaaggacgccatcaagaagaagctgacagggatcaagcatgaattgcaagcaaactgctacgaggaggtcaaggaccgctgcaccctggcagagaagctggggggcagtgcggtcatctccctggagggcaagcctttgtga

SEQ ID NO: 442 - DNA, 477 bp, Homo sapiens
atgtcggggatcgccctcagcagactcgcccaggagaggaaagcatggaggaaagaccacccatttggtttcgtggctgtcccaacaaaaaatcccgatggcacgatgaacctcatgaactgggagtgcgccattccaggaaagaaagggactccgtgggaaggaggcttgtttaaactacggatgcttttcaaagatgattatccatcttcgccaccaaaatgtaaattcgaaccaccattatttcacccgaatgtgtacccttcggggacagtgtgcctgtccatcttagaggaggacaaggactggaggccagccatcacaatcaaacagatcctattaggaatacaggaacttctaaatgaaccaaatatccaagacccagctcaagcagaggcctacacgatttactgccaaaacagagtggagtacgagaaaagggtccgagcacaagccaagaagtttgcgccctcataa

SEQ ID NO: 443 - DNA, 594 bp, Homo sapiens
atgtcgggccccaggcctgtggtgctgagcgggccttcgggagctgggaagagcaccctgctgaagaggctgctccaggagcacagcggcatctttggcttcagcgtgtcccataccacgaggaacccgaggcccggcgaggagaacggcaaagattactactttgtaaccagggaggtgatgcagcgtgacatagcagccggcgacttcatcgagcatgccgagttctcggggaacctgtatggcacgagcaaggtggcggtgcaggccgtgcaggccatgaaccgcatctgtgtgctggacgtggacctgcagggtgtgcggaacatcaaggccaccgatctgcggcccatctacatctctgtgcagccgccttcactgcacgtgctggagcagcggctgcggcagcgcaacactgaaaccgaggagagcctggtgaagcggctggctgctgcccaggccgacatggagagcagcaaggagcccggcctgtttgatgtggtcatcattaacgacagcctggaccaggcctacgcagagctgaaggaggcgctctctgaggaaatcaagaaagctcaaaggaccggcgcctga

SEQ ID NO: 444 - DNA, 1520 bp, Homo sapiens
ctcttttgggtccctagattcgagttcgtaaaccgagggccagatgtgcgtggagagactaggttaatagtgtactgaatctttctctcgcgattaacctgcgtcagaattgaacctgcacgtgacaatttaccagccgcgattgtacgagtccaacgtaccaagtcaagtagttactcttgactgtgtcaatcccaaacacaggcatggctcaataaggataaggtttgaaataaaagtacaaaaagtaatctcggccagagtctgtacctccgcgccctgttttaccggtacatcacctctagcatcaccagtattagaggcaccgcctgcccagtgacacatgtttaacggccgcggtaccctaaccgtgcaaaggtagcataatcacttgttccttaattagggacctgtatgaatggctccacgagggttcagctgtctcttacttttaaccagtgaaattgacctgcccgtgaagaggcgggcatgacacagcaagacgagaagaccctatggagctttaatttattaatgcaaacagtacctaacaaacccacaggtcctaaactaccaaacctgcattaaaaatttcggttggggcgacctcggagcagaacccaacctccgagcagtacatgctaagacttcaccagtcaaagcgaactactatactcaattgatccaataacttgaccaacggaacaagttaccctagggataacagcgcaatcctattctagagtccatatcaacaatagggtttacgacctcgatgttggatcaggacatcccgatggtgcagccgctattaaaggttcgtttgttcaacgattaaagtcctacgtgatctgagttcagaccggagtaatccaggtcggtttctatctacttcaaattcctccctgtacgaaaggacaagagaaataaggcctacttcacaaagcgccttcccccgtaaatgatatcatctcaacttagtattatacccacacccacccaagaacagggtttgttaagatggcagagccccggtaatcgcataaaacttaaaactttacagtcagaggttcaattcctcttcttaacaacatagcccatgggcaacctcctaatcctcattgtacccattctaatcgcatgggattcctaagcttacgaacgaaaaatctaaggcataatcaaatacgcacaaggctcacagtggttggccctaacgggctaataaaacctttggatgaggcataaaatcttaccaaagagccctaaaacgggcaattacataacacttaataaccggcgagactaaacacacaagtttaatataaaaacccaagaaaaagcacagggagaacaaataagcaaaataaataaaacaagaagaggataaaaacaaagaggacaataaacgaaaagcaaaacaatcaaaaaaggaaacaaagatacaaaaaaaagaagcagcgaaaaagaaagagaagaaagacgagcacgaacagacaaacaacaacgatgggagaagc

SEQ ID NO: 445 - DNA, 753 bp, Homo sapiens
atggcagacaatttttcgctccatgatgcgttatctgggtctggaaacccaaaccctcaaggatggcctggcgcatgggggaaccagcctgctggggcagggggctacccaggggcttcctatcctggggcctaccccgggcaggcacccccaggggcttatcctggacaggcacctccaggcgcctaccctggagcacctggagcttatcccggagcacctgcacctggagtctacccagggccacccagcggccctggggcctacccatcttctggacagccaagtgcccccggagcctaccctgccactggcccctatggcgcccctgctgggccactgattgtgccttataacctgcctttgcctgggggagtggtgcctcgcatgctgataacaattctgggcacggtgaagcccaatgcaaacagaattgctttagatttccaaagagggaatgatgttgccttccactttaacccacgcttcaatgagaacaacaggagagtcattgtttgcaatacaaagctggataataactggggaagggaagaaagacagtcggttttcccatttgaaagtgggaaaccattcaaaatacaagtactggttgaacctgaccacttcaaggttgcagtgaatgatgctcacttgttgcagtacaatcatcgggttaaaaaactcaatgaaatcagcaaactgggaatttctggtgacatagacctcaccagtgcttcatataccatgatataa

SEQ ID NO: 446 - DNA, 609 bp, Homo sapiens
atgggtaccccagcctcggtggtcagtgagccacccccttggcaggccccgattgaggcccggggccgcaagcaggcctcggcaacatcttccaggacgccgagctgctgcagatccaagccctgtttcaacgcagcggggaccagctggccgaggaacgggcacagatcatctgggaatgtgcaggggaccgccgtgtggctgaggccctcaagaggctgcgcaggaagaggcccccaaggcagaaacccctgggccactcgctacaccactgcagccgcctcagaatcctggagccccactctgcactggccaacccacagagtgccacagagacagcctccagtgagcagtatctgcactctaggaagaaaagtgccaggatccgccggaactggaggaagtcaggccccacaagctacctccaccagatcagacactgatccaggggaaagagccagggaatggcagtgtcttccctcttgccaaaaggcctggggaggtgaaggaagagagactttaggcaagcagcccaaaggggtaaatgaaagcaagaggctgctgccactgacctgctccattcagaacaagactggatgcttctgttga

SEQ ID NO: 447 - DNA, 579 bp, Homo sapiens
atgagtgaaccacctcctcctactgttcaagtacaggggcctggtccgcaaagggaagaaaagcaaaagacgaaaatggctaaattcgtgatccgcccagccactgccgccgactgcagtgacatactgcggctgatcaaggagctggctaaatatgaatacatggaagaacaagtaatcttaactgaaaaagatctgctagaagatggttttggagagcaccccttttaccactgcctggttgcagaagtgccgaaagagcactggactccggaaggtaacccctcgcccttgtccagggtaagccatgtagtagtttacctatacccgtgttatgtaagcaagttatggtgtcttgaggacttcttcgtgatgagtgattactcgaggctttggcataggatcagaaattctgaagaatctaagccaggttgcaatgaggtgtcgctgccagcagcatgcacttcttgggtagcagaatggaatgaaccatccatcaacttctataaaagaagaggtgcttctgatctgtccagtgaagagggttggagatgttcagatcgcaaggagtactgctaa

SEQ ID NO: 448 - DNA, 843 bp, Homo sapiens
atggaggtccccgggatggctggtgctctctgtgctggccatatcgctggcctctatggtgaccgaggacttgtgccgagcaccagacgggaagaaaggggaggcaggaagacctggcagacgggggcggccaggcctcaagggggagcaaggggagccgggggcccctggcatccggacaggcatccaaggcctttaaaggagaccagggggaacctgggccctctggaaaccccggcaaggtgggctacccagggcccagcggcccctcggagcccgtggatcccgggaattaaaggcaccaagggcagcccaggaaacatcaaggaccagccgaggccagccttctccgccattcggcggaacacccccaatgggggccaacgtggtcatccttcgacacggtcatcaccaaccaggaagaaccgtaccagaaccactccggccgattcgtctgcactgtacccggctactactacttcaccttccaggtgctgtcccagtgggaaatctgcctgtccatcgtctcctcctcaaggggccaggtccgacgctccctgggcttctgtgacaccaccaacaaggggctcttccaggtggtgtcagggggcatggtgcttcagctgcagcagggtgaccaggtctgggttgaaaaagaccccaaaaagggtcacatttaccagggctctgaggccgacagcgtcttcagcggcttcctcatcttcccatctgcctgagccagggaaggaccccctcccccacccacctctctggcttccatgctccgcctgtaaaatgggggcgctattgcttcagctgctgaagggagggggctggctctga

SEQ ID NO: 449 - DNA, 684 bp, Homo sapiens
atgcaagaaccaaggcgagtcacgcactgtctgggcaaaagaggagtaaagacccctcagctgcagcccggcagcgcattcctacccagggtccgccgccagagctttaccgcgcggtcggatagttacactactgtccgggacttcctagccgtgccgcggaccatctcaagtgcttccgccacactcatcatggcggtggcagtaagtcacttccgcccgggaccggaagtgtgggatactgcgagtatggcggcgtcaaaggtgaagcaggacatgcctccgccggggggctatgggcccatcgactacaaacggaacttgccgcgtcgaggactgtcgggctacagcatgctggccatagggattggaaccctgatctacgggcactggagcataatgaagtggaaccgtgagcgcaggcgcctacaaatcgaggacttcgaggctcgcatcgcgctgttgccactgttacaggcagaaaccgaccggaggaccttgcagatgcttcgggagaacctggaggaggaggccatcatcatgaaggacgtgcccgactggaaggtgggggagtctgtgttccacacaacccgctgggtgccccccttgatcggggagctgtacgggctgcgcaccacagaggaggctctccatgccagccacggcttcatgtggtacacgtag

SEQ ID NO: 450 - DNA, 648 bp, Homo sapiens
atggaaaaactctacagtgaaaatgaaggaatggcttcaaaccaaggaaagatggaaaatgaagaacagccacaagacgagagaaagccagaagtaacttgtactctggaagacaagaagttagaaaacgagggaaagacagaaaacaagggcaaaacaggagatgaggaaatgttaaaggataaaggaaagccagagagtgagggagaggcaaaagaaggaaagtcagagagggagggagagtcagagatggagggaggatcagagagagagggaaaaccagagatagagggaaagccagagagtgaaggagagccagggagtgaaacaagggctgcaggaaagcgcccagctgaggatgatgtacccaggaaagccaaaagaaaaactaataaggggctggctcattacctcaaggagtataaagaggccatacatgatatgaatttcagcaatgaggacatgataagagaatttgacaatatggctaaggtgcaggatgagaagagaaaaagcaaacagaaattgggggcgtttttgtggatgcaaagaaatttacaggaccccttctaccctagaggtccaagggaattcaggggtggctgcagggccccacgaagggacattgaagacattccttatgtgtag

SEQ ID NO: 451 - DNA, 7944 bp, Homo sapiens
atgagtagctcccactctcgggcgggccagagcgcagcaggcgcggctccgggcggcggcgtcgacacgcgggacgccgagatgccggccaccgagaaggacctggcggaggacgcgccgtggaagaagatccagcagaacactttcacgcgctggtgcaacgagcacctgaagtgcgtgagcaagcgcatcgccaacctgcagacggacctgagcgacgggctgcggcttatcgcgctgttggaggtgctcagccagaagaagatgcaccgcaagcacaaccagcggcccactttccgccaaatgcagcttgagaacgtgtcggtggcgctcgagttcctggaccgcgagagcatcaaactggtgtccatcgacagcaaggccatcgtggacgggaacctgaagctgatcctgggcctcatctggaccctgatcctgcactactccatctccatgcccatgtgggacgaggaggaggatgaggaggccaagaagcagacccccaagcagaggctcctgggctggatccagaacaagctgccgcagctgcccatcaccaacttcagccgggactggcagagcggccgggccctgggcgccctggtggacagctgtgccccgggcctgtgtcctgactgggactcttgggacgccagcaagcccgttaccaatgcgcgagaggccatgcagcaggcggatgactggctgggcatcccccaggtgatcacccccgaggagattgtggaccccaacgtggacgagcactctgtcatgacctacctgtcccagttccccaaggccaagctgaagccaggggctcccttgcggcccaaactgaacccgaagaaagcccgtgcctacgggccaggcatcgagcccacaggcaacatggtgaagaagcgggcagagttcactgtggagaccagaagtgctggccagggagaggtgctggtgtacgtggaggacccggccggacaccaggaggaggcaaaagtgaccgccaataacgacaagaaccgcaccttctccgtctggtacgtccccgaggtgacggggactcataaggttactgtgctctttgctggccagcacatcgccaagagccccttcgaggtgtacgtggataagtcacagggtgacgccagcaaagtgacagcccaaggtcccggcctggagcccagtggcaacatcgccaacaagaccacctactttgagatctttacggcaggagctggcacgggcgaggtcgaggttgtgatccaggaccccatgggacagaagggcacggtagagcctcagctggaggcccggggcgacagcacataccgctgcagctaccagcccaccatggagggcgtccacaccgtgcacgtcacgtttgccggcgtgcccatccctcgcagcccctacactgtcactgttggccaagcctgtaacccgagtgcctgccgggcggttggccggggcctccagcccaagggtgtgcgggtgaaggagacagctgacttcaaggtgtacacaaagggcgctggcagtggggagctgaaggtcaccgtgaagggccccaagggagaggagcgcgtgaagcagaaggacctgggggatggcgtgtatggcttcgagtattaccccatggtccctggaacctatatcgtcaccatcacgtggggtggtcagaacatcgggcgcagtcccttcgaagtgaaggtgggcaccgagtgtggcaatcagaaggtacgggcctggggccctgggctggagggcggcgtcgttggcaagtcagcagactttgtggtggaggctatcggggacgacgtgggcacgctgggcttctcggtggaagggccatcgcaggctaagatcgaatgtgacgacaagggcgacggctcctgtgatgtgcgctactggccgcaggaggctggcgagtatgccgttcacgtgctgtgcaacagcgaagacatccgcctcagccccttcatggctgacatccgtgacgcgccccaggacttccacccagacagggtgaaggcacgtgggcctggattggagaagacaggtgtggccgtcaacaagccagcagagttcacagtggatgccaagcacggtggcaaggccccacttcgggtccaagtccaggacaatgaaggctgccctgtggaggcgttggtcaaggacaacggcaatggcacttacagctgctcctacgtgcccaggaagccggtgaagcacacagccatggtgtcctggggaggcgtcagcatccccaacagccccttcagggtgaatgtgggagctggcagccaccccaacaaggtcaaagtatacggccccggagtagccaagacagggctcaaggcccacgagcccacctacttcactgtggactgcgccgaggctggccagggggacgtcagcatcggcatcaagtgtgcccctggagtggtaggccccgccgaagctgacatcgacttcgacatcatccgcaatgacaatgacaccttcacggtcaagtacacgccccggggggctggcagctacaccattatggtcctctttgctgaccaggccacgcccaccagccccatccgagtcaaggtggagccctctcatgacgccagtaaggtgaaggccgagggccctggcctcagtcgcactggtgtcgagcttggcaagcccacccacttcacagtaaatgccaaagctgctggcaaaggcaagctggacgtccagttctcaggactcaccaagggggatgcagtgcgagatgtggacatcatcgaccaccatgacaacacctacacagtcaagtacacgcctgtccagcagggtccagtaggcgtcaatgtcacttatggaggggatcccatccctaagagccctttctcagtggcagtatctccaagcctggacctcagcaagatcaaggtgtctggcctgggagagaaggtggacgttggcaaagaccaggagttcacagtcaaatcaaagggtgctggtggtcaaggcaaagtggcatccaagattgtgggcccctcgggtgcagcggtgccctgcaaggtggagccaggcctgggggctgacaacagtgtggtgcgcttcctgccccgtgaggaagggccctatgaggtggaggtgacctatgacggcgtgcccgtgcctggcagcccctttcctctggaagctgtggcccccaccaagcctagcaaggtgaaggcgtttgggccggggctgcagggaggcagtgcgggctcccccgcccgcttcaccatcgacaccaagggcgccggcacaggtggcctgggcctgacggtggagggcccctgtgaggcgcagctcgagtgcttggacaatggggatggcacatgttccgtgtcctacgtgcccaccgagcccggggactacaacatcaacatcctcttcgctgacacccacatccctggctccccattcaaggcccacgtggttccctgctttgacgcatccaaagtcaagtgctcaggccccgggctggagcgggccaccgctggggaggtgggccaattccaagtggactgctcgagcgcgggcagcgcggagctgaccattgagatctgctcggaggcggggcttccggccgaggtgtacatccaggaccacggtgatggcacgcacaccattacctacattcccctctgccccggggcctacaccgtcaccatcaagtacggcggccagcccgtgcccaacttccccagcaagctgcaggtggaacctgcggtggacacttccggtgtccagtgctatgggcctggtattgagggccagggtgtcttccgtgaggccaccactgagttcagtgtggacgcccgggctctgacacagaccggagggccgcacgtcaaggcccgtgtggccaacccctcaggcaacctgacggagacctacgttcaggaccgtggcgatggcatgtacaaagtggagtacacgccttacgaggagggactgcactccgtggacgtgacctatgacggcagtcccgtgcccagcagccccttccaggtgcccgtgaccgagggctgcgacccctcccgggtgcgtgtccacgggccaggcatccaaagtggcaccaccaacaagcccaacaagttcactgtggagaccaggggagctggcacgggcggcctgggcctggctgtagagggcccctccgaggccaagatgtcctgcatggataacaaggacggcagctgctcggtcgagtacatcccttatgaggctggcacctacagcctcaacgtcacctatggtggccatcaagtgccaggcagtcctttcaaggtccctgtgcatgatgtgacagatgcgtccaaggtcaagtgctctgggcccggcctgagcccaggcatggttcgtgccaacctccctcagtccttccaggtggacacaagcaaggctggtgtggccccattgcaggtcaaagtgcaagggcccaaaggcctggtggagccagtggacgtggtagacaacgctgatggcacccagaccgtcaattatgtgcccagccgagaagggccctacagcatctcagtactgtatggagatgaagaggtaccccggagccccttcaaggtcaaggtgctgcctactcatgatgccagcaaggtgaaggccagtggccccgggctcaacaccactggcgtgcctgccagcctgcccgtggagttcaccatcgatgcaaaggacgccggggagggcctgctggctgtccagatcacggatcccgaaggcaagccgaagaagacacacatccaagacaaccatgacggcacgtatacagtggcctacgtgccagacgtgacaggtcgctacaccatcctcatcaagtacggtggtgacgagatccccttctccccgtaccgcgtgcgtgccgtgcccaccggggacgccagcaagtgcactgtcacagtgtcaatcggaggtcacgggctaggtgctggcatcggccccaccattcagattggggaggagacggtgatcactgtggacactaaggcggcaggcaaaggcaaagtgacgtgcaccgtgtgcacgcctgatggctcagaggtggatgtggacgtggtggagaatgaggacggcactttcgacatcttctacacggccccccagccgggcaaatacgtcatctgtgtgcgctttggtggcgagcacgtgcccaacagccccttccaagtgacggctctggctggggaccagccctcggtgcagccccctctacggtctcagcagctggccccacagtacacctacgcccagggcggccagcagacttgggccccggagaggcccctggtgggtgtcaatgggctggatgtgaccagcctgaggccctttgaccttgtcatccccttcaccatcaagaagggcgagatcacaggggaggttcggatgccctcaggcaaggtggcgcagcccaccatcactgacaacaaagacggcaccgtgaccgtgcggtatgcacccagcgaggctggcctgcacgagatggacatccgctatgacaacatgcacatcccaggaagccccttgcagttctatgtggattacgtcaactgtggccatgtcactgcctatgggcctggcctcacccatggagtagtgaacaagcctgccaccttcaccgtcaacaccaaggatgcaggagaggggggcctgtctctggccattgagggcccgtccaaagcagaaatcagctgcactgacaaccaggatgggacatgcagcgtgtcctacctgcctgtgctgccgggggactacagcattctagtcaagtacaatgaacagcacgtcccaggcagccccttcactgctcgggtcacaggtgacgactccatgcgtatgtcccacctaaaggtcggctctgctgccgacatccccatcaacatctcagagacggatctcagcctgctgacggccactgtggtcccgccctcgggccgggaggagccctgtttgctgaagcggctgcgtaatggccacgtggggatttcattcgtgcccaaggagacgggggagcacctggtgcatgtgaagaaaaatggccagcacgtggccagcagccccatcccggtggtgatcagccagtcggaaattggggatgccagtcgtgttcgggtctctggtcagggccttcacgaaggccacacctttgagcctgcagagtttatcattgatacccgcgatgcaggctatggtgggctcagcctgtccattgagggccccagcaaggtggacatcaacacagaggacctggaggacgggacgtgcagggtcacctactgccccacagagccaggcaactacatcatcaacatcaagtttgccgaccagcacgtgcctggcagccccttctctgtgaaggtgacaggcgagggccgggtgaaagagagcatcacccgcaggcgtcgggctccttcagtggccaacgttggtagtcattgtgacctcagcctgaaaatccctgaaattagcatccaggatatgacagcccaggtgaccagcccatcgggcaagacccatgaggccgagatcgtggaaggggagaaccacacctactgcatccgctttgttcccgctgagatgggcacacacacagtcagcgtgaagtacaagggccagcacgtgcctgggagccccttccagttcaccgtggggcccctaggggaagggggagcccacaaggtccgagctgggggccctggcctggagagagctgaagctggagtgccagccgaattcagtatctggacccgggaagctggtgctggaggcctggccattgctgtcgagggccccagcaaggctgagatctcttttgaggaccgcaaggacggctcctgtggtgtggcttatgtggtccaggagccaggtgactacgaagtctcagtcaagttcaacgaggaacacattcccgacagccccttcgtggtgcctgtggcttctccgtctggcgacgcccgccgcctcactgtttctagccttcaggagtcagggctaaaggtcaaccagccagcctcttttgcagtcagcctgaacggggccaagggggcgatcgatgccaaggtgcacagcccctcaggagccctggaggagtgctatgtcacagaaattgaccaagataagtatgctgtgcgcttcatccctcgggagaatggcgtttacctgattgacgtcaagttcaacggcacccacatccctggaagccccttcaagatccgagttggggagcctgggcatggaggggacccaggcttggtgtctgcttacggagcaggtctggaaggcggtgtcacagggaacccagctgagttcgtcgtgaacacgagcaatgcgggagctggtgccctgtcggtgaccattgacggcccctccaaggtgaagatggattgccaggagtgccctgagggctaccgcgtcacctatacccccatggcacctggcagctacctcatctccatcaagtacggcggcccctaccacattgggggcagccccttcaaggccaaagtcacaggcccccgtctcgtcagcaaccacagcctccacgagacatcatcagtgtttgtagactctctgaccaaggccacctgtgccccccagcatggggccccgggtcctgggcctgctgacgccagcaaggtggtggccaagggcctggggctgagcaaggcctacgtaggccagaagagcagcttcacagtagactgcagcaaagcaggcaacaacatgctgctggtgggggttcatggcccaaggaccccctgcgaggagatcctggtgaagcacgtgggcagccggctctacagcgtgtcctacctgctcaaggacaagggggagtacacactggtggtcaaatggggggacgagcacatcccaggcagcccctaccgcgttgtggtgccctga

SEQ ID NO: 452 - DNA, 858 bp, Homo sapiens
atggaggtgccgccaccggcaccgcggagctttctctgtagagcattgtgcctatttccccgagtctttgctgccgaagctgtgactgccgattcggaagtccttgaggagcgtcagaagcggcttccctacgtcccagagccctattacccggaatctggatgggaccgcctccgggagctgtttggcaaagatgaacagcagagaatttcaaaggaccttgctaatatctgtaagacggcggctacagcaggcatcattggctgggtgtatgggggaataccagcttttattcatgctaaacaacaatacattgagcagagccaggcagaaatttatcataaccggtttgatgctgtgcaatctgcacatcgtgctgccacacgaggcttcattcgttatggctggcgctggggttggagaactgcagtgtttgtgactatattcaacacagtgaacactagtctgaatgtataccgaaataaagatgccttaagccattttgtaattgcaggagctgtcacgggaagtctttttaggataaacgtaggcctgcgtggcctggtggctggtggcataattggagccttgctgggcactcctgtaggaggcctgctgatggcatttcagaagtactctggtgagactgttcaggaaagaaaacagaaggatcgaaaggcactccatgagctaaaactggaagagtggaaaggcagactacaagttactgagcacctccctgagaaaattgaaagtagtttacaggaagatgaacctgagaatgatgctaagaaaattgaagcactgctaaaccttcctagaaacccttcagtaatagataaacaagacaaggactga

SEQ ID NO: 453 - DNA, 483 bp, Homo sapiens
atgacgctggaagagctcgtggcgtgcgacaacgcggcgcagaagatgcagacggtgaccgccgcggtggaggagcttttggtggccgctcagcgccaggatcgcctcacagtgggggtgtacgagtcggccaagttgatgaatgtggacccagacagcgtggtcctctgcctcttggccattgacgaggaggaggaggatgacatcgccctgcaaatccacttcacgctcatccagtccttctgctgtgacaacgacatcaacatcgtgcgggtgtcgggcatgcagcgcctggcgcagctcctgggagagccggccgagacccagggcaccaccgaggcccgagacctgcattgtctcctggtcacgaaccctcacacggacgcctggaagagccacggcttggtggaggtggccagctactgcgaagaaagccggggcaacaaccagtgggtcccctacatctctcttcaggaacgctga

SEQ ID NO: 454 - DNA, 270 bp, Homo sapiens
atgtgcgaccgaaaggccgtgatcaaaaatgcggacatgtcggaagagatgcaacaggactcggtggagtgcgctactcaggcgctggagaaatacaacatagagaaggacattgcggctcatatcaagaaggaatttgacaagaagtacaatcccacctggcattgcatcgtggggaggaacttcggtagttatgtgacacatgaaaccaaacacttcatctacttctacctgggccaagtggccattcttctgttcaaatctggttaa

SEQ ID NO: 455 - DNA, 1488 bp, Homo sapiens
ttttttttttttgatattaaatgttaaattttatttcaaaaactatcacagcctaaagggaaatataatttaagcattaagatagtacatttcagaaaataagctagtattttcatgttacattttaggtacctatcatttgtcattccaagagatccttgcgttctagactctagaattaaatggggtaaagggttatgcttttaagaactataagctgaaatgatttacttcagttcaatatagaatatttgtcagtcaagataacaatcaatgtgtacaaaaatttacataacaagaggaaaaataggcagtgcagcacctttagaaaaataattaaaagtttcattgcatttacaggtaagtgccacactgagaatttacaatacagtaatttactgcaatcacaggggagttccataaagaaacaaagctcttacactccaggtttttggaaggtgttattggaatgcttaactgaaaccacagaacttgtatatccttaggattgagttgatgaaggtcataaaaggttttcatagcatctattatataaaaggagttcactgcatttggatagctggtttagtgtctctgacaagtgtgaagcctagaagaattactggcttgatggtgatctttctgtatccggcaagacagaccttctccacagtaacaacgctggaatatttctagtccatgagagccttttctcctatgcttggtacacacttgaccttctttcaggacaggtttacagatcttggaccagaagtgtctagcacaacacaatcctgaggcacagtctgatgaccggagacaaacagaaccttcttgtcctttggtgtgatacatttttgaagacaaggtggttcttctggaatacccatccaaggtgctatgatcattaccaaagctttcagtgatggtttcctcaatttctcctcggaaatgattttgatcagaagacacacatattccatttttgcagtaattcccggggcagcacatagcgtgacgcatgcagcgttttcggcgcttcctgcaggcgagacagatttgcacgcctgcgtcccctccgcgggtgggactagcgcagtactcatcagtgccgcactcctcgtcctctgcgcacgggtacggctggtagttgtcaatggtctggtacttattcccgcccgggtacaggattcccggcgcggcgctgactgcagagcctgggtgccccgcagcgccgcccagcggtgggggcaggttcttgatagcgttggaattgagaaccgagttcaaggtggcgctcactcccagcagagggtggccgccgagagccgccgctaccatcgcgacaaagacccgggtagctcccgctgcgcccagagccatcatctcagaaggactcaagagggagaaagaaagagaaaatgaccgtcactttgcaagcctgggtccccacgaaaccgtgccgcccacgcgtccgcggacgcgtgg

SEQ ID NO: 456 - DNA, 810 bp, Homo sapiens
atggcggctgcgctgttcgtgctgctgggattcgcgctgctgggcacccacggagcctccggggctgctggcacagtcttcactaccgtagaagaccttggctccaagatactcctcacctgctccttgaatgacagcgccacagaggtcacagggcaccgctggctgaaggggggcgtggtgctgaaggaggacgcgctgcccggccagaaaacggagttcaaggtggactccgacgaccagtggggagagtactcctgcgtcttcctccccgagcccatgggcacggccaacatccagctccacgggcctcccagagtgaaggccgtgaagtcgtcagaacacatcaacgagggggagacggccatgctggtctgcaagtcagagtccgtgccacctgtcactgactgggcctggtacaagatcactgactctgaggacaaggccctcatgaacggctccgagagcaggttcttcgtgagttcctcgcagggccggtcagagctacacattgagaacctgaacatggaggccgatcccggccagtaccggtgcaacggcaccagctccaagggctccgaccaggccatcatcacgctccgcgtgcgcagccacctggccgccctctggcccttcctgggcatcgtggctgaggtgctggtgctggtcaccatcatcttcatctacgagaagcgccggaagcccgaggacgtcctggatgatgacgacgccggctctgcacccctgaagagcagcgggcagcaccagaatgacaaaggcaagaacgtccgccagaggaactcttcctga

SEQ ID NO: 457 - DNA, 1743 bp, Homo sapiens
atggccgggaccgtgcgcaccgcgtgcttggtggtggcgatgctgctcagcttggacttcccgggacaggcgcagcccccgccgccgccgccggacgccacctgtcaccaagtccgctccttcttccagagactgcagcccggactcaagtgggtgccagaaactcccgtgccaggatcagatttgcaagtatgtctccctaagggcccaacatgctgctcaagaaagatggaagaaaaataccaactaacagcacgattgaacatggaacagctgcttcagtctgcaagtatggagctcaagttcttaattattcagaatgctgcggttttccaagaggcctttgaaattgttgttcgccatgccaagaactacaccaatgccatgttcaagaacaactacccaagcctgactccacaagcttttgagtttgtgggtgaatttttcacagatgtgtctctctacatcttgggttctgacatcaatgtagatgacatggtcaatgaattgtttgacagcctgtttccagtcatctatacccagctaatgaacccaggcctgcctgattcagccttggacatcaatgagtgcctccgaggagcaagacgtgacctgaaagtatttgggaatttccccaagcttattatgacccaggtttccaagtcactgcaagtcactaggatcttccttcaggctctgaatcttggaattgaagtgatcaacacaactgatcacctgaagttcagtaaggactgtggccgaatgctcaccagaatgtggtactgctcttactgccagggactgatgatggttaaaccctgtggcggttactgcaatgtggtcatgcaaggctgtatggcaggtgtggtggagattgacaagtactggagagaatacattctgtcccttgaagaacttgtgaatggcatgtacagaatctatgacatggagaacgtactgcttggtctcttttcaacaatccatgattctatccagtatgtccagaagaatgcaggaaagctgaccaccactattggcaagttatgtgcccattctcaacaacgccaatatagatctgcttattatcctgaagatctctttattgacaagaaagtattaaaagttgctcatgtagaacatgaagaaaccttatccagccgaagaagggaactaattcagaagttgaagtctttcatcagcttctatagtgctttgcctggctacatctgcagccatagccctgtggcggaaaacgacaccctttgctggaatggacaagaactcgtggagagatacagccaaaaggcagcaaggaatggaatgaaaaaccagttcaatctccatgagctgaaaatgaagggccctgagccagtggtcagtcaaattattgacaaactgaagcacattaaccagctcctgagaaccatgtctatgcccaaaggtagagttctggataaaaacctggatgaggaagggtttgaaagtggagactgcggtgatgatgaagatgagtgcattggaggctctggtgatggaatgataaaagtgaagaatcagctccgcttccttgcagaactggcctatgatctggatgtggatgatgcgcctggaaacagtcagcaggcaactccgaaggacaacgagataagcacctttcacaacctcgggaacgttcattccccgctgaagcttctcaccagcatggccatctcggtggtgtgcttcttcttcctggtgcactga

SEQ ID NO: 458 - DNA, 2961 bp, Homo sapiens
atgcccggcgtggcccgcctgccgctgctgctcgggctgctgctgctcccgcgtcccggccggccgctggacttggccgactacacctatgacctggcggaggaggacgactcggagcccctcaactacaaagacccctgcaaggcggctgcctttcttggggacattgccctggacgaagaggacctgagggccttccaggtacagcaggctgtggatctcagacggcacacagctcgtaagtcctccatcaaagctgcagttccaggaaacacttctacccccagctgccagagcaccaacgggcagcctcagaggggagcctgtgggagatggagaggtagatcccgtagccggcgggcggcgacgtcccgaccagagcgtgtgtggcccgatggggtcatcccctttgtcattgggggaaacttcactggtagccagagggcagtcttccggcaggccatgaggcactgggagaagcacacctgtgtcaccttcctggagcgcactgacgaggacagctatattgtgttcacctatcgaccttgcgggtgctgctcctacgtgggtcgccgcggcgggggcccccaggccatctccatcggcaagaactgtgacaagttcggcattgtggtccacgagctgggccacgtcgtcggcttctggcacgaacacactcggccagaccgggaccgccacgtttccatcgttcgtgagaacatccagccagggcaggagtataacttcctgaagatggagcctcaggaggtggagtccctgggggagacctatgacttcgacagcatcatgcattacgctcggaacacattctccaggggcatcttcctggataccattgtccccaagtatgaggtgaacggggtgaaacctcccattggccaaaggacacggctcagcaagggggacattgcccaagcccgcaagctttacaagtgcccagcctgtggagagaccctgcaagacagcacaggcaacttctcctcccctgaataccccaatggctactctgctcacatgcactgcgtgtggcgcatctctgtcacacccggggagaagatcatcctgaacttcacgtccctggacctgtaccgcagccgcctgtgctggtacgactatgtggaggtccgagatggcttctggaggaaggcgcccctccgaggccgcttctgcgggtccaaactccctgagcctatcgtctccactgacagccgcctctgggttgaattccgcagcagcagcaattgggttggaaagggcttctttgcagtctacgaagccatctgcgggggtgatgtgaaaaaggactatggccacattcaatcgcccaactacccagacgattaccggcccagcaaagtctgcatctggcggatccaggtgtctgagggcttccacgtgggcctcacattccagtcctttgagattgagcgccacgacagctgtgcctacgactatctggaggtgcgcgacgggcacagtgagagcagcaccctcatcgggcgctactgtggctatgagaagcctgatgacatcaagagcacgtccagccgcctctggctcaagttcgtctctgacgggtccattaacaaagcgggctttgccgtcaactttttcaaagaggtggacgagtgctctcggcccaaccgcgggggctgtgagcagcggtgcctcaacaccctgggcagctacaagtgcagctgtgaccccgggtacgagctggccccagacaagcgccgctgtgaggctgcttgtggcggattcctcaccaagctcaacggctccatcaccagcccgggctggcccaaggagtacccccccaacaagaactgcatctggcagctggtggcccccacccagtaccgcatctccctgcagtttgacttctttgagacagagggcaatgatgtgtgcaagtacgacttcgtggaggtgcgcagtggactcacagctgactccaagctgcatggcaagttctgtggttctgagaagcccgaggtcatcacctcccagtacaacaacatgcgcgtggagttcaagtccgacaacaccgtgtccaaaaagggcttcaaggcccacttcttctcagacaaggacgagtgctccaaggataacggcggctgccagcaggactgcgtcaacacgttcggcagttatgagtgccaatgccgcagtggcttcgtcctccatgacaacaagcacgactgcaaagaagccggctgtgaccacaaggtgacatccaccagtggtaccatcaccagccccaactggcctgacaagtatcccagcaagaaggagtgcacgtgggccatctccagcacccccgggcaccgggtcaagctgaccttcatggagatggacatcgagtcccagcctgagtgtgcctacgaccacctagaggtgttcgacgggcgagacgccaaggcccccgtcctcggccgcttctgtgggagcaagaagcccgagcccgtcctggccacaggcagccgcatgttcctgcgcttctactcagataactcggtccagcgaaagggcttccaggcctcccacgccacagagtgcgggggccaggtacgggcagacgtgaagaccaaggacctttactcccacgcccagtttggcgacaacaactaccctgggggtgtggactgtgagtgggtcattgtggccgaggaaggctacggcgtggagctcgtgttccagacctttgaggtggaggaggagaccgactgcggctatgactacatggagctcttcgacggctacgacagcacagcccccaggctggggcgctactgtggctcagggcctcctgaggaggtgtactcggcgggagattctgtcctggtgaagttccactcggatgacaccatcaccaaaaaaggtttccacctgcgatacaccagcaccaagttccaggacacactccacagcaggaagtga

SEQ ID NO: 459 - DNA, 381 bp, Homo sapiens
atggcagatgagattgccaaggctcaggtcgctcggcctggtggcgacacgatctttgggaagatcatccgcaaggaaataccagccaaaatcatttttgaggatgaccggtgccttgctttccatgacatttcccctcaagcaccaacacattttctggtgatacccaagaaacatatatcccagatttctgtggcagaagatgatgatgaaagtcttcttggacacttaatgattgttggcaagaaatgtgctgctgatctgggcctgaataagggttatcgaatggtggtgaatgaaggttcagatggtggacagtctgtctatcacgttcatctccatgttcttggaggtcggcaaatgcattggcctcctggttaa

SEQ ID NO: 460 - DNA, 792 bp, Homo sapiens
atggcgcttgccagcgtgttggagagaccgctaccggtgaaccagcgcgggtttttcggacttgggggtcgtgcagatctgctggatctaggtccagggagtctcagtgatggtctgagcctggccgcgccaggctggggtgtcccagaagagccaggaatcgaaatgcttcatggaacaaccaccctggccttcaagttccgccatggagtcatagttgcagctgactccagggctacagcgggtgcttacattgcctcccagacggtgaagaaggtgatagagatcaacccatacctgctaggcaccatggctgggggcgcagcggattgcagcttctgggaacggctgttggctcggcaatgtcgaatctatgagcttcgaaataaggaacgcatctctgtagcagctgcctccaaactgcttgccaacatggtgtatcagtacaaaggcatggggctgtccatgggcaccatgatctgtggctgggataagagaggccctggcctctactacgtggacagtgaagggaaccggatttcaggggccaccttctctgtaggttctggctctgtgtatgcatatggggtcatggatcggggctattcctatgacctggaagtggagcaggcctatgatctggcccgtcgagccatctaccaagccacctacagagatgcctactcaggaggtgcagtcaacctctaccacgtgcgggaggatggctggatccgagtctccagtgacaatgtggctgatctacatgagaagtatagtggctctaccccctga

SEQ ID NO: 461 - DNA, 1269 bp, Homo sapiens
atgaactccggacacagcttcagccagaccccctcggcctccttccatggcgccggaggtggctggggccggcccaggagcttccccagggctcccaccgtccatggcggtgcggggggagcccgcatctccctgtccttcaccacgcggagctgcccaccccctggagggtcttggggttctggaagaagcagccccctactaggcggaaatgggaaggccaccatgcagaatctcaacgaccgcctggcctcctacctggagaaggttcgcgccctggaggaggccaacatgaagctggaaagccgcatcctgaaatggcaccagcagagagatcctggcagtaagaaagattattcccagtatgaggaaaacatcacacacctgcaggagcagatagtggatggtaatatgaccaatgctcagattattcttctcattgacaatgccaggatggcagtggatgacttcaacctcaagtatgaaaatgaacactcctttaagaaagacttggaaattgaagtcgagggcctccgaaggaccttagacaacctgaccattgtcacaacagacctagaacaggaggtggaaggaatgaggaaagagctcattctcatgaagaagcaccatgagcaggaaatggagaagcatcatgtgccaagtgacttcaatgtcaatgtgaaggtggatacaggtcccagggaagatctgattaaggtcctggaggatatgagacaagaatatgagcttataataaagaagaagcatcgagacttggacacttggtataaagaacagtctgcagccatgtcccaggaggcagccagtccagccactgtgcagagcagacaaggtgacatccacgaactgaagcgcacattccaggccctggagattgacctgcagacacagtacagcacgaaatctgctttggaaaacatgttatccgagacccagtctcgtaactcctgcaagctccaggacatgcaagagatcatctcccactatgaggaggaactgacgcagctacgccacgaactggagcggcagaacaatgaataccaagtgctgctgggcatcaaaacccacctggagaaggaaatcaccacgtaccgacggctcctggagggagagagtgaagggacacgggaagaatcaaagtcgagcatgaaagtgtctgcaactccaaagatcaaggccataacccaggagaccatcaacggaagattagttctttgtcaagtgaatgaaatccaaaagcacgcatga

SEQ ID NO: 462 - DNA, 2052 bp, Homo sapiens
atggcgctcttcgtgcggctgctggctctcgccctggctctggccctgggccccgccgcgaccctggcgggtcccgccaagtcgccctaccagctggtgctgcagcacagcaggctccggggccgccagcacggccccaacgtgtgtgctgtgcagaaggttattggcactaataggaagtacttcaccaactgcaagcagtggtaccaaaggaaaatctgtggcaaatcaacagtcatcagctacgagtgctgtcctggatatgaaaaggtccctggggagaagggctgtccagcagccctaccactctcaaacctttacgagaccctgggagtcgttggatccaccaccactcagctgtacacggaccgcacggagaagctgaggcctgagatggaggggcccggcagcttcaccatcttcgcccctagcaacgaggcctgggcctccttgccagctgaagtgctggactccctggtcagcaatgtcaacattgagctgctcaatgccctccgctaccatatggtgggcaggcgagtcctgactgatgagctgaaacacggcatgaccctcacctctatgtaccagaattccaacatccagatccaccactatcctaatgggattgtaactgtgaactgtgcccggctgctgaaagccgaccaccatgcaaccaacggggtggtgcacctcatcgataaggtcatctccaccatcaccaacaacatccagcagatcattgagatcgaggacacctttgagacccttcgggctgctgtggctgcatcagggctcaacacgatgcttgaaggtaacggccagtacacgcttttggccccgaccaatgaggccttcgagaagatccctagtgagactttgaaccgtatcctgggcgacccagaagccctgagagacctgctgaacaaccacatcttgaagtcagctatgtgtgctgaagccatcgttgcggggctgtctgtggagaccctggagggcacgacactggaggtgggctgcagcggggacatgctcactatcaacgggaaggcgatcatctccaataaagacatcctagccaccaacggggtgatccactacattgatgagctactcatcccagactcagccaagacactatttgaattggctgcagagtctgatgtgtccacagccattgaccttttcagacaagccggcctcggcaatcatctctctggaagtgagcggttgaccctcctggctcccctgaattctgtattcaaagatggaacccctccaattgatgcccatacaaggaatttgcttcggaaccacataattaaagaccagctggcctctaagtatctgtaccatggacagaccctggaaactctgggcggcaaaaaactgagagtttttgtttatcgtaatagcctttgcattgagaacagctgcatcgcggcccacgacaagagggggaggtacgggaccctgttcacgatggaccgggtgctgacccccccaatggggactgtcatggatgtcctgaagggagacaatcgctttagcatgctggtagctgccatccagtctgcaggactgacggagaccctcaaccgggaaggagtctacacagtcttcgctcccacaaatgaagccttccgagccctgccaccaagagaacggagcagactcttgggagatgccaaggaacttgccaacatcctgaaataccacattggtgatgaaatcctggttagcggaggcatcggggccctggtgcggctaaagtctctccaaggtgacaagctggaagtcagcttgaaaaacaatgtggtgagtgtcaacaaggagcctgttgccgagcctgacatcatggccacaaatggcgtggtccatgtcatcaccaatgttctgcagcctccagccaacagacctcaggaaagaggggatgaacttgcagactctgcgcttgagatcttcaaacaagcatcagcgttttccagggcttcccagaggtctgtgcgactagcccctgtctatcaaaagttattagagaggatgaagcattag

SEQ ID NO: 463 - DNA, 387 bp, Homo sapiens
atggctggaggcaaagctggaaaggacagtgggaaggccaaggctaaggcagtatctcgctcacagagagctgggctacagtttcctgtgggccgcatccacagacacttgaagactcgcaccacaagccatggaagggtgggtgccactgctgccgtgtacagtgctgcgattctggagtacctcactgcagaggtgctggagctggcaggtaatgcttctaaggatctcaaagtaaagcgtatcactccgcgtcacttgcagcttgcaatccgtggtgatgaagagttggattctcttatcaaggctaccatagctgggggtggtgtgatccctcacatccacaaatctctgattggaaagaagggacagcagaaaactgcttag

SEQ ID NO: 464 - DNA, 567 bp, Homo sapiens
atgagcactatgttcgcggacactctcctcatcgtttttatctctgtgtgcacggctctgctcgcagagggcataacctgggtcctggtttacaggacagacaagtacaagagactgaaggcagaagtggaaaaacagagtaaaaaattggaaaagaagaaggaaacaataacagagtcagctggtcgacaacagaaaaagaaaatagagagacaagaagagaaactgaagaataacaacagagatctatcaatggttcgaatgaaatccatgtttgctattggcttttgttttactgccctaatgggaatgttcaattccatatttgatggtagagtggtggcaaagcttccttttacccctctttcttacatccaaggactgtctcatcgaaatctgctgggagatgacaccacagactgttccttcattttcctgtatattctctgtactatgtcgattcgacagaacattcagaagattctcggccttgccccttcacgagccgccaccaagcaggcaggtggatttcttggcccaccacctccttctgggaagttctcttga

SEQ ID NO: 465 - DNA, 2112 bp, Homo sapiens
atgctgagcgcggcgctgcggaccctgaagcatgttctgtactattcaagacagtgcttaatggtgtcccgtaatcttggttcagtgggatatgatcctaatgaaaaaacttttgataaaattcttgttgctaatagaggagaaattgcatgtcgggttattagaacttgcaagaagatgggcattaagacagttgccatccacagtgatgttgatgctagttctgttcatgtgaaaatggcggatgaggctgtctgtgttggcccagctcccaccagtaaaagctacctcaacatggatgccatcatggaagccattaagaaaaccagggcccaagctgtacatccaggttatggattcctttcagaaaacaaagaatttgccagatgtttggcagcagaagatgtcgttttcattggacctgacacacatgctattcaagccatgggcgacaagattgaaagcaaattattagctaagaaagcagaggttaatacaatccctggctttgatggagtagtcaaggatgcagaagaagctgtcagaattgcgagggaaattggctaccctgtcatgatcaaggcctcagcaggtggtggtgggaaaggcatgcgcattgcttgggatgatgaagagaccagggatggttttagattgtcatctcaagaagctgcttctagttttggcgatgatagactactaatagaaaaatttattgataatcctcgtcatatagaaatccaggttctaggtgataaacatgggaatgctttatggcttaatgaaagagagtgctcaattcagagaagaaatcagaaggtggtggaggaagcaccaagcatttttttggatgcggagactcgaagagcgatgggagaacaagctgtagctcttgccagagcagtaaaatattcctctgctgggaccgtggagttccttgtggactctaagaagaatttttatttcttggaaatgaatacaagactccaggttgagcatcctgtcacagaatgcattactggcctggacctagtccaggaaatgatccgtgttgctaagggctaccctctcaggcacaaacaagctgatattcgcatcaacggctgggcagttgaatgtcgggtttatgctgaggacccctacaagtcttttggtttaccatctattgggagattgtctcagtaccaagaaccgttacatctacctggtgtccgagtggacagtggcatccaaccaggaagtgatattagcatttattatgatcctatgatttcaaaactaatcacatatggctctgatagaactgaggcactgaagagaatggcagatgcactggataactatgttattcgaggtgttacacataatattgcattacttcgagaggtgataatcaactcacgctttgtaaaaggagacatcagcactaaatttctctccgatgtgtatcctgatggcttcaaaggacacatgctaaccaagagtgagaagaaccagttattggcaatagcatcatcattgtttgtggcattccagttaagagcacaacattttcaagaaaattcaagaatgcctgttattaaaccagacatagccaactgggagctctcagtaaaattgcatgataaagttcataccgtagtagcatcaaacaatgggtcagtgttctcggtggaagttgatgggtcgaaactaaatgtgaccagcacgtggaacctggcttcgcccttattgtctgtcagcgttgatggcactcagaggactgtccagtgtctttctcgagaagcaggtggaaacatgagcattcagtttcttggtacagtgtacaaggtgaatatcttaaccagacttgccgcagaattgaacaaatttatgctggaaaaagtgactgaggacacaagcagtgttctgcgttccccgatgcccggagtggtggtggccgtctctgtcaagcctggagacgcggtagcagaaggtcaagaaatttgtgtgattgaagccatgaaaatgcagaatagtatgacagctgggaaaactggcacggtgaaatctgtgcactgtcaagctggagacacagttggagaaggggatctgctcgtggagctggaatga

SEQ ID NO: 466 - DNA, 1135 bp, Homo sapiens
tttagaaaatgtcctaaaatgtgcattttattccatatcattatacaatgtttacatatagttaaaactctcaagaaaacgtcctttaccagttgtatgtggtgtctaaatctttaacatgaaggactgaaaagagtggaaatccacactgattgttatcctacagattgtcatgagctgcacgtgtgccaatcagaaaggaatggaagtctcagaagagcagcgtggcttacagacccttggctttagtgaattcaggcatgcgggatccatagtctcatcttgtagtaaaactcaagacaaaataaattagtgttggacagagttctacattgtacaatgttgaacaaaagaccacagggggaccttttgttcaaagtagcaccaatccacacctgattgtgtttccaacattaaccttcctgttgactctatcattggcactttgaatggaacttctcctgctttagtgaggattcctacgctgactaagcacactgtgttgtttaactctctacaaagtgtggcagcatcaacccgggaaatggcacatttgaaccaggatcgccctgacatgggcttgcctttttgtatgtgttttccccaccccctgacctagctggtatcttgtggatgtttctgtgacagtggtaaaagtaaataaattgcatttaaggggtaagcaggtgtttaaaaacaaaacaaaacaaaacaaaacaaaatgaaagaatgtggtcgcagctaaggaggttttcacatgttgtttaactccagtaaagtctgatccagcatctgatgcatactaaggttttcttctttggcatgagccactttctcttctaagtcatcaatgcttttctccaatttagttactgacctctccgcaaactcagcccgagtctcagcctccttcagcttgtcggaaaggaccttgatctcttcctcatatctgtcttccttctgcgagtacttatcctctgcagccattaatgctttcaaggtctgatccattattcttaattgttcttccagctgtcggacttggccttctgagagctcagcccgctcctctgcacgttccaggtcgctctcaatgatgaccagcttaggcctcattgagagtctccgtcgaact

SEQ ID NO: 467 - DNA, 387 bp, Homo sapiens
atggcagggaacctcttatccggggcaggtaggcgcctgtgggactgggtgcctctggcgtgcagaagcttctctcttggtgtgcctagattgatcggtataaggctcactctcccgccccccaaagtggttgatcgttggaacgagaaaagggccatgttcggagtgtatgacaacatcgggatcctgggaaactttgaaaagcaccccaaagaactgatcagggggcccatatggcttcgaggttggaaagggaatgaattgcaacgttgtatccgaaagaggaaaatggttggaagtagaatgttcgctgatgacctgcacaaccttaataaacgcatccgctatctctacaaacactttaaccgacatgggaagtttcgatag

SEQ ID NO: 468 - DNA, 456 bp, Homo sapiens
atggccgcgtccagtcaaggaaactttgagggaaattttgagtcactggaccttgcggaatttgctaagaagcagccatggtggcgtaagctgttcgggcaggaatctggaccttcagcagaaaagtatagcgtggcaacccagctgttcattggaggtgtcactggatggtgcacaggtttcatattccagaaggttggaaagttggctgcaacagctgtgggaggtggattttttctccttcagcttgcaaaccatactgggtacatcaaagttgactggcaacgagtggagaaggacatgaagaaagccaaagagcagctgaagatccgtaagagcaatcagatacctactgaggtcaggagcaaagctgaggaggtggtgtcatttgtgaagaagaatgttctagtaactgggggatttttcggaggctttctgcttggcatggcatcctaa

SEQ ID NO: 469 - DNA, 480 bp, Homo sapiens
atgaagaagatgcttgttggattcttgaggacacagcatgtctggaagccaccaaccactgtcccttctgggactcaacaggctcccgtgtttgtagaagtggctttgtggaatattcccatctcctgcctcctaatagctttgagggagctgaagaagaagctgttcaaacgccggcgggtgttgaatcgggagcggcgtctgaggcaccgggtggtcggggctgtgatagaccaagggctgatcacgcggcaccacctcaagaagcgggcgtccagtgcacgtgccaacattacactgtcagggaagaagcgcagaaaactcctccagcagatccggcttgcccagaaagagaagacagccatggaagtggaagccccttcaaagccagccaggactagtgaaccacagctcaaaaggcaaaagaagacaaaagccccccaggatgtagaaatgaaggaccttgaagatgagagctaa

SEQ ID NO: 470 - DNA, 702 bp, Homo sapiens
atggtgtccatgagtttcaagcggaaccgcagtgaccggttctacagcacccggtgctgcggctgttgccatgtccgcaccgggacgatcatcctggggacctggtacatggtagtaaacctattgatggcaattttgctgactgtggaagtgactcatccaaactccatgccagctgtcaacattcagtatgaagtcatcggtaattactattcgtctgagagaatggctgataatgcctgtgttctttttgccgtctctgttcttatgtttataatcagttcaatgctggtttatggagcaatttcttatcaagtgggttggctgattccattcttctgttaccgactttttgacttcgtcctcagttgcctggttgctattagttctctcacctatttgccaagaatcaaagaatatctggatcaactacctgattttccctacaaagatgacctcctggccttggactccagctgcctcctgttcattgttcttgtgttctttgccttattcatcatttttaaggcttatctaattaactgtgtttggaactgctataaatacatcaacaaccgaaacgtgccggagattgctgtgtaccctgcctttgaagcacctcctcagtacgttttgccaacctatgaaatggccgtgaaaatgcctgaaaaagaaccaccacctccttacttacctgcctga

SEQ ID NO: 471 - DNA, 1002 bp, Homo sapiens
atgtctggggacgagatgatttttgatcctactatgagcaagaagaaaaagaagaagaagaagccttttatgttagatgaggaaggggatacccaaacagaggaaacccagccttcagaaacaaaagaagtggagccagagccaactgaggacaaggatttggaagctgatgaagaggacactaggaaaaaagatgcttctgatgatctagatgacttgaacttctttaatcaaaagaaaaagaagaaaaaaactaaaaagatatttgatattgatgaagctgaagaaggtgtaaaggatcttaagattgaaagtgatgttcaagaaccaactgaaccagaggatgaccttgacattatgcttggcaataaaaagaagaaaaagaagaatgttaagttcccagatgaggatgaaatactagagaaagatgaagctctagaagatgaagacaacaaaaaagatgatggtatctcattcagtaatcagacaggccctgcttgggcaggctcagaaagagactacacatacgaggagctgctgaatcgagtgttcaacatcatgagggaaaagaatccagatatggttgctggggagaaaaggaaatttgtcatgaaacctccacaagtcgtccgagtaggaaccaagaaaacttcttttgtcaactttacagatatctgtaaactattacatcgtcagcccaaacatctccttgcatttttgttggctgaattgggtacaagtggttctatagatggtaataaccaacttgtaatcaaaggaagattccaacagaaacagatagaaaatgtcttgagaagatatatcaaggaatatgtcacttgtcacacatgccgatcaccggacacaatcctgcagaaggacacacgactctatttcctacagtgcgaaacttgtcattctagatgttctgttgccagtatcaaaaccggcttccaggctgtcacgggcaagcgagcacagctccgtgccaaagctaactaa

SEQ ID NO: 472 - DNA, 561 bp, Homo sapiens
atggcggtggccagggccggggtcttgggagtccagtggctgcaaagggcatcccggaacgtgatgccgctgggcgcacggacagcctcccacatgaccaaggacatgttcccggggccctatcctaggaccccagaagaacgggccgccgccgccaagaagtataatatgcgtgtggaagactacgaaccttacccggatgatggcatggggtatggcgactacccgaagctccctgaccgctcacagcatgagagagatccatggtatagctgggaccagccgggcctgaggttgaactggggtgaaccgatgcactggcacctagacatgtacaacaggaaccgtgtggatacatcccccacacctgtttcttggcatgtcatgtgtatgcagctcttcggtttcctggctttcatgatattcatgtgctgggtgggggacgtgtaccctgtctaccagcctgtgggaccaaagcagtatccttacaataatctgtacctggaacgaggcggtgatccctccaaagaaccagagcgggtggttcactatgagatctga

SEQ ID NO: 473 - DNA, 1074 bp, Homo sapiens
atggccacaccggcggtaccagtaagtgctcctccggccacgccaaccccagtcccggcggcggccccagcctcagttccagcgccaacgccagcaccggctgcggctccggttcccgctgcggctccagcctcatcctcagaccctgcggcagcagcggctgcaactgcggctcctggccagaccccggcctcagcgcaagctccagcgcagaccccagcgcccgctctgcctggtcctgctcttccagggcccttccccggcggccgcgtggtcaggctgcacccagtcattttggcctccattgtggacagctacgagagacgcaacgagggtgctgcccgagttatcgggaccctgttgggaactgtcgacaaacactcagtggaggtcaccaattgcttttcagtgccgcacaatgagtcagaagatgaagtggctgttgacatggaatttgctaagaatatgtatgaactgcataaaaaagtttctccaaatgagctcatcctgggctggtacgctacgggccatgacatcacagagcactctgtgctgatccatgagtactacagccgagaggcccccaaccccatccacctcactgtggacacaagtctccagaacggccgcatgagcatcaaagcctacgtcagcactttaatgggagtccctgggaggaccatgggagtgatgttcacgcctctgacagtgaaatacgcgtactacgacactgaacgcatcggagttgacctgatcatgaagacctgctttagccccaacagagtgattggactctcaagtgacttgcagcaagtaggaggggcatcagctcgcatccaggatgccctgagtacagtgttgcaatatgcagaggatgtactgtctggaaaggtgtcagctgacaatactgtgggccgcttcctgatgagcctggttaaccaagtaccgaaaatagttcccgatgactttgagaccatgctcaacagcaacatcaatgaccttttgatggtgacctacctggccaacctcacacagtcacagattgcactcaatgaaaaacttgtaaacctgtga

SEQ ID NO: 474 - DNA, 555 bp, Homo sapiens
atggttcgctattcacttgacccggagaaccccacgaaatcatgcaaatcaagaggttccaatcttcgtgttcactttaagaacactcgtgaaactgctcaggccatcaagggtatgcatatacgaaaagccacgaagtatctgaaagatgtcactttacagaaacagtgtgtaccattccgacgttacaatggtggagttggcaggtgtgcgcaggccaagcaatggggctggacacaaggtcggtggcccaaaaagagtgctgaatttttgctgcacatgcttaaaaacgcagagagtaatgctgaacttaagggtttagatgtagattctctggtcattgagcatatccaagtgaacaaagcacctaagatgcgccgccggacctacagagctcatggtcggattaacccatacatgagctctccctgccacattgagatgatccttacggaaaaggaacagattgttcctaaaccagaagaggaggttgcccagaagaaaaagatatcccagaagaaactgaagaaacaaaaacttatggcacgggagtaa

SEQ ID NO: 475 - DNA, 459 bp, Homo sapiens
atggctgtcctctctaaggaatatggttttgtgcttctaactggtgctgccagctttataatggtggcccacctagccatcaatgtttccaaggcccgcaagaagtacaaagtggagtatcctatcatgtacagcacggaccctgaaaatgggcacatcttcaactgcattcagcgagcccaccagaacacgttggaagtgtatcctcccttcttattttttctagctgttggaggtgtttaccacccgcgtatagcttctggcctgggcttggcctggattgttggacgagttctttatgcttatggctattacacgggagaacccagcaagcgtagtcgaggagccctggggtccatcgccctcctgggcttggtgggcacaactgtgtgctctgctttccagcatcttggttgggttaaaagtggcttgggcagtggacccaaatgctgccattaa

SEQ ID NO: 476 - DNA, 834 bp, Homo sapiens
atggcggctgtgtcggtgtatgctccaccagttggaggcttctcttttgataactgccgcaggaatgccgtcttggaagccgattttgcaaagaggggatacaagcttccaaaggcccggaaaactggcacgaccatcgctggggtggtctataaggatggcatagttcttggagcagatacaagagcaactgaagggatggttgttgctgacaagaactgttcaaaaatacacttcatatctcctaatatttattgttgtggtgctgggacagctgcagacacagacatgacaacccagctcatttcttccaacctggagctccactccctctccactggccgtcttcccagagttgtgacagccaatcggatgctgaagcagatgcttttcaggtatcaaggttacattggtgcagccctagttttagggggagtagatgttactggacctcacctctacagcatctatcctcatggatcaactgataagttgccttatgtcaccatgggttctggctccttggcagcaatggctgtatttgaagataagtttaggccagacatggaggaggaggaagccaagaatctggtgagcgaagccatcgcagctggcatcttcaacgacctgggctccggaagcaacattgacctctgcgtcatcagcaagaacaagctggattttctccgcccatacacagtgcccaacaagaaggggaccaggcttggccggtacaggtgtgagaaagggactactgcagtcctcactgagaaaatcactcctctggagattgaggtgctggaagaaacagtccaaacaatggacacttcctga

SEQ ID NO: 477 - DNA, 3756 bp, Homo sapiens
ttttttttttttgcaagatatcccttggttttattttaacttaacctttgtgaatacttcacaaaaatacacatacagaagtaaataaaactatacagttgaactaaatatccagcagatacaacaagtagtcagaagttcaaagatggataagttaggcagctgatgaggttgtctgcataatcaaaggggtagcacaaataatgaacaaataacttttaacaaaagcattctagttaacataaaagaaattggtagtctataaaatggttgaatgggtaacatgcattgatcaatacaacaaccaataatatttactgaattcaaactatttacttgtaaacatttaacaaagcattatgagatctaaatacagtctttgacaatttcaacaaaataagtcgtatgtttaaaaaataaagctgatgagcaatagatcattctatatattttctttcaacagttccagcaagagaaatagcagagtattttttaaaagtatacagcaaagattgttcctattataatgacaaactctggaaactgtaaatacaaataatcattgaacagtcaaatggtcatattcctaatcaggaagtagttacagtaagaacagtctgcaatccagttatacacaattgtcaataagaatgtgtttcttgtcagttgatttcatagttctttctctaagagacagcaaaactttggcaactgggtgtactgaaaatatattttgaaagttcgagatatcaagatacagtcatagcatttcgttttgtgaaaggtggtctgtacaccaaggctcagaggttgttaaagattgattccatgtggaaatagtgcaaatatcctgcacagatagcttacaaggttgctggcatagttattcaccagcagaatcttggattttgtttgcatagctcacacatcactggaatgtggaaaagtgtgctattttttggcaagagcaaaggagacattaaactgaagtgaattaccatgttggacatgctgaatccatgcagaacactggggcgaaggctgctacctgacatcattggtttttgtatactggttttgtttttgttgaagcagttctgttatagccagaagctttttcaatacgtgctgctgtgcaccacgctcattactgagcgttcgaagttcatctgaatgagccacgcaaatctcatgcaatgctgctaaatcacgggacaggtccgttctagaatgctctgtagtgtccggaagttcaggtacattcccaagttcatctaaaaacatgatcatacgatgtttgttgcttttgatgaatggattgacaccttccatgtagggctccttagctccaaattccacaagatttgctaagttctgcacagatttagccactaatatcagtgttcttgcagcaataggagatggagaatctgagatgatattgaacatccgtggattcaggatggcaggacagatgagtcgaagaaaaacaaaaccactaacaactcttgttctcatggtggtatttgtaggccacttatgctgaacagatttctgtaaacacccataaatatatctcaatgtcggtggaagtatttctgaagccatgaatattttctccacaagctctgaaagtatgttcaataggtgtgttaaattagtgttcacatcttcatttttttctaactttgatggacttaactcacaagactgcttgctttccattatctttaaaatagagtctttcaaagcatgatgaacaaactgtgtagcagtggctttcatatactgctccatcaaggtgcttgcaagtgttgtggctcgaaatagggtagtggcttcatcttccatgcttatttctctgtcatttagtgtgcataacaacaacgattcaagcttttcgtgaagaaaaatcctcagtaggatgctggccagtagtgttcggtcttgtccacatacatgtgataaagcatagactacatgaagttccttttgcagtataagctctttaaattcactgtactcttcttctggcatgattttttccatagagtatcgtgctcgaacacgcagggaccctggttcaataccttttaatggtatatgggagctgagcagaaaccattcatctgtggcatgccctttctgtaatcggctcaactggcagcgcataaataagatatcaggatctttgcttttctttgttttattactaagagttatttcaaatctattgatgtcaggaggaagatcatcaaagacaaactcttctgaccatactgggttttgcccttcccttgcatgagtttttgctacttggacactattcaggtagatgttacaatatggattagtaaaatgttttactgggagtttatgggcttcttcaatatgtaaaacaaggctgctgacctgacgaaggcgtttattggatgtccctggactacttttccgtaaattgcaaaatgcctgcagacctttcatccaatcctctgcttgttctggagtttctcctgcaaagtaaaagatgtaatgttcttcactaaagtgctgaactactatctgaaaacagtttggcctgccaaagagactatcatgaacgacatagacagaacatacactgagatctattaatccttttggtttggtagctcgtttttcgctttcaaaataaataagttgggcatcactaccctctaagataaaatataaatttttccaacgttttcctttgccctttttcagaagataacctttcttaacaatgtttttataaaaggcatcctttgttttacgacggatggtattatagatttccttgccatccactgtgtcattgagtacttgttcttgatcctgcattggtacaggttccttaagataatatccttcaacaatctgttcttttcgatagtgatctatgatgtccccaatgctgttataataccggcctcccatcataaactgattgtttggcgttggacatattttaaatcgctgaatattttcattggtccggaaataaagtgaataatcgccaggagtattatctgagggcctcacaagaaaactgcagacttgaccaactgtcattagtaaattataagcttcctgtttggaaatcttcccatggaaccatatttttccttcatgtggatcttcttcccggcccacctcttctactaggtcttcaacaataaggccttgttcatctgttcttaaatttgtaacccacatccatccatcttctaattcattatgaacaatgaacatatctccttttaagaaacttatttcatcagtgtctggtacttttgtgtaaggtagaatagctcgtacacgccttctatcttctactggctctggtggtgcaactgggtaaagtaatttttctcctttaagcaaacaagaaacatgactgtaataacctattaggtctgacagtgaagaaaaacgtcttccaccaatgtagtaatctccacacatagcaataatcctaaaatggttgacaacattcatctggctaagaaatgaaagtacaaaggaccctggcctccgatcactctctcttataagataactgccagacttccctgcctgcctgaggcgttcttctgctatcgttctgtcaagttttccgtgataccaccccttcatttccacttcttttctggagccagcttcccaaattcctgaacagcagtcttaacttactggttagttggaggagcggtcaacggtatggccacctcttcc

SEQ ID NO: 478 - DNA, 1323 bp, Homo sapiens
atgggtcaaagtcagagtggtggtcatggtcctggaggtggcaagaaggatgacaaggacaagaaaaagaaatatgaacctcctgtaccaactagagtggggaaaaagaagaagaaaacaaagggaccagatgctgccagcaaactgccactggtgacacctcacactcagtgccggttaaaattactgaagttagagagaattaaagactatcttctcatggaggaagaattcattagaaatcaggaacaaatgaaaccattagaagaaaagcaagaggaggaaagatcaaaagtggatgatctgagggggaccccgatgtcagtaggaaccttggaagagattattgatgacaatcatgccatcgtgtctacatctgtgggctcagaacactacgtcagcattctttcatttgtagacaaggatctgctggaacctggctgctcggtcctgctcaaccacaaggtgcatgccgtgataggggtgctgatggatgacacggatcccctggtcacagtgatgaaggtagaaaaggccccccaggagacctatgcagatattggggggttggacaaccaaattcaggaaattaaggaatctgtggagcttcctctcacccatcctgaatattatgaagagatgggtataaagcctcctaagggggtcattctctatggtccacctggcacaggtaaaaccttgttagccaaagcagtagcaaaccaaacctcagccactttcttgagagtggttggctctgaacttattcagaagtacctaggtgatgggcccaaactcgtacgggaattgttccgagttgctgaagaacatgcaccgtccatcgtgtttattgatgaaattgacgccattgggacaaaaagatatgactccaattctggtggtgagagagaaattcagcgaacaatgttggaactgctgaaccagttggatggatttgattctaggggagatgtgaaagttatcatggccacaaaccgaatagaaactttggatccagcacttatcagaccaggccgcattgacaggaagattgagttccccctgcctgatgaaaagacgaagaagcgcatctttcagattcacacaagcaggatgacgctggctgatgatgtaaccctggacgacctgatcatggctaaagatgacctctctggtgctgacatcaaggcaatctgtacagaagctggtctgatggccttaagagaacgtagaatgaaagtaacaaatgaagacttcaaaaaatctaaagaaaatgttctttataagaaacaggaaggcacccctgaggggctgtatctctaa

SEQ ID NO: 479 - DNA, 1257 bp, Homo sapiens
atgcaggccctggtgctactcctctgcattggagccctcctcgggcacagcagctgccagaaccctgccagccccccggaggagggctccccagaccccgacagcacaggggcgctggtggaggaggaggatcctttcttcaaagtccccgtgaacaagctggcagcggctgtctccaacttcggctatgacctgtaccgggtgcgatccagcacgagccccacgaccaacgtgctcctgtctcctctcagtgtggccacggccctctcggccctctcgctgggagcggagcagcgaacagaatccatcattcaccgggctctctactatgacttgatcagcagcccagacatccatggtacctataaggagctccttgacacggtcaccgccccccagaagaacctcaagagtgcctcccggatcgtctttgagaagaagctgcgcataaaatccagctttgtggcacctctggaaaagtcatatgggaccaggcccagagtcctgacgggcaaccctcgcttggacctgcaagagatcaacaactgggtgcaggcgcagatgaaagggaagctcgccaggtccacaaaggaaattcccgatgagatcagcattctccttctcggtgtggcgcacttcaaggggcagtgggtaacaaagtttgactccagaaagacttccctcgaggatttctacttggatgaagagaggaccgtgagggtccccatgatgtcggaccctaaggctgttttacgctatggcttggattcagatctcagctgcaagattgcccagctgcccttgaccggaagcatgagtatcatcttcttcctgcccctgaaagtgacccagaatttgaccttgatagaggagagcctcacctccgagttcattcatgacatagaccgagaactgaagaccgtgcaggcggtcctcactgtccccaagctgaagctgagttacgaaggcgaagtcaccaagtccctgcaggagatgaagctgcaatccttgtttgattcaccagactttagcaagatcacaggcaaacccatcaagctgactcaggtggaacaccgggctggctttgagtggaacgaggatggggcgggaaccacccccagcccagggctgcagcctgcccacctcaccttcccgctggactatcaccttaaccagcctttcatcttcgtactgagggacacagacacaggggcccttctcttcattggcaagattctggaccccaggggcccctaa

SEQ ID NO: 480 - DNA, 927 bp, Homo sapiens
atgcccgggcaagaactcaggacggtgaatggctctcagatgctcctggtgttgctggtgctctcgtggctgccgcatgggggcgccctgtctctggccgaggcgagccgcgcaagtttcccgggaccctcagagttgcactccgaagactccagattccgagagttgcggaaacgctacgaggacctgctaaccaggctgcgggccaaccagagctgggaagattcgaacaccgacctcgtcccggcccctgcagtccggatactcacgccagaagtgcggctgggatccggcggccacctgcacctgcgtatctctcgggccgcccttcccgaggggctccccgaggcctcccgccttcaccgggctctgttccggctgtccccgacggcgtcaaggtcgtgggacgtgacacgaccgctgcggcgtcagctcagccttgcaagaccccaggcgcccgcgctgcacctgcgactgtcgccgccgccgtcgcagtcggaccaactgctggcagaatcttcgtccgcacggccccagctggagttgcacttgcggccgcaagccgccagggggcgccgcagagcgcgtgcgcgcaacggggaccactgtccgctcgggcccgggcgttgctgccgtctgcacacggtccgcgcgtcgctggaagacctgggctgggccgattgggtgctgtcgccacgggaggtgcaagtgaccatgtgcatcggcgcgtgcccgagccagttccgggcggcaaacatgcacgcgcagatcaagacgagcctgcaccgcctgaagcccgacacggtgccagcgccctgctgcgtgcccgccagctacaatcccatggtgctcattcaaaagaccgacaccggggtgtcgctccagacctatgatgacttgttagccaaagactgccactgcatatga

SEQ ID NO: 481 - DNA, 447 bp, Homo sapiens
atggcccgggccctgtgccgcctcccgcggcgcggcctctggctgctcctggcccatcacctcttcatgaccactgcctgccaggaggctaactacggtgccctcctccgggagctctgcctcacccagttccaggtagacatggaggccgtcggggagacgctgtggtgtgactggggcaggaccatcaggagctacagggagctggccgactgcacctggcacatggcggagaagctgggctgcttctggcccaatgcagaggtggacaggttcttcctggcagtgcatggccgctacttcaggagctgccccatctcaggcagggccgtgcgggacccgcccggcagcatcctctaccccttcatcgtggtccccatcacggtgaccctgctggtgacggcactggtggtctggcagagcaagcgcactgagggcattgtgtag

SEQ ID NO: 482 - DNA, 801 bp, Homo sapiens
atggtgaaggtgacgttcaactccgctctggcccagaaggaggccaagaaggacgagcccaagagcggcgaggaggcgctcatcatcccccccgacgccgtcgcggtggactgcaaggacccagatgatgtggtaccagttggccaaagaagagcctggtgttggtgcatgtgctttggactagcatttatgcttgcaggcgttattctaggaggagcatacttgtacaaatattttgcacttcaaccagatgacgtgtactactgtggaataaagtacatcaaagatgatgtcatcttaaatgagccctctgcagatgccccagctgctctctaccagacaattgaagaaaatattaaaatctttgaagaagaagaagttgaatttatcagtgtgcctgtcccagagtttgcagatagtgatcctgccaacattgttcatgactttaacaagaaacttacagcctatttagatcttaacctggataagtgctatgtgatccctctgaacacttccattgttatgccacccagaaacctactggagttacttattaacatcaaggctggaacctatttgcctcagtcctatctgattcatgagcacatggttattactgatcgcattgaaaacattgatcacctgggtttctttatttatcgactgtgtcatgacaaggaaacttacaaactgcaacgcagagaaactattaaaggtattcagaaacgtgaagccagcaattgtttcgcaattcggcattttgaaaacaaatttgccgtggaaactttaatttgttcttga

SEQ ID NO: 483 - DNA, 282 bp, Homo sapiens
atgtcaacagacacaggtgtttcccttccttcatatgaggaagatcagggatcaaaactcattcgaaaagctaaagaggcaccattcgtacccgttggaatagcgggttttgcagcaattgttgcatatggattatataaactgaagagcaggggaaatactaaaatgtccattcatctgatccacatgcgtgtggcagcccaaggctttgttgtaggagcaatgactgttggtatgggctattccatgtatcgggaattctgggcaaaacctaagccttag

SEQ ID NO: 484 - DNA, 531 bp, Homo sapiens
atggcagcgagcacagacatggctgggctggaggagagcttccgcaagtttgccatccatggtgaccccaaggccagtgggcaagagatgaatggcaagaactgggccaagctgtgcaaggactgcaaggtggctgacggaaagtccgtgacagggaccgatgtggacatcgtcttctccaaagtcaaggggaagtctgctcgggtcatcaactatgaggagttcaagaaggccctggaagagctggcgaccaagagattcaaggggaagagcaaggaggaggccttcgatgccatctgccagctggtggcaggcaaagagccagccaatgtgggcgtcactaaagcaaaaacagggggtgctgtagaccggctgacggacaccagcagatacacgggctcccacaaggagcgcttcgatgagagcggcaagggcaagggcattgcgggacggcaggacatcctggacgacagtggctacgtgagcgcctacaagaatgcaggcacctacgatgccaaggtgaagaagtga

SEQ ID NO: 485 - DNA, 474 bp, Homo sapiens
atggcgacgccccctaagcggcgggcggtggaggccacgggggagaaagtgctgcgctacgagaccttcatcagtgacgtgctgcagcgggacttgcgaaaggtgctggaccatcgagacaaggtatatgagcagctggccaaataccttcaactgagaaatgtcattgagcgactccaggaagctaagcactcggagttatatatgcaggtggatttgggctgtaacttcttcgttgacacagtggtcccagatacttcacgcatctatgtggccctgggatatggttttttcctggagttgacactggcagaagctctcaagttcattgatcgtaagagctctctcctcacagagctcagcaacagcctcaccaaggactccatgaatatcaaagcccatatccacatgttgctagaggggcttagagaactacaaggcctgcagaatttcccagagaagcctcaccattga

SEQ ID NO: 486 - DNA, 519 bp, Homo sapiens
atgccggggatagtggagctgcccactctagaggagctgaaagtagatgaggtgaaaattagttctgctgtgcttaaagctgcggcccatcactatggagctcaatgtgataagcccaacaaggaatttatgctctgccgctgggaagagaaagatccgaggcggtgtttagaggaaggcaaactggtcaacaagtgtgctttggacttctttaggcagataaaacgtcactgtgcagagccttttacagaatattggacttgcattgattatactggccagcagttatttcgtcactgtcgcaaacagcaggcaaagtttgacgagtgtgtgctggacaaactgggctgggtgcggcctgacctgggagaactgtcaaaggtcaccaaagtgaaaacagatcgacctttaccggagaatccctatcactcaagaccaagaccggatcccagccctgagatcgagggagatctgcagcctgccacacatggcagccgcttttatttctggaccaagtaa

SEQ ID NO: 487 - DNA, 447 bp, Homo sapiens
atggcgtcggtggtgttggcgctgaggacccggacagccgttacatccttgctaagccccactccggctacagctcttgctgtcagatacgcatccaagaagtcgggtggtagctccaaaaacctcggtggaaagtcatcaggcagacgccaaggcattaagaaaatggaaggtcactatgttcatgctgggaacatcattgcaacacagcgccatttccgctggcacccaggtgcccatgtgggtgttgggaagaataaatgtctgtatgccctggaagaggggatagtccgctacactaaggaggtctacgtgcctcatcccagaaacacggaggctgtggatctgatcaccaggctgcccaagggtgctgtgctctacaagacttttgtccacgtggttcctgccaagcctgagggcaccttcaaactggtagctatgctttga

SEQ ID NO: 488 - DNA, 1695 bp, Homo sapiens
atgtcttatcccgctgatgattatgagtctgaggcggcttatgacccctacgcttatcccagcgactatgatatgcacacaggagatccaaagcaggaccttgcttatgaacgtcagtatgaacagcaaacctatcaggtgatccctgaggtgatcaaaaacttcatccagtatttccacaaaactgtctcagatttgattgaccagaaagtgtatgagctacaggccagtcgtgtctccagtgatgtcattgaccagaaggtgtatgagatccaggacatctatgagaacagctggaccaagctgactgaaagattcttcaagaatacaccttggcccgaggctgaagccattgctccacaggttggcaatgatgctgtcttcctgattttatacaaagaattatactacaggcacatatatgccaaagtcagtgggggaccttccttggagcagaggtttgaatcctattacaactactgcaatctcttcaactacattcttaatgccgatggtcctgctccccttgaactacccaaccagtggctctgggatattatcgatgagttcatctaccagtttcagtcattcagtcagtaccgctgtaagactgccaagaagtcagaggaggagattgactttcttcgttccaatcccaaaatctggaatgttcatagtgtcctcaatgtccttcattccctggtagacaaatccaacatcaaccgacagttggaggtatacacaagcggaggtgaccctgagagtgtggctggggagtatgggcggcactccctctacaaaatgcttggttacttcagcctggtcgggcttctccgcctgcactccctgttaggagattactaccaggccatcaaggtgctggagaacatcgaactgaacaagaagagtatgtattcccgtgtgccagagtgccaggtcaccacatactattatgttgggtttgcatatttgatgatgcgtcgttaccaggatgccatccgggtcttcgccaacatcctcctctacatccagaggaccaagagcatgttccagaggaccacgtacaagtatgagatgattaacaagcagaatgagcagatgcatgcgctgctggccattgccctcacgatgtaccccatgcgtattgatgagagcattcacctccagctgcgggagaaatatggggacaagatgttgcgcatgcagaaaggtgacccacaagtctatgaagaacttttcagttactcctgccccaagttcctgtcgcctgtagtgcccaactatgataatgtgcaccccaactaccacaaagagcccttcctgcagcagctgaaggtgttttctgatgaagtacagcagcaggcccagctttcaaccatccgcagcttcctgaagctctacaccaccatgcctgtggccaagctggctggcttcctggacctcacagagcaggagttccggatccagcttcttgtcttcaaacacaagatgaagaacctcgtgtggaccagcggtatctcagccctggatggtgaatttcagtcagcctcagaggttgacttctacattgataaggacatgatccacatcgcggacaccaaggtcgccaggcgttatggggatttcttcatccgtcagatccacaaatttgaggagcttaatcgaaccctgaagaagatgggacagagaccttga

SEQ ID NO: 489 - DNA, 1605 bp, Homo sapiens
atgaggccagatgacaagtatcacgagaagcaggcacaggtggaagccacgaagctcaagcagaaggtcgaggctctgtcccccggagacaggcagcagatctacgagaaaggtctagaattacggagtcaacaaagcaaacctcaagatgcctcttgtctgccagcgttgaaagtttccgatattgaacccaccatacctgtcacagagttggacgtggtcctgacagctggagatatccctgttcagtactgcgcccagcccaccaatggcatggtgtatttccgggccttctccagcctgaacacactccccgaggagctgaggccctatgtgcccctcttctgcagcgtcctcaccaagctgggctgcggccttcttgactaccgggagcaggctcagcagatagaattgaagaccggagggatgagtgcttctccccacgtgctccccgacgactcacacatggacacctacgagcagggtgtgcttttctcctctctctgcctggatcgaaacctgccagacatgatgcagctatggagtgaaatatttaacaacccgtgctttgaagaagaggagcacttcaaggtgctggtgaagatgaccgcccaggagctcgccaatggaattcctgactctgggcacctgtacgcatccatcagggcaggccggaccctcacgcccgcaggggacctgcaggagaccttcagcgggatggatcaggtgcggctgatgaagaggattgcagaaatgacagatatcaaacccatcctgaggaagctcccacgtatcaagaaacacttgttaaatggtgataatatgaggtgttcagtgaatgcgactcctcagcagatgcctcagacagaaaaagcggtcgaagacttccttagaagcatcggtcggagtaaaaaggaacggaggcctgtgcgcccacacacggtcgagaaacctgtgcccagcagctctggtggagatgcccacgttccccatggctcccaggtcattaggaagctggtcatggaacccaccttcaagccctggcagatgaagactcacttcctgatgcccttcccggtgaattacgtgggtgaatgcatccgaactgtcccctacacggacccagatcatgccagtcttaaaatccttgcacgtttgatgactgccaaattcttgcatacagaaattcgagaaaaaggcggtgcttatggtggaggcgcaaaactcagccacaatgggattttcaccctttactcttacagggacccaaatacaatagagacgctccagtcttttgggaaggctgtcgactgggctaagtctggaaaattcacacagcaagacatcgacgaagccaaactttctgtcttctcaaccgtagatgctcctgtcgctccttcagacaaaggaatggaccacttcttgtacggcctctcggatgagatgaagcaggcccacagagagcagctctttgctgtcagccacgacaagctcctggccgtgagcgatagatacctcggcactgggaagagcacacacggcctggccatcctcggacccgagaacccgaaaattgccaaggacccatcctggatcatccgatga

SEQ ID NO: 490 - DNA, 1146 bp, Homo sapiens
atgaccgtcgcgcggccgagcgtgcccgcggcgctgcccctcctcggggagctgccccggctgctgctgctggtgctgttgtgcctgccggccgtgtggggtgactgtggccttcccccagatgtacctaatgcccagccagctttggaaggccgtacaagttttcccgaggatactgtaataacgtacaaatgtgaagaaagctttgtgaaaattcctggcgagaaggactcagtgatctgccttaagggcagtcaatggtcagatattgaagagttctgcaatcgtagctgcgaggtgccaacaaggctaaattctgcatccctcaaacagccttatatcactcagaattattttccagtcggtactgttgtggaatatgagtgccgtccaggttacagaagagaaccttctctatcaccaaaactaacttgccttcagaatttaaaatggtccacagcagtcgaattttgtaaaaagaaatcatgccctaatccgggagaaatacgaaatggtcagattgatgtaccaggtggcatattatttggtgcaaccatctccttctcatgtaacacagggtacaaattatttggctcgacttctagtttttgtcttatttcaggcagctctgtccagtggagtgacccgttgccagagtgcagagaaatttattgtccagcaccaccacaaattgacaatggaataattcaaggggaacgtgaccattatggatatagacagtctgtaacgtatgcatgtaataaaggattcaccatgattggagagcactctatttattgtactgtgaataatgatgaaggagagtggagtggcccaccacctgaatgcagaggaaaatctctaacttccaaggtcccaccaacagttcagaaacctaccacagtaaatgttccaactacagaagtctcaccaacttctcagaaaaccaccacaaaaaccaccacaccaaatgctcaagcaacacggagtacacctgtttccaggacaaccaagcattttcatgaaacaaccccaaataaaggaagtggaaccacttcaggtactacccgtcttctatctgggcacacgtgtttcacgttgacaggtttgcttgggacgctagtaaccatgggcttgctgacttag

SEQ ID NO: 491 - DNA, 489 bp, Homo sapiens
atgcgtgcgcccattccagagcctaagcctggagacctgattgagatttttcgccctttctacagacactgggccatctatgttggcgatggatatgtggttcatctggcccctccaagtgaggtcgcaggagctggtgcagccagtgtcatgtccgccctgactgacaaggccatcgtgaagaaggaattgctgtatgatgtggccgggagtgacaagtaccaggtcaacaacaaacatgatgacaagtactcgccgctgccctgcagcaaaatcatccagcgggcggaggagctggtggggcaggaggtgctctacaagctgaccagtgagaactgcgagcactttgtgaatgagctgcgctatggagtcgcccgcagtgaccaggtcagagatgtcatcatcgctgcaagcgttgcaggaatgggcttggcagccatgagccttattggagtcatgttctcaagaaacaagcgacaaaagcaataa

SEQ ID NO: 492 - DNA, 465 bp, Homo sapiens
atgaccacaaccaccaccttcaagggagtcgaccccaacagcaggaatagctcccgagttttgcggcctccaggtggtggatccaatttttcattaggttttgatgaaccaacagaacaacctgtgaggaagaacaaaatggcctctaatatctttgggacacctgaagaaaatcaagcttcttgggccaagtcagcaggtgccaagtctagtggtggcagggaagacttggagtcatctggactgcagagaaggaactcctctgaagcaagctccggagacttcttagatctgaagggagaaggtgatattcatgaaaatgtggacacagacttgccaggcagcctggggcagagtgaagagaagcccgtgcctgctgcgcctgtgcccagcccggtggccccggccccagtgccatccagaagaaatccccctggcggcaagtccagcctcgtcttgggttag

SEQ ID NO: 493 - DNA, 276 bp, Homo sapiens
atgggactggaggacgagcaaaagatgcttaccgaatccggagatcctgaggaggaggaagaggaagaggaggaattagtggatcccctaacaacagtgagagagcaatgcgagcagttggagaaatgtgtaaaggcccgggagcggctagagctctgtgatgagcgtgtatcctctcgatcacatacagaagaggattgcacggaggagctctttgacttcttgcatgcgagggaccattgcgtggcccacaaactctttaacaacttgaaataa

SEQ ID NO: 494 - DNA, 252 bp, Homo sapiens
atgagctttttccaactcctgatgaaaaggaaggaactcattcccttggtggtgttcatgactgtggcggcgggtggagcctcatctttcgctgtgtattctctttggaaaaccgatgtgatccttgatcgaaaaaaaaatccagaaccttgggaaactgtggaccctactgtacctcaaaagcttataacaatcaaccaacaatggaaacccattgaagagttgcaaaatgtccaaagggtgaccaaatga

SEQ ID NO: 495 - DNA, 423 bp, Homo sapiens
atggcagcatctacaaccctgaagtgcttgatatcacagaggaaactctgcattctcgcttcctggagggtgtccgcaatgttgccagtgtctgtcttcagattggctacccaactgttgcatcagtaccccattctatcatcaacgggtacaaacgagtcctggccttgtctgtggagacggattacaccttcccacttgctgaaaaggtcaaggccttcttggctgatccatctgcctttgtggctgctgcccctgtggctgctgccaccacagctgctcctgctgctgctgcagccccagctaaggttgaagccaaggaagagtcggaggagtcggacgaggatatgggatttggtctctttgactaatcaccaaaaagcaaccaacttagccagttttatttgcaaaacaaggaaataa

SEQ ID NO: 496 - DNA, 813 bp, Homo sapiens
atggcctgccgcccgcgaagcccgccgaggcatcagagccgctgcgacggtgacgccagcccgccgtcccccgcgcgatggagcctgggacggaagcgcagagccgacggcaggcgctggaggcccgaagacgccgaggaggcagagcaccgcggcgccgagcgcagacccgagagctttaccactcctgaaggccctaaaccccgttccagatgctctgactgggcaagtgcagttgaagaagatgaaatgaggaccagagttaacaaagaaatggcaagatataaaaggaaactcctcatcaatgactttggaagagagagaaaatcatcatcaggaagttctgattcaaaggagtctatgtctactgtgccggctgactttgagacagatgaaagtgtcctaatgaggagacagaagcagatcaactatgggaagaacacaattgcctacgatcgttatattaaagaagtcccaagacaccttcgacaacctggcattcatcccaagacccctaataaatttaagaagtatagtcgacgttcatgggaccagcaaatcaaactctggaaggtggctctgcatttttgggatcctccagcggaagaaggatgtgatttgcaagaaatacaccctgtagaccttgaatctgcagaaagcagctccgagccccagaccagctctcaggatgactttgatgtgtactctggcacacccaccaaggtgagacacatggacagtcaagtggaggatgagtttgatttggaagcttgtttaactgaacccttgagagacttctcagccatgagctaa

SEQ ID NO: 497 - DNA, 1221 bp, Homo sapiens
atggcgcttgacggaccagagcagatggagctggaggaggggaaggcaggcagcggactccgccaatattatctgtccaagattgaagaactccagctgattgtgaatgataagagccaaaacctccggaggctgcaggcacagaggaacgaactaaatgctaaagttcgcctattgcgggaggagctacagctgctgcaggagcagggctcctatgtgggggaagtagtccgggccatggataagaagaaagtgttggtcaaggtacatcctgaaggtaaatttgttgtagacgtggacaaaaacattgacatcaatgatgtgacacccaattgccgggtggctctaaggaatgacagctacactctgcacaagatcctgcccaacaaggtagacccattagtgtcactgatgatggtggagaaagtaccagattcaacttatgagatgattggtggactggacaaacagatcaaggagatcaaagaagtgatcgagctgcctgttaagcatcctgagctcttcgaagcactgggcattgctcagcccaagggagtgctgctgtatggacctccaggcactgggaagacactgttggcccgggctgtggctcatcatacggactgtacctttattcgtgtctctggctctgaactggtacagaaattcataggggaaggggcaagaatggtgagggagctgtttgtcatggcacgggaacatgctccatctatcatcttcatggacgaaatcgactccatcggctcctcgcggctggaggggggttctggaggggacagtgaagtgcagcgcacgatgctggagttgctcaaccagctcgacggctttgaggccaccaagaacatcaaggttatcatggctactaataggattgatatcctggactcggcactgcttcgcccagggcgcattgacagaaaaattgaattcccaccccccaatgaggaggcccggctggacattttgaagattcattctcggaagatgaacctgacccgggggatcaacctgagaaaaattgctgagctcatgccaggagcatcaggggctgaagtgaagggcgtgtgcacagaagctggcatgtatgccctgcgagaacggcgagtccatgtcactcaggaggactttgagatggcagtagccaaggtcatgcagaaggacagtgagaaaaacatgtccatcaagaaattatggaagtga

SEQ ID NO: 498 - DNA, 871 bp, Homo sapiens
ccgcatctccccgcttagtcattggagagttcggacacgactggctgcacccccagccagggctgttcactgcacaaagggcctgtgggggccccaaagaaggctaggtgctctctggctgggaaggagggaatctgagaagacttcctggaggagactgcaatcccaggtgtattggagctgcagagaagaggttgaaaagtgctccaggcagggggcacggcttgggcaaaggtgtggctgggagaatgtcctgggcaagagcggaagtgcctctgagtgtctctcctgccccttctgtgcttctcttcttgcgatgccctctggctgcccatgggagctttccaaggtggcacagtgctttccactgaagacagggcacccagggccccaagaggggagcaacaacctcaaagtcacacagcagagctgaaaggctcaaggctccctcccgataggctgggcaggagcaaaaatgtcctaggtccttgtcagggactggggctccagcaggagtgtctgaagcagtgtgcatcagctggtcaggccagggtttcatggtccacctgggagcccagaccctggagtgagatctaggctcccaggaggcaggagaagtgccttccaaaagtgccctctaccccagcctattccttcagccagtacccaggtccccttggtcatggctctgcctcctccaacccagactacctggggtcgctgacgagcagcagcaccgagccgtcctgcaggcgcgcgtcgcgcaccgtctggtggtcgtccagccgccgcgcgttgtagtagaaggcgcgcttccaggagctcacgccctggcccaccagctgggcgcgcaggtcgctgagcgtgtccc

SEQ ID NO: 499 - DNA, 291 bp, Homo sapiens
atggcagaggtggaggagacactgaagcgactgcagagccagaagggagtgcagggaatcatcgtcgtgaacacagaaggcattcccatcaagagcaccatggacaaccccaccaccacccagtatgccagcctcatgcacagcttcatcctgaaggcacggagcaccgtgcgtgacatcgacccccagaacgatctcaccttccttcgaattcgctccaagaaaaatgaaattatggttgcaccagataaagactatttcctgattgtgattcagaatccaaccgaataa

SEQ ID NO: 500 - DNA, 1740 bp, Homo sapiens
atgtcggccagcagcctcttggagcagagaccaaaaggtcaaggaaacaaagtacaaaatggatctgtacatcaaaaggatggattaaacgatgatgattttgaaccttacttgagtccacaggcaaggcccaataatgcatatactgccatgtcagattcctacttacccagttactacagtccctccattggcttctcctattctttgggtgaagctgcttggtctacggggggtgacacagccatgccctacttaacttcttatggacagctgagcaacggagagccccacttcctaccagatgcaatgtttgggcaaccaggagccctaggtagcactccatttcttggtcagcatggttttaatttctttcccagtgggattgacttctcagcatggggaaataacagttctcagggacagtctactcagagctctggatatagtagcaattatgcttatgcacctagctccttaggtggagccatgattgatggacagtcagcttttgccaatgagaccctcaataaggctcctggcatgaatactatagaccaagggatggcagcactgaagttgggtagcacagaagttgcaagcaatgttccaaaagttgtaggttctgctgttggtagcgggtccattactagtaacatcgtggcttccaatagtttgcctccagccaccattgctcctccaaaaccagcatcttgggctgatattgctagcaagcctgcaaaacagcaacctaaactgaagaccaagaatggcattgcagggtcaagtcttccgccacccccgataaagcataacatggatattggaacttgggataacaagggtcccgttgcaaaagccccctcacaggctttggttcagaatataggtcagccaacccaggggtctcctcagcctgtaggtcagcaggctaacaatagcccaccagtggctcaggcatcagtagggcaacagacacagccattgcctccacctccaccacagcctgcccagctttcagtccagcaacaggcagctcagccaacccgctgggtagcacctcggaaccgtggcagtgggttcggtcataatggggtggatggtaatggagtaggacagtctcaggctggttctggatctactccttcagaaccccacccagtgttggagaagcttcggtccattaataactataaccccaaagattttgactggaatctgaaacatggccgggttttcatcattaagagctactctgaggacgatattcaccgttccattaagtataatatttggtgcagcacagagcatggtaacaagagactggatgctgcttatcgttccatgaacgggaaaggccccgtttacttacttttcagtgtcaacggcagtggacacttctgtggcgtggcagaaatgaaatctgctgtggactacaacacatgtgcaggtgtgtggtcccaggacaaatggaagggtcgttttgatgtcaggtggatttttgtgaaggacgttcccaatagccaactgcgacacattcgcctagagaacaacgagaataaaccagtgaccaactctagggacactcaggaagtgcctctggaaaaggctaagcaggtgttgaaaattatagccagctacaagcacaccacttccatttttgatgacttctcacactatgagaaacgccaagaggaagaagaaagtgttaaaaaggaacgtcaaggtcgtgggaaataa

SEQ ID NO: 501 - DNA, 1302 bp, Homo sapiens
atgccggattacctcggtgccgatcagcggaagaccaaagaggatgagaaggacgacaagcccatccgagctctggatgagggggatattgccttgttgaaaacttatggtcagagcacttactctaggcagatcaagcaagttgaagatgacattcagcaacttctcaagaaaattaatgagctcactggtattaaagaatctgacactggcctggccccaccagcactctgggatttggctgcagataagcagacactccagagtgaacagcctttacaggttgccaggtgtacaaagataatcaatgctgattcggaggacccaaaatacattatcaacgtaaagcagtttgccaagtttgtggtggaccttagtgatcaggtggcacctactgacattgaagaagggatgagagtgggcgtggatagaaataaatatcaaattcacattccattgcctcctaagattgacccaacagttaccatgatgcaggtggaagagaaacctgatgtcacatacagtgatgttggtggctgtaaggaacagattgagaaactgcgagaagtagttgaaaccccattacttcatccagagaggtttgtgaaccttggcattgagcctcccaagggcgtgctgctctttggtccacccggtacaggcaagacactctgtgcgcgggcagttgctaatcggactgatgcgtgcttcattcgagttattggatctgagcttgtacagaaatacgtcggtgagggggctcgaatggttcgtgaactctttgaaatggccagaacaaaaaaagcctgccttatcttctttgatgaaattgatgctattggaggggctcgttttgatgatggtgctggaggtgacaatgaagtgcagagaacaatgttggaactgatcaatcagcttgatggttttgatcctcgaggcaatattaaagtgctgatggccactaacagacctgatactttggatccagcactgatgaggccagggagattggatagaaaaattgaatttagcttgcccgatctagagggtcggacccacatatttaagattcacgctcgttcaatgagtgttgaaagagatatcagatttgaactgttagcacgactgtgtccaaatagcactggtgctgagattagaagcgtctgcacagaggctggtatgtttgccatcagagcacggcgaaaaattgctaccgagaaggatttcttggaagctgtaaataaggtcattaagtcttatgccaaattcagtgctactcctcgttacatgacatacaactga

SEQ ID NO: 502 - DNA, 969 bp, Homo sapiens
atggtgtcagtaattaacactgtggatacctcccatgaggacatgattcacgacgcccagatggactactatggcacccgcctggcaacctgctcatcagacaggtccgtcaaaatctttgatgtgcgcaatggagggcagatccttatcgccgacctcaggggtcatgagggtcctgtgtggcaagtggcctgggctcaccccatgtacggcaacatcctggcatcgtgctcctatgaccggaaagtcattatctggagagaggaaaacggcacctgggagaagagccacgagcatgcgggacacgactcctcagtgaactcggtgtgctgggccccccatgactacggcctgatcctggcctgtgggagctcggatggggccatctccctgctgacttacaccggggaaggccaatgggaagtaaagaagatcaacaacgctcacaccattggctgcaatgccgtcagctgggcccctgctgttgtacctggaagcctcatagaccacccatcggggcagaaacccaattacatcaagaggtttgcatcaggtggctgtgacaacctcatcaagctgtggaaggaggaggaggacggccagtggaaggaggagcagaagctagaagcgcacagtgactgggttcgagatgtggcctgggccccctccatcggcctgcccaccagcaccatcgccagctgctcccaggatggtcgtgtgttcatttggacctgtgatgatgcctcaagcaatacgtggtcccctaaattgttgcacaagttcaacgatgtggtgtggcatgtgagctggtccatcacagccaacatcctggctgtctctggtggagacaataaggtgaccctgtggaaggagtcagttgatgggcagtgggtgtgcatcagtgatgtcaacaagggccagggctccgtatcagcatcagtgacagagggccagcagaacgagcagtga

SEQ ID NO: 503 - DNA, 462 bp, Homo sapiens
atggcgtcctatttcgatgaacacgactgcgagccgtcggaccctgagcaggagacgcgaaccaacatgctgctggagctcgcaaggtcacttttcaataggatggactttgaagacttggggttggtagtagattgggaccaccacctgcctccaccagctgccaagactgtggttgagaacctccccaggacagtcatcagaggctctcaggctgagctcaagtgccccgtgtgtcttttggaatttgaggaggaggagactgccattgagatgccttgccatcaccttttccattccagctgcattctgccctggctaagcaagacaaattcctgtcccttgtgccgctatgagctgcccactgatgacgacacttatgaggagcacagacgagataaggctcgaaaacagcagcagcaacaccgactggagaacctccatggagccatgtacacgtga

SEQ ID NO: 504 - DNA, 492 bp, Homo sapiens
atgggcagcacctgggggagccctggctgggtgcggctcgctctttgcctgacgggcttagtgctctcgctctacgcgctgcacgtgaaggcggcgcgcgcccgggaccgggattaccgcgcgctctgcgacgtgggcaccgccatcagctgttcgcgcgtcttctcctccaggtggggcaggggtttcgggctggtggagcatgtgctgggacaggacagcatcctcaatcaatccaacagcatattcggttgcatcttctacacactacagctattgttaggttgcctgcggacacgctgggcctctgtcctgatgctgctgagctccctggtgtctctcgctggttctgtctacctggcctggatcctgttcttcgtgctctatgatttctgcattgtttgtatcaccacctatgctatcaacgtgagcctgatgtggctcagtttccggaaggtccaagaaccccagggcaaggctaagaggcactga

SEQ ID NO: 505 - DNA, 1218 bp, Homo sapiens
atggagaacgacccccaggaggcggagtctgaaatggccctggatgctgagttcctggacgtgtacaagaactgcaacggggtggtcatgatgttcgacattaccaagcagtggaccttcaattacattctccgggagcttccaaaagtgcccacccacgtgccagtgtgcgtgctgggaaactaccgggacatgggcgagcaccgagtcatcctgccggacgacgtgcgtgacttcatcgacaacctggacagacctccaggttcctcctacttccgctatgctgagtcttccatgaagaacagcttcggcctaaagtaccttcataagttcttcaatatcccatttttgcagcttcagagggagacgctgttgcggcagctggagacgaaccagctggacatggacgccacgctggaggagctgtcggtgcagcaggagacggaggaccagaactacggcatcttcctggagatgatggaggctcgcagccgtggccatgcgtccccactggcggccaacgggcagagcccatccccgggctcccagtcaccagtggtgcctgcaggcgctgtgtccacggggagctccagccccggcacaccccagcccgccccacagctgcccctcaatgccgccccaccatcctctgtgccccctgtaccaccctcagaggccctgcccccacctgcgtgcccctcagcccccgccccacggcgcagcatcatctctaggccgccaccctgggggtggcgactacgaggagctctaggccggcgtgggcagtggccgccctggggcggggggcgtgcctgtcactgcctggggaggcatttgcctctgtaccatcgcctttgccgctgccccgtggctgccgtgtgcgcttctgagctggaagaggccgggcattggtggtccccaggctgggccctgcaggtgctgggccttcaggcccagtgtgagcctgctctgcaagaagggaggggacagctggcttcagccaggctcggtggacaccctggccctctcggggcagagccgccagtgtttctcagggatgtgactgaggcccaggagggacctgtgagggtctgtttacagaggctgggcaggggccgcttggctgtggggtgtgcgctgccccggcacctgcttgccctccgcgctcatctggggccgcagcatgcctatggttccgcttccggccgggagccctga

SEQ ID NO: 506 - DNA, 1494 bp, Homo sapiens
atgtctcaagatggtgcttctcagttccaagaagtcattcggcaagagctagaattatctgtgaagaaggaactagaaaaaatactcaccacagcatcatcacatgaatttgagcacaccaaaaaagacctggatggatttcggaagctatttcatagatttttgcaagaaaaggggccttctgtggattggggaaaaatccagagaccccctgaagattcgattcaaccctatgaaaagataaaggccaggggcttgcctgataatatatcttccgtgttgaacaaactagtggtggtgaaactcaatggtggtttgggaaccagcatgggctgcaaaggccctaaaagtctgattggtgtgaggaatgagaatacctttctggatctgactgttcagcaaattgaacatttgaataaaacctacaatacagatgttcctcttgttttaatgaactcttttaacacggatgaagataccaaaaaaatactacagaagtacaatcattgtcgtgtgaaaatctacactttcaatcaaagcaggtacccgaggattaataaagaatctttacttcctgtagcaaaggacgtgtcttactcaggggaaaatacagaagcttggtaccctccaggtcatggtgatatttacgccagtttctacaactctggattgcttgatacctttataggagaaggcaaagagtatatttttgtgtctaacatagataatctgggtgccacagtggatctgtatattcttaatcatctaatgaacccacccaatggaaaacgctgtgaatttgtcatggaagtcacaaataaaacacgtgcagatgtaaagggcgggacactcactcaatatgaaggcaaactgagactggtggaaattgctcaagtgccaaaagcacatgtagacgagttcaagtctgtatcaaagttcaaaatatttaatacaaacaacctatggatttctcttgcagcagttaaaagactgcaggagcaaaatgccattgacatggaaatcattgtgaatgcaaagactttggatggaggcctgaatgtcattcaattagaaactgcagtaggggctgccatcaaaagttttgagaattctctaggtattaatgtgccaaggagccgttttctgcctgtcaaaaccacatcagatctcttgctggtgatgtcaaacctctatagtcttaatgcaggatctctgacaatgagtgaaaagcgggaatttcctacagtgcccttggttaaattaggcagttcttttacgaaggttcaagattatctaagaagatttgaaagtataccagatatgcttgaattggatcacctcacagtttcaggagatgtgacatttggaaaaaatgtttcattaaagggaacggttatcatcattgcaaatcatggtgacagaattgatatcccacctggagcagtattagagaacaagattgtgtctggaaaccttcgcatcttggaccactga

SEQ ID NO: 507 - DNA, 483 bp, Homo sapiens
atgcagcctgcttctgcaaagtggtacgatcgaagggactatgtcttcattgaattttgtgttgaagacagtaaggatgttaatgtaaattttgaaaaatccaaacttacattcagttgtctcggaggaagtgataattttaagcatttaaatgaaattgatctttttcactgtattgatccaaatgattccaagcataaaagaacggacagatcaattttatgttgtttacgaaaaggagaatctggccagtcatggccaaggttaacaaaagaaagggcaaagcttaattggcttagtgtcgacttcaataattggaaagactgggaagatgattcagatgaagacatgtctaattttgatcgtttctctgagatgatgaacaacatgggtggtgatgaggatgtagatttaccagaagtagatggagcagatgatgattcacaagacagtgatgatgaaaaaatgccagatctggagtaa

SEQ ID NO: 508 - DNA, 1260 bp, Homo sapiens
atgaataagcatcagaagccagtgctaacaggccagcggttcaaaactcggaaaagggatgaaaaagagaaattcgaacccacagtcttcagggatacacttgtccaggggcttaatgaggctggtgatgaccttgaagctgtagccaaatttctggactctacaggctcaagattagattatcgtcgctatgcagacacactcttcgatatcctggtggctggcagtatgcttgcccctggaggaacgcgcatagatgatggtgacaagaccaagatgaccaaccactgtgtgttttcagcaaatgaagatcatgaaaccatccgaaactatgctcaggtcttcaataaactcatcaggagatataagtatttggagaaggcatttgaagatgaaatgaaaaagcttctcctcttccttaaagccttttccgaaacagagcagacaaagttggcgatgctgtcggggattctgctgggcaatggcaccctgcccgccaccatcctcaccagtctcttcaccgacagcttagtcaaagaaggcattgcggcctcatttgctgtcaagcttttcaaagcatggatggcagaaaaagatgccaactctgttacctcgtctttgagaaaagccaacttagacaagaggctgcttgaactctttccagttaacagacagagtgtggatcattttgctaaatacttcactgacgcaggtcttaaggagctttccgacttcctccgagtccagcagtccctgggcaccaggaaggaactgcagaaggagctccaggagcgtctttctcaggaatgcccgatcaaggaggtggtgctttatgtcaaagaagaaatgaagaggaatgatcttccagaaacagcagtgattggtcttctgtggacatgtataatgaacgctgttgagtggaacaagaaggaagaacttgttgcagagcaggctctgaagcacctgaagcaatatgctcccctgctggccgtgttcagctcccaaggccagtcagagctgatcctcctccagaaggttcaggaatactgctacgacaacatccatttcatgaaagcctttcagaagattgtggttctcttttataaagctgatgttctgagcgaagaagcaatactgaaatggtataaggaagcacatgttgctaaaggcaaaagtgtttttcttgaccagatgaagaaatttgttgagtggttacaaaatgcagaagaagaatccgaatcggaaggtgaggaaaattaa

SEQ ID NO: 509 - DNA, 2536 bp, Homo sapiens
tgttgtggctgtggtgtgctgtcttgttgttgtgcttgtgtgcggctgtgcttttgtttcgtccgtgctctggtatctgttgccgtctcctgtctctgtttcttgattagttgcggcgcgtggtgttgtgtgactggcgggatggtgtcccggatgggctgggtgggcccgacgccgattggttgttctggcgttgatcctgttgggtggtgccgcggttgttgcccgccgcgagtgtggtgtttcctgtacggcggcgtgtgtcggttgtttgctcaccgcctgtgttgtgtgtagcggccgccgtctgctttttgtattaccctctttgggtgggggtcgtgttgcaatatggggtgtgggtttgtgtgggttcctcgcctgggggttgtcgtggtggccccccctctctcttgttgttttgttggtggtgtttctcgtgttgttgttggtttggtcttggttgtgtgtttttgtgcttgtcttgtgtcttgttgtgggtgtttttttttttttttttttttttttttttttttttttttttaaacaaccacattttgctttattaggcgttccatggtaatataacacagagttcttaaggaataataaacacgagacttgttttttaccataattattttgccatcaagacagtggttacaaaaaaaaaagtactcttctggctacacactttatcagctttagaactgaaagttcctccactcatgggtcacaatcacaatttccaggattaaaaaccatctattcttaaatcctacactgttttagagcatcaagtcactgcagttattcagttctgagacactgtcgatttattttagcatttacatatgacattcatttaacagacacacaaagcaagccaacaggtaaacatgcttacacagcctgcagaaatcgtcaggttttaacttgttttttaagaaaacaaccaaaacaaccaaaaattaccatgacccggtacaggaaaaacaggaagactcaagtgaatactagagctgcaagtgtttcttagaattgaaacaaaaattgtttttttccaacttgttcaaatttcctctaagtgcaggtgagaaaaaaagcaaatatattaagtcaaccaattatttttttaaaagtgcaatttacctttaaaataacaaataaacaacaaaaaaaaaaaacccaaaaccccaaccagatccccaaaggcaaaatgtgtagagagacaagggtggtgatggaatgacctactttgtgatgtttttacgctttacaaaaagcagatttggtattcagaaaagcctgcaaatacaacattgcttaagagaacctgtaaacacgtttggaatacaatgcaacacaagtcagcaaggacaggggtaggtccaaaggagccagctcagggggaaaggtgacagaaaaggagagggaaggatggagacagacatcacctgtggtctctaagggggccatgtgtttaatttataaggtttcctccccacaggagttctgatgtgatctatcgttcataaaacacatttctcctcttgcaaagtagaatagactttaagtttcccaatgactttttgagtttatagggcctctttctatgtagtgtgtctttagaaataattggacaagaaaaaaatacggtttttccccgaaaataaaaagctcccatgtgttctagaatctcaaaagatacttaaccaggaagcagcaggccctcgggtcagactcctattagcttagcacttctgaactggtgactttggttggttcacttgggttaatgaggctcggtgtttaggtttgaccgtgactttagccagagagcactgcacagaggaaaatctctccggttctgcagcctcatacctctaaagcttctgggccctgtctgcggttccacgtgtgatactgtgggtgagacggcatggcccattcctgcacttggccagggtcccacactctagcacacatcctcatgatggcaggtggttagcaccagtcctacatggaccaggatgacacagcactatgcttgcaatggcaaacgctcaaatcctttaggcggacccaacgaccaccatgaaatggtagacctgggaggtgaaaagataatggggcaagggaggaaaacaccgtctccgagacaagggctggaggaaacacagagagagagagagacagacacgaaaatattcatgaattaaaaagctagagagagaaagagagagtgagagcacgcagaaaaatggtaaaagagaagagaatcctcaaaggatttaatctgcagcaaaatctaggccaataacgcaagcctgcccctttatcaacagctgaccctgaagactacagaatggcgatgcgggtgggcattgtggagcctctcaggacagacacgatgagtttgccaaccacccggaatcagctgggtgatgacgtaattgcatcattaggatgtccagttcaaaccccttgtattaatatggaattaaatgttccaatttagtatttaaaaaaaaaa

SEQ ID NO: 510 - DNA, 354 bp, Homo sapiens
atggtccagcgtttgacataccgacgtaggctttcctacaatacagcctctaacaaaactaggctgtcccgaacccctggtaatagaattgtttacctttataccaagaaggttgggaaagcaccaaaatctgcatgtggtgtgtgcccaggcagacttcgaggggttcgtgctgtaagacctaaagttcttatgagattgtccaaaacaaagaaacatgtcagcagggcctatggtggttccatgtgtgctaaatgtgttcgtgacaggatcaagcgtgctttccttatcgaggagcagaaaatcgttgtgaaagtgttgaaggcacaagcacagagtcagaaagctaaataa

SEQ ID NO: 511 - DNA, 306 bp, Homo sapiens
atggggtttgttaaagttgttaagaataaggcctactttaagagataccaagtgaaatttagaagacgacgagagggtaaaactgattattatgctcggaaacgcttggtgatacaagataaaaataaatacaacacacccaaatacaggatgatagttcgtgtgacaaacagagatatcatttgtcagattgcttatgcccgtatagagggggatatgatagtctgcgcagcgtatgcacacgaactgccaaaatatggtgtgaaggttggcctgacaaattatgctgcagccaagtggaggtga

SEQ ID NO: 512 - DNA, 321 bp, Homo sapiens
atgcctttcttggacatccagaaaaggttcggccttaacatagatcgatggttgacaatccagagtggtgaacagccctacaagatggctggtcgatgccatgcttttgaaaaagaatggatagaatgtgcacatggaatcggttatactcgggcagagaaagagtgcaagatagaatatgatgatttcgtagagtgtttgcttcggcagaaaacgatgagacgtgcaggtaccatcaggaagcagcgggataagctgataaaggaaggaaagtacacccctccacctcaccacattggcaagggggagcctcggccctga

SEQ ID NO: 513 - DNA, 1254 bp, Homo sapiens
atggctggtcccttctcccgtctgctgtccgcccgcccgggactcaggctcctggctttggccggagcggggtctctagccgctgggtttctgctccgaccggaacctgtacgagctgccagtgaacgacggaggctgtatcccccgagcgctgagtacccagacctccgaaagcacaacaactgcatggccagtcacctgaccccagcagtctatgcacggctctgcgacaagaccacacccactggttggacgctagatcagtgtatccagactggcgtggacaaccctggccaccccttcatcaagactgtgggcatggtggctggagatgaggagacctatgaggtatttgctgacctgtttgaccctgtgatccaagagcgacacaatggatatgacccccggacaatgaagcacaccacggatctagatgccagtaaaatccgttctggctactttgatgagaggtatgtattgtcctctagagtcagaactggccgaagcatccgaggactcagtctgcctccagcttgcactcgagcagagcgacgagaggtggaacgtgttgtggtggatgcactgagtggcctgaagggtgacctggctggacgttactataggctcagtgagatgacagaggctgaacagcagcagcttattgatgaccactttctgtttgataagcctgtgtccccgttgctgactgcagcaggaatggctcgagactggccagatgctcgtggaatttggcacaacaatgagaagagcttcctgatctgggtgaatgaggaggatcatacacgggtgatctccatggagaagggtggtaacatgaagagagtgtttgaaagattctgccgaggcctcaaagaggtggagagacttatccaagaacgtggctgggagttcatgtggaatgagcgtttgggatacatcttgacctgtccatctaacctgggcactggacttcgggcaggagtgcacatcaaactgcccctgctaagcaaagatagccgcttcccaaagatcctggagaacctaagactccaaaagcgtggtactggaggagtggacactgctgccacaggcggtgtctttgatatttctaatttggaccgactaggcaaatcagaggtggagctggtgcaactggtcatcgatggagtaaactatttgattgattgtgaacggcgtctggagagaggccaggatatccgcatccccacacctgtcatccacaccaagcattaa

SEQ ID NO: 514 - DNA, 465 bp, Homo sapiens
atggcgcagtctattaacatcacggagctgaatctgccgcagctagaaatgctcaagaaccagctggaccaggaagtggagttcttgtccacgtccattgctcagctcaaagtggtacagaccaagtatgtggaagccaaggactgtctgaacgtgctgaacaagagcaacgaggggaaagaattactcgtcccactgacgagttctatgtatgtccctgggaagctgcatgatgtggaacacgtgctcatcgatgtgggaactgggtactatgtagagaagacagctgaggatgccaaggacttcttcaagaggaagatagattttctaaccaagcagatggagaaaatccaaccagctcttcaggagaagcacgccatgaaacaggccgtcatggaaatgatgagtcagaagattcagcagctcacagccctgggggcagctcaggctactgctaaggcctga

SEQ ID NO: 515 - DNA, 573 bp, Homo sapiens
atggctactcatcacacgctgtggatgggactggccctgctgggggtgctgggcgacctgcaggcagcaccggaggcccaggtctccgtgcagcccaacttccagcaggacaagttcctggggcgctggttcagcgcgggcctcgcctccaactcgagctggctccgggagaagaaggcggcgttgtccatgtgcaagtctgtggtggcccctgccacggatggtggcctcaacctgacctccaccttcctcaggaaaaaccagtgtgagacccgaaccatgctgctgcagcccgcggggtccctcggctcctacagctaccggagtccccactggggcagcacctactccgtgtcagtggtggagaccgactacgaccagtacgcgctgctgtacagccagggcagcaagggccctggcgaggacttccgcatggccaccctctacagccgaacccagacccccagggctgagttaaaggagaaattcaccgccttctgcaaggcccagggcttcacagaggataccattgtcttcctgccccaaaccgataagtgcatgacggaacaatag

SEQ ID NO: 516 - DNA, 777 bp, Homo sapiens
atggaagaaatgaagaagactgccatccggctgcccaaaggcaaacagaagcctataaagacggaatggaattcccggtgtgtccttttcacctacttccaaggggacatcagcagcgtagtggatgaacacttctccagagctctgagcaatatcaagagcccccaggaattgaccccctcgagtcagagtgaaggtgtgatgctgaaaaacgatgatagcatgtctccaaatcagtggcgttactcgtctccatggacaaagccacaaccagaagtacctgtcacaaaccgtgccgccaactgcaacttgcatgtgcctggtcccatggctgtgaatcagttctcaccgtccctggctaggagggcctctgttcggcctggggagctgtggcatttctcctccctggcgggcaccagctccttagagcctggctactctcatcccttccccgctcggcacctggttccagagccccagcctgatgggaaacgtgagcctctcctaagtctcctccagcaagacagatgcctagcccgtcctcaggaatctgccgccagggagaatggcaaccctggccagatagctggaagcacagggttgctcttcaacctgcctcccggctcagttcactataagaaactatatgtatctcgtggatctgccagtaccagccttccaaatgaaactctttcagagttagagacacctgggaaatactcacttacaccaccaaaccactggggccacccacatcgatacctgcagcatctttag

SEQ ID NO: 517 - DNA, 444 bp, Homo sapiens
atgtcatctgagcctcccccaccaccacagccccccacccatcaagcttcagtcgggctgctggacacccctcggagccgtgagcgctcaccatcccctctgcgcggcaacgtggtcccaagcccactgcccactcgccggacgaggaccttctcggcgacggtgcgggcttcacagggccccgtctacaaaggagtctgcaaatgcttctgccggtccaagggccatggcttcattaccccagctgatggcggccccgacatcttcctgcacatctctgatgtggaaggggagtatgtcccagtggaaggcgacgaggtcacctataaaatgtgctccatcccacccaagaatgagaagctgcaggccgtggaggtcgtcatcactcacctggcaccaggcaccaagcatgagacctggtctggacatgtcatcagctcctag

SEQ ID NO: 518 - DNA, 345 bp, Homo sapiens
atggcctctgtctccgagctcgcctgcatctactcggccctcattctgcacgacgatgaggtgacagtcacggaggataagatcaatgccctcattaaagcagccggtgtaaatgttgagcctttttggcctggcttgtttgcaaaggccctggccaacgtcaacattgggagcctcatctgcaatgtaggggccggtggacctgctccagcagctggtgctgcaccagcaggaggtcctgccccctccactgctgctgctccagctgaggagaagaaagtggaagcaaagaaagaagaatccgaggagtctgatgatgacatgggctttggtctttttgactaa

SEQ ID NO: 519 - DNA, 318 bp, Homo sapiens
atggtgaagcagatcgagagcaagactgcttttcaggaagccttggacgctgcaggtgataaacttgtagtagttgacttctcagccacgtggtgtgggccttgcaaaatgatcaagcctttctttcattccctctctgaaaagtattccaacgtgatattccttgaagtagatgtggatgactgtcaggatgttgcttcagagtgtgaagtcaaatgcatgccaacattccagttttttaagaagggacaaaaggtgggtgaattttctggagccaataaggaaaagcttgaagccaccattaatgaattagtctaa

SEQ ID NO: 520 - DNA, 2130 bp, Homo sapiens
  misc_feature (1)...(2130): n = a,t,c or g
gccgccacttccgagagcgcctgccgcccctgcgccgccgagccagctgccagaatgccgaactggggaggaggcaagaaatgtggggtgtgtcagaagacggtttactttgccgaagaggttcagtgcgaaggcaacagcttccataaatcctgcttcctgtgcatggtctgcaagaagaatctggacagtaccactgtggccgtgcatggtgaggagatttactgcaagtcctgctacggcaagaagtatgggcccaaaggctatggctacgggcagggcgcaggcaccctcagcactgacaagggggagtcgctgggtatcaagcacgaggaagcccctggccacaggcccaccaccaaccccaatgcatccaaatttgcccagaagattggtggctccgagcgctgcccccgatgcagccaggcagtctatgctgcggagaaggtgattggtgctgggaagtcctggcataaggcctgctttcgatgtgccaagtgtggcaaaggccttgagtcaaccaccctggcagacaaggatggcgagatttactgcaaaggatgttatgctaaaaacttcgggcccaagggctttggttttgggcaaggagctggggccttggtccactctgagtgaggccaccatcacccaccacaccctgcccactcctgcgcttttcatcgccattccattcccagcagctttggagacctccaggattatttctctgtcagccctgccacatatcactaatgacttgaacttgggcatctggctccctttggtttgggggtctgcctgaggtcccaccccactaaagggctccccaggcctgggatctgacaccatcaccagtaggagacctcagtgttttgggtctaggtgagagcaggcccctctccccacacctcgccccacagagctctgttcttagcctcctgtgctgcgtgtccatcatcagctgaccaagacacctgaggacacatcttggcacccagaggagcagcagcaacaggctggagggagagggaagcaagaccaagatgaggaggggggaaggctgggttttttggatctcagagattctcctctgtgggaaagaggttgagcttcctggtgtccctcagagtaagcctgaggagtcccagcttagggagtcactattggaggcagagaggcatgcaggcggggtcctaggagcccctgcttctccaggcctcttgcctttgagtctttgtggaatggatagcctcccactaggactgggaggagaataacccaggtcttaaggaccccaaagtcaggatgttgtttgatcttctcaaacatctagttccctgcttgatgggaggatcctaatgaaatacctgaaacatatattggcatttatcaatggctcaaatcttcatttatctctggccttaaccctggctcctgaggctgcggccagcagagcccaggccagggctctgttcttgccacacctgcttgatcctcagatgtggagggaggtaggcactgcctcagtcttcatccaaacacctttccctttgccctgagacctcagaatcttccctttaacccaagaccctgcctcttccactccacccttctccagggacccttagatcacatcactccacccctgccaggccccaggttaggaatagtggtgggaggaaggggaaagggctgggcctcaccgctcccagcaactgaaaggacaacactatctggagccacccactgaaagggctgcaggcatgggctgtacccaagctgatttctcatctggtcaataaagctgtttagaccagaaaaaaaccacacagcaccaccacacaaacaaaaaccggagggggggccggtaaccaattgggctataggaggcggattacatacatggcgccgttaaaagccggacgggaaaccggggtacccattatcgtggaggatcccctagcacggcgaaacgaaggcgcaaagctcccagaggccccaaggaggaaggacggattggacacgcacaggcctataccacgacggccgcacgcgggtgccccagcaatgccgagactggggaccatggcgaccacgccgnngncagcgacgcaggaccacaggaccgcc

SEQ ID NO: 521 - DNA, 1560 bp, Homo sapiens
atggcggccgagagggaacctcctccgctgggggacgggaagcccaccgactttgaggatctggaggacggagaggacctgttcaccagcactgtctccaccctagagtcaagtccatcatctccagaaccagctagtcttcctgcagaagatattagtgcaaactccaatggcccaaaacccacagaagttgtattagatgatgacagagaagatctttttgcagaagccacagaagaagtttctttggacagccctgaaagggaacctatcctatcctcggaaccttctcctgcagtcacacctgtcactcctactacactcattgctcctagaattgaatcaaagagtatgtctgctcccgtgatctttgatagatccagggaagagattgaagaagaagcaaatggagacatttttgacatagaaattggtgtatcagatccagaaaaagttggtgatggcatgaatgcctatatggcatatagagtaacaacaaagacatctctttccatgttcagtaagagtgaattttcagtgaaaagaagattcagcgactttcttggtttgcacagcaaattagcaagcaaatatttacatgttggttatattgtgccaccagctccagaaaagagtatagtagggatgaccaaggtcaaagtgggtaaagaagactcatcatccactgagtttgtagaaaaacggagagcagctcttgaaaggtatcttcaaagaacagtaaaacatccaactttactacaggatcctgatttaaggcagttcttggaaagttcagagctgcctagagcagttaatacacaggctctgagtggagcaggaatattgaggatggtgaacaaggctgccgacgctgtcaacaaaatgacaatcaagatgaatgaatcggatgcatggtttgaagaaaagcagcagcaatttgagaatctggatcagcaacttaggaaacttcatgtcagtgttgaagccttggtctgtcatagaaaagaactttcagccaacacagctgcctttgctaaaagtgctgccatgttaggtaattctgaggatcatactgctttatctagagctttgtctcagcttgcagaggttgaggagaagatagaccagttacatcaagaacaagcttttgctgacttttatatgttttcagaactacttagtgactacattcgtcttattgctgcagtgaaaggtgtgtttgaccatcgaatgaagtgctggcagaaatgggaagatgctcaaattactttgctcaaaaaacgtgaagctgaagcaaaaatgatggttgctaacaaaccagataaaatacagcaagctaaaaatgaaataagagagtgggaggcgaaagtgcaacaaggggaaagagattttgaacagatatctaaaacgattcgaaaagaagtgggaagatttgagaaagaacgagtgaaggattttaaaaccgttatcatcaagtacttagaatcactagttcaaacacaacaacagctgataaaatactgggaagcattcctacctgaagccaaagccattgcctag

SEQ ID NO: 522 - DNA, 882 bp, Homo sapiens
atggccagcaacgttaccaacaagacagatcctcgctccatgaactcccgtgtattcattgggaatctcaacactcttgtggtcaagaaatctgatgtggaggcaatcttttcgaagtatggcaaaattgtgggctgctctgttcataagggctttgccttcgttcagtatgttaatgagagaaatgcccgggctgctgtagcaggagaggatggcagaatgattgctggccaggttttagatattaacctggctgcagagccaaaagtgaaccgaggaaaagcaggtgtgaaacgatctgcagcggagatgtacggctcctcttttgacttggactatgactttcaacgggactattatgataggatgtacagttacccagcacgtgtacctcctcctcctcctattgctcgggctgtagtgccctcgaaacgtcagcgtgtatcaggaaacacttcacgaaggggcaaaagtggcttcaattctaagagtggacagcggggatcttccaagtctggaaagttgaaaggagatgaccttcaggccattaagaaggagctgacccagataaaacaaaaagtggattctctcctggaaaacctggaaaaaattgaaaaggaacagagcaaacaagcagtagagatgaagaatgataagtcagaagaggagcagagcagcagctccgtgaagaaagatgagactaatgtgaagatggagtctgaggggggtgcagatgactctgctgaggagggggacctactggatgatgatgataatgaagatcggggggatgaccagctggagttgatcaaggatgatgaaaaagaggctgaggaaggagaggatgacagagacagcgccaatggcgaggatgactcttaa

SEQ ID NO: 523 - DNA, 1251 bp, Homo sapiens
atgagcgaggcggacgggctgcgacagcgccggcccctgcggccgcaggtcgtcacagacgatgatggccaggccccggaggctaaggacggcagctcctttagcggcagagttttccgagtgaccttcttgatgctggctgtttctctcaccgttcccctgcttggagccatgatgctgctggaatctcctatagatccacagcctctcagcttcaaagaacccccgctcttgcttggtgttctgcatccaaatacgaagctgcgacaggcagaaaggctgtttgaaaatcaacttgttggaccggagtccatagcacatattggggatgtgatgtttactgggacagcagatggccgggtcgtaaaacttgaaaatggtgaaatagagaccattgcccggtttggttcgggcccttgcaaaacccgagatgatgagcctgtgtgtgggagacccctgggtatccgtgcagggcccaatgggactctctttgtggccgatgcatacaagggactatttgaagtaaatccctggaaacgtgaagtgaaactgctgctgtcctccgagacacccattgaggggaagaacatgtcctttgtgaatgatcttacagtcactcaggatgggaggaagatttatttcaccgattctagcagcaaatggcaaagacgagactacctgcttctggtgatggagggcacagatgacgggcgcctgctggagtatgatactgtgaccagggaagtaaaagttttattggaccagctgcggttcccgaatggagtccagctgtctcctgcagaagactttgtcctggtggcagaaacaaccatggccaggatacgaagagtctacgtttctggcctgatgaagggcggggctgatctgtttgtggagaacatgcctggatttccagacaacatccggcccagcagctctggggggtactgggtgggcatgtcgaccatccgccctaaccctgggttttccatgctggatttcttatctgagagaccctggattaaaaggatgatttttaagctctttagtcaagagacggtgatgaagtttgtgccgcggtacagcctcgtcctagaactcagcgacagcggtgccttccggagaagcctgcatgatcccgatgggctggtggccacctacatcagcgaggtgcacgaacacgatgggcacctgtacctgggctctttcaggtcccccttcctctgcagactcagcctccaggctgtttag

SEQ ID NO: 524 - DNA, 1866 bp, Homo sapiens
atggccttgccaacggctcgacccctgttggggtcctgtgggacccccgccctcggcagcctcctgttcctgctcttcagcctcggatgggtgcagccctcgaggaccctggctggagagacagggcaggctgcacccctggacggagtcctggccaacccacctaacatttccagcctctcccctcgccaactccttggcttcccgtgtgcggaggtgtccggcctgagcacggagcgtgtccgggagctggctgtggccttggcacagaagaatgtcaagctctcaacagagcagctgcgctgtctggctcaccggctctctgagccccccgaggacctggacgccctcccattggacctgctgctattcctcaacccagatgcgttctcggggccccaggcctgcacccgtttcttctcccgcatcacgaaggccaatgtggacctgctcccgaggggggctcccgagcgacagcggctgctgcctgcggctctggcctgctggggtgtgcgggggtctctgctgagcgaggctgatgtgcgggctctgggaggcctggcttgcgacctgcctgggcgctttgtggccgagtcggccgaagtgctgctaccccggctggtgagctgcccgggacccctggaccaggaccagcaggaggcagccagggcggctctgcagggcgggggacccccctacggccccccgtcgacatggtctgtctccacgatggacgctctgcggggcctgctgcccgtgctgggccagcccatcatccgcagcatcccgcagggcatcgtggccgcgtggcggcaacgctcctctcgggacccatcctggcggcagcctgaacggaccatcctccggccgcggttccggcgggaagtggagaagacagcctgtccttcaggcaagaaggcccgcgagatagacgagagcctcatcttctacaagaagtgggagctggaagcctgcgtggatgcggccctgctggccacccagatggaccgcgtgaacgccatccccttcacctacgagcagctggacgtcctaaagcataaactggatgagctctacccacaaggttaccccgagtctgtgatccagcacctgggctacctcttcctcaagatgagccctgaggacattcgcaagtggaatgtgacgtccctggagaccctgaaggctttgcttgaagtcaacaaagggcacgaaatgagtcctcaggtggccaccctgatcgaccgctttgtgaagggaaggggccagctagacaaagacaccctagacaccctgaccgccttctaccctgggtacctgtgctccctcagccccgaggagctgagctccgtgccccccagcagcatctgggcggtcaggccccaggacctggacacgtgtgacccaaggcagctggacgtcctctatcccaaggcccgccttgctttccagaacatgaacgggtccgaatacttcgtgaagatccagtccttcctgggtggggcccccacggaggatttgaaggcgctcagtcagcagaatgtgagcatggacttggccacgttcatgaagctgcggacggatgcggtgctgccgttgactgtggctgaggtgcagaaacttctgggaccccacgtggagggcctgaaggcggaggagcggcaccgcccggtgcgggactggatcctacggcagcggcaggacgacctggacacgctggggctggggctacagggcggcatccccaacggctacctggtcctagacctcagcgtgcaagaggccctctcggggacgccctgcctcctaggacctggacctgttctcaccgtcctggcactgctcctagcctccaccctggcctga

SEQ ID NO: 525 - DNA, 3072 bp, Homo sapiens
atggggaagggggttggacgtgataagtatgagcctgcagctgtttcagaacaaggtgataaaaagggcaaaaagggcaaaaaagacagggacatggatgaactgaagaaagaagtttctatggatgatcataaacttagccttgatgaacttcatcgtaaatatggaacagacttgagccggggattaacatctgctcgtgcagctgagatcctggcgcgagatggtcccaacgccctcactccccctcccactactcctgaatggatcaagttttgtcggcagctctttggggggttctcaatgttactgtggattggagcgattctttgtttcttggcttatagcatccaagctgctacagaagaggaacctcaaaacgataatctgtacctgggtgtggtgctatcagccgttgtaatcataactggttgcttctcctactatcaagaagctaaaagttcaaagatcatggaatccttcaaaaacatggtccctcagcaagcccttgtgattcgaaatggtgagaaaatgagcataaatgcggaggaagttgtggttggggatctggtggaagtaaaaggaggagaccgaattcctgctgacctcagaatcatatctgcaaatggctgcaaggtggataactcctcgctcactggtgaatcagaaccccagactaggtctccagatttcacaaatgaaaaccccctggagacgaggaacattgccttcttttcaaccaattgtgttgaaggcaccgcacgtggtattgttgtctacactggggatcgcactgtgatgggaagaattgccacacttgcttctgggctggaaggaggccagacccccattgctgcagaaattgaacattttatccacatcatcacgggtgtggctgtgttcctgggtgtgtctttcttcatcctttctctcatccttgagtacacctggcttgaggctgtcatcttcctcatcggtatcatcgtagccaatgtgccggaaggtttgctggccactgtcacggtctgtctgacacttactgccaaacgcatggcaaggaaaaactgcttagtgaagaacttagaagctgtggagaccttggggtccacatccaccatctgctctgataaaactggaactctgactcagaaccggatgacagtggcccacatgtggtttgacaatcaaatccatgaagctgatacgacagagaatcagagtggtgtctcttttgacaagacttcagctacctggcttgctctgtccagaattgcaggtctttgtaacagggcagtgtttcaggctaaccaggaaaacctacctattcttaagcgggcagttgcaggagatgcctctgagtcagcactcttaaagtgcatagagctgtgctgtggttccgtgaaggagatgagagaaagatacgccaaaatcgtcgagatacccttcaactccaccaacaagtaccagttgtctattcataagaaccccaacacatcagagccccaacacctgttggtgatgaagggcgccccagaaaggatcctagaccgttgcagctctatcctcctccacggcaaggagcagcccctggatgaggagctgaaagacgcctttcagaacgcctatttggagctggggggcctcggagaacgagtcctaggtttctgccacctctttctgccagatgaacagtttcctgaagggttccagtttgacactgacgatgtgaatttccctatcgataatctgtgctttgttgggctcatctccatgattgaccctccacgggcggccgttcctgatgccgtgggcaaatgtcgaagtgctggaattaaggtcatcatggtcacaggagaccatccaatcacagctaaagctattgccaaaggtgtgggcatcatctcagaaggcaatgagaccgtggaagacattgctgcccgcctcaacatcccagtcagccaggtgaaccccagggatgccaaggcctgcgtagtacacggcagtgatctaaaggacatgacctccgagcagctggatgacattttgaagtaccacactgagatagtgtttgccaggacctcccctcagcagaagctcatcattgtggaaggctgccaaagacagggtgctatcgtggctgtgactggtgacggtgtgaatgactctccagctttgaagaaagcagacattggggttgctatggggattgctggctcagatgtgtccaagcaagctgctgacatgattcttctggatgacaactttgcctcaattgtgactggagtagaggaaggtcgtctgatctttgataacttgaagaaatccattgcttataccttaaccagtaacattcccgagatcaccccgttcctgatatttattattgcaaacattccactaccactggggactgtcaccatcctctgcattgacttgggcactgacatggttcctgccatctccctggcttatgagcaggctgagagtgacatcatgaagagacagcccagaaatcccaaaacagacaaacttgtgaatgagcggctgatcagcatggcctatgggcagattggaatgatccaggccctgggaggcttctttacttactttgtgattctggctgagaacggcttcctcccaattcacctgttgggcctccgagtggactgggatgaccgctggatcaacgatgtggaagacagctacgggcagcagtggacctatgagcagaggaaaatcgtggagttcacctgccacacagccttcttcgtcagtatcgtggtggtgcagtgggccgacttggtcatctgtaagaccaggaggaattcggtcttccagcaggggatgaagaacaagatcttgatatttggcctctttgaagagacagccctggctgctttcctttcctactgccctggaatgggtgttgctcttaggatgtatcccctcaaacctacctggtggttctgtgccttcccctactctcttctcatcttcgtatatgacgaagtcagaaaactcatcatcaggcgacgccctggcggctgggtggagaaggaaacctactattag

SEQ ID NO: 526 - DNA, 456 bp, Homo sapiens
atgccgcgtggaagccgaagccgcacctcccgcatggcccctccggccagccgggcccctcagatgagagctgcacccaggccagcaccagtcgctcagccaccagcagcggcacccccatctgcagttggctcttctgctgctgcgccccggcagccaggtctgatggcccagatggcaaccactgcagctggcgtggctgtgggctctgctgtggggcacacattgggtcacgccattactgggggcttcagtggaggaagtaatgctgagcctgcgaggcctgacatcacttaccaggagcctcagggaacccagccagcacagcagcagcagccttgcctctatgagatcaaacagtttctggagtgtgcccagaaccagggtgacatcaagctctgtgagggtttcaatgaggtgctgaaacagtgccgacttgcaaacggattggcctaa

SEQ ID NO: 527 - DNA, 1044 bp, Homo sapiens
atggctcagagcagagacggcggaaacccgttcgccgagcccagcgagcttgacaacccctttcaggacccagctgtgatccagcaccgacccagccggcagtatgccacgcttgacgtctacaacccttttgagacccgggagccaccaccagcctatgagcctccagcccctgccccattgcctccaccctcagctccctccttgcagccctcgagaaagctcagccccacagaacctaagaactatggctcatacagcactcaggcctcagctgcagcagccacagctgagctgctgaagaaacaggaggagctcaaccggaaggcagaggagttggaccgaagggagcgagagctgcagcatgctgccctggggggcacagctactcgacagaacaattggccccctctaccttctttttgtccagttcagccctgctttttccaggacatctccatggagatcccccaagaatttcagaagactgtatccaccatgtactacctctggatgtgcagcacgctggctcttctcctgaacttcctcgcctgcctggccagcttctgtgtggaaaccaacaatggcgcaggctttgggctttctatcctctgggtcctccttttcactccctgctcctttgtctgctggtaccgccccatgtataaggctttccggagtgacagttcattcaatttcttcgttttcttcttcattttcttcgtccaggatgtgctctttgtcctccaggccattggtatcccaggttggggattcagtggctggatctctgctctggtggtgccgaagggcaacacagcagtatccgtgctcatgctgctggtcgccctgctcttcactggcattgctgtgctaggaattgtcatgctgaaacggatccactccttataccgccgcacaggtgccagctttcagaaggcccagcaagaatttgctgctggtgtcttctccaaccctgcggtgcgaaccgcagctgccaatgcagccgctggggctgctgaaaatgccttccgggccccgtga

SEQ ID NO: 528 - DNA, 510 bp, Homo sapiens
atgttggctaccagggtatttagcctagttggcaagcgagcaatttccacctctgtgtgtgtacgagctcatgaaagtgttgtgaagagcgaagacttttcgctcccagcttatatggatcggcgtgaccaccccttgccggaggtggcccatgtcaagcacctgtctgccagccagaaggcactgaaggagaaggagaaggcctcctggagcagcctctccatggatgagaaagtcgagttgtatcgcattaagttcaaggagagctttgctgagatgaacaggggctcgaacgagtggaagacggttgtgggcggtgccatgttcttcatcggtttcaccgcgctcgttatcatgtggcagaagcactatgtgtacggccccctcccgcaaagctttgacaaagagtgggtggccaagcagaccaagaggatgctggacatgaaggtgaaccccatccagggcttagcctccaagtgggactacgaaaagaacgagtggaagaagtga

SEQ ID NO: 529 - DNA, 990 bp, Homo sapiens
atgaccacccagcagatagacctccagggcccggggccgtggggcttccgcctcgtgggcggcaaggacttcgagcagcctctcgccatttcccgggtcactcctggaagcaaggcggctctagctaatttatgtattggagatgtaatcacagccattgatggggaaaatactagcaatatgacacacttggaagctcagaacagaatcaaaggctgcacagacaacttgactctcactgtagccagatctgaacataaagtctggtctcctctggtgacggaggaagggaagcgtcatccatacaagatgaatttagcctctgaaccccaggaggtcctgcacataggaagcgcccacaaccgaagtgccatgccctttaccgcctcgcctgcctccagcactactgccagggtcatcacaaaccagtacaacaacccagctggcctctactcttctgaaaatatctccaacttcaacaatgccctggagtcaaagactgctgccagcggggtggaggcgaacagcagacccttagaccatgctcagcctccaagcagccttgtcatcgacaaagaatctgaagtttacaagatgcttcaggagaaacaggagttgaatgagcccccgaaacagtccacgtctttcttggttttgcaggaaatcctggagtctgaagaaaaaggggatcccaacaagccctcaggattcagaagtgttaaagctcctgtcactaaagtggctgcgtcgattggaaatgctcagaagttgcctatgtgtgacaaatgtggcactgggattgttggtgtgtttgtgaagctgcgggaccgtcaccgccaccctgagtgttatgtgtgcactgactgtggcaccaacctgaaacagaagggccatttctttgtggaggatcaaatctactgtgagaagcatgcccgggagcgagtcacaccacctgagggttatgaagtggtcactgtgttccccaagtga

SEQ ID NO: 530 - DNA, 786 bp, Homo sapiens
atggccggggacagcgagcagaccctgcagaaccaccagcagcccaacggcggcgagcccttccttataggcgtcagcgggggaacagctagcggcaagtcttccgtgtgtgctaagatcgtgcagctcctggggcagaatgaggtggactatcgccagaagcaggtggtcatcctgagccaggatagcttctaccgtgtccttacctcggagcagaaggccaaagccctgaagggccagttcaactttgaccacccggatgcctttgacaatgaactcattctcaaaacactcaaagaaatcactgaagggaaaacagtccagatccccgtgtatgactttgtctcccattcccggaaggaggagacagttactgtctatcccgcagacgtggtgctctttgaagggatcctggccttctactcccaggaggtacgagacctgttccagatgaagctttttgtggatacagatgcggacacccggctctcacgcagagtattaagggacatcagcgagagaggcagggatcttgagcagattttatctcagtacattacgttcgtcaagcctgcctttgaggaattctgcttgccaacaaagaagtatgctgatgtgatcatccctagaggtgcagataatctggtggccatcaacctcatcgtgcagcacatccaggacatcctgaatggagggccctccaaacggcagaccaatggctgtctcaacggctacaccccttcacgcaagaggcaggcatcggagtccagcagcaggccgcattga

SEQ ID NO: 531 - DNA, 2005 bp, Homo sapiens
ggcacgagggattcaggcgtgtaaaccagccggagcggcgcggcagcggcaggaccgccgtggcgcctagagtagcgacccggggggagcgcggggcgacgctggctgcagggacccggtgacagcgtgagaggttcgcagagtactaggttttgacaagcttgcatcatgcgtgagtataagctagtcgttcttggctcaggaggcgttggaaagtctgctttgactgtacaatttgttcaaggaatttttgtagaaaaatacgatcctacgatagaagattcttatagaaagcaagttgaagtagatgcacaacagtgtatgcttgaaatcttggatactgcaggaacggagcaatttacagcaatgagggatttatacatgaaaaatggacaaggatttgcattagtttattccatcacagcacagtccacatttaacgatttacaagacctgagagaacagattcttcgagttaaagacactgatgatgttccaatgattcttgttggtaataagtgtgacttggaagatgaaagagttgtagggaaggaacaaggtcaaaatctagcaagacaatggaacaactgtgcattcttagaatcttctgcaaaatcaaaaataaatgttaatgagatcttttatgacctagtgcggcaaattaacagaaaaactccagtgcctgggaaggctcgcaaaaagtcatcatgtcagctgctttaatatactaaatgcattgtagctctgagccaggtctgaagaactgttgcccaattcaacagtgccagcattccaactttgttaaacctaccaacatcttaaatggactttcctgtggtggtaccctttaagaggcggatgaaagctactatatcagtttgcacattctaatcactttccagtatcacaagagagatttttacttatataatagtcctagagtttgcagctggtaaaaccagaggctacatccagtattactgctaagagacattcttcatccaccaatgttgtacatgtatgaaaatggtgtactgtatactttaacatgccccatactttgtattggagagtacaataatgtaaatcctaaaagcaccactattttagcataataaaagaaagtccaaagagctcctatatagactactccagataacttcgcttctttgatacttgtagcttattgtaattttttttaagaaattcaaggtcattattattgtacaaaataagcgctttgattaacacagctatatagtttttttaatttttaaaaaacctgtggagacggtgatcttgtctttaaaacatgatagtcctttcagtataatgtcttagattaaagacgttgcctttaatatctgttgggaaggaaatgtccagacttttcaaatctcttattatatgtttcctttttttgtttacatagggaacaatgtttatagtcgtgtgtacagtgggggtctacaacaagaagtgtatattttcaaacaattttttaatgatttaacaatttttgtaaatcattttcaggcttctgcagctgtagattctcactgtgaatcccttgcttgctcatgcataagtgtatttgcaataccaaatatacaggtttagtatttttgcctgttagtgattgtttcacatgtgtaacgttttggttgagatgttaaatggtggacgagtactgtggatgtgaatgtgggaaagtaattttaatcatatgtaattggtcacaaggcctaatttgcagtaactattgctgttttatttaacaatgccttgttgctttgtatgcattaatgtttggatgtaaagattgtgtgtctatccaacagggagccacagtatttaaattgaccaacctaatgttacaactactttgaggtggccaaatgtaaactaaaagccttaattaaagtggtgcaattttgtataacttagcatcagtagttcaataaatttggattgccatgcaagggcttgcattataaaaaaaaaa

SEQ ID NO: 532 - DNA, 3075 bp, Homo sapiens
gtaggaatcgcagcgccaacggttgcaaggcccaagaagccatcctgggaaggaaaatgcattggggaaccctgtgcggattcttgtggctttggccctatcttttctatgtccaagctgtgcccatccaaaaagtccaagatgacaccaaaaccctcatcaagacaattgtcaccaggatcaatgacatttcacacacgcagtcagtctcctccaaacagaaagtcaccggtttggacttcattcctgggctccaccccatcctgaccttatccaagatggaccagacactggcagtctaccaacagatcctcaccagtatgccttccagaaacgtgatccaaatatccaacgacctggagaacctccgggatcttcttcacgtgctggccttctctaagagctgccacttgccctgggccagtggcctggagaccttggacagcctggggggtgtcctggaagcttcaggctactccacagaggtggtggccctgagcaggctgcaggggtctctgcaggacatgctgtggcagctggacctcagccctgggtgctgaggccttgaaggtcactcttcctgcaaggactacgttaagggaaggaactctggcttccaggtatctccaggattgaagagcattgcatggacaccccttatccaggactctgtcaatttccctgactcctctaagccactcttccaaaggcataagaccctaagcctccttttgcttgaaaccaaagatatatacacaggatcctattctcaccaggaagggggtccacccagcaaagagtgggctgcatctgggattcccaccaaggtcttcagccatcaacaagagttgtcttgtcccctcttgacccatctccccctcactgaatgcctcaatgtgaccaggggtgatttcagagagggcagaggggtaggcagagcctttggatgaccagaacaaggttccctctgagaattccaaggagttccatgaagaccacatccacacacgcaggaactcccagcaacacaagctggaagcacatgtttatttattctgcattttattctggatggatttgaagcaaagcaccagcttctccaggctctttggggtcagccagggccaggggtctccctggagtgcagtttccaatcccatagatgggtctggctgagctgaacccattttgagtgactcgagggttgggttcatctgagcaagagctggcaaaggtggctctccagttagttctctcgtaactggtttcatttctactgtgactgatgttacatcacagtgtttgcaatggtgttgccctgagtggatctccaaggaccaggttattttaaaaagatttgttttgtcaagtgtcatatgtaggtgtctgcacccaggggtggggaatgtttgggcagaagggagaaggatctagaatgtgttttctgaataacatttgtgtggtgggttctttggaaggagtgagatcattttcttatcttctgcaattgcttaggatgtttttcatgaaaatagctctttcaggggggttgtgaggcctggccaggcaccccctggagagaagtttctggccctggctgaccccaaagagcctggagaagctgatgctttgcttcaaatccatccagaataaaacgcaaagggctgaaagccatttgttggggcagtggtaagctctggctttctccgactgctagggagtggtctttcctatcatggagtgacggtcccacactggtgactgcgatcttcagagcaggggtccttggtgtgaccctctgaatgggtccagggttgatcacactctgggtttattacatggcagtgttcctatttggggcttgcatgccaaattgtagttcttgtctgattggctcacccaagcaaggccaaaattaccaaaaatcttggggggtttttactccagtggtgaagaaaactcctttagcaggtggtcctgagacctgacaagcactgctaggcgagtgccaggactccccaggccaggccaccaggatgcccttcccactggaggtcacattcaggaagatgaaagaggaggtttggggtctgccaccatcctgctgctgtgtttttgctatcacacagtgggtggtggatctgtccaaggaaacttgaatcaaagcagttaactttaagactgagcacctgcttcatgctcagccctgactggtgctataggctggagaagctcacccaataaacattaagattgaggcctgccctcagggatcttgcgttcccagtggtcaaaccgcactcacccatgtgccaaggtggggtatttaccacagcagctgaacagccaaatgcatggtgcagttgacagcaggtgggaaatggtatgagctgaggggggccgtgcccaggggcccacagggaaccctgcttgcactttgtaacatgtttacttttcagggcatcttagcttctattatagccacatccctttgaaacaagataactgagaatttaaaaataagaaaatacataagaccataacagccaacaggtggcaggaccaggactatagcccaggtcctctgatacccagagcattacgtgagccaggtaatgagggactggaaccagggagaccgagcgctttctggaaaagaggagtttcgaggtagagtttgaaggaggtgagggatgtgaattgcctgcagagagaagcctgttttgttggaaggtttggtgtgtggagatgcagaggtaaaagtgtgagcagtgagttacagcgagaggcagagaaagaagagacaggagggcaagggccatgctgaagggaccttgaagggtaaagaagtttgatattaaaggagttaagagtagcaagttctagagaagaggctggtgctgtggccagggtgagagctgctctggaaaatgtgacccagatcctcacaaccacctaatcaggctgaggtgtcttaagccttttgctcacaaaacctggcacaatggctaattcccagagtgtgaaacttcctaagtataaatggttgtctgtttttgtaacttaaaaaaaaaa

SEQ ID NO: 533 - DNA, 378 bp, Homo sapiens
atgccgcctaaggacgacaagaagaagaaggacgctggaaagtcggccaagaaagacaaagacccagtgaacaaatccgggggcaaggccaaaaagaagaagtggtccaaaggcaaagttcgggacaagctcaataacttagtcttgtttgacaaagctacctatgataaactctgtaaggaagttcccaactataaacttataaccccagctgtggtctctgagagactgaagattcgaggctccctggccagggcagcccttcaggagctccttagtaaaggacttatcaaactggtttcaaagcacagagctcaagtaatttacaccagaaataccaagggtggagatgctccagctgctggtgaagatgcatga

SEQ ID NO: 534 - DNA, 1236 bp, Homo sapiens
atggcgaccacggccacgatggcgacctcgggctcggcgcgaaagcggctgctcaaagaggaagacatgactaaagtggaattcgagaccagcgaggaggtggatgtgacccccacgttcgacaccatgggcctgcgggaggacctgctgcggggcatctacgcttacggttttgaaaaaccatcagcaatccagcaacgagcaatcaagcagatcatcaaagggagagatgtcatcgcacagtctcagtccggcacaggaaaaacagccaccttcagtatctcagtcctccagtgtttggatattcaggttcgtgaaactcaagctttgatcttggctcccacaagagagttggctgtgcagatccagaaggggctgcttgctctcggtgactacatgaatgtccagtgccatgcctgcattggaggcaccaatgttggcgaggacatcaggaagctggattacggacagcatgttgtcgcgggcactccagggcgtgtttttgatatgattcgtcgcagaagcctaaggacacgtgctatcaaaatgttggttttggatgaagctgatgaaatgttgaataaaggtttcaaagagcagatttacgatgtatacaggtacctgcctccagccacacaggtggttctcatcagtgccacgctgccacacgagattctggagatgaccaacaagttcatgaccgacccaatccgcatcttggtgaaacgtgatgaattgactctggaaggcatcaagcaatttttcgtggcagtggagagggaagagtggaaatttgacactctgtgtgacctctacgacacactgaccatcactcaggcggtcatcttctgcaacaccaaaagaaaggtggactggctgacggagaaaatgagggaagccaacttcactgtatcctcaatgcatggagacatgccccagaaagagcgggagtccatcatgaaggagttccggtcgggcgccagccgagtgcttatttctacagatgtctgggccagggggttggatgtccctcaggtgtccctcatcattaactatgatctccctaataacagagaattgtacatacacagaattgggagatcaggtcgatacggccggaagggtgtggccattaactttgtaaagaatgacgacatccgcatcctcagagatatcgagcagtactattccactcagattgatgagatgccgatgaacgttgctgatcttatctga

SEQ ID NO: 535 - DNA, 1050 bp, Homo sapiens
atgagtaaaagcaaagatgatgctcctcacgaactggagagccagtttatcttacgtctgcctccagaatatgcctctactgtgagaagggcagtacagtctggtcatgtcaacctcaaggacagactgacaattgagttacatcctgatgggcgtcatggaatcgtcagagtggaccgtgttccattggcctcaaaattagtagacctgccctgtgttatggaaagcttgaaaaccattgataaaaaaactttttacaagacagctgatatctgtcagatgcttgtatccacagttgatggtgatctctatcctcctgtggaggagccagttgctagcactgatcctaaagcaagcaagaaaaaggataaggacaaagagaaaaagtttatctggaaccacggaattactctgcctctaaagaatgtcaggaagagaaggttccggaagacagcaaagaagaaatatattgaatctccagatgttgaaaaagaagtgaaacgattgctgagtacagatgctgaagctgttagtactcggtgggaaataattgcggaagatgaaacaaaggaggcagaaaatcaaggcctggatatctcttctccaggaatgtctggtcacaggcagggccatgactcattagaacatgatgagcttcgggagatattcaatgacctcagcagcagcagtgaggatgaagatgagacccagcatcaagatgaagaagatataaacatcattgacacggaggaagatctggagagacagctacaggacaagctaaatgaatcagatgaacagcaccaggaaaatgaaggaaccaatcagctggttatgggaattcagaagcagattgacaacatgaaaggcaagctccaagagacccaggacagggcaaaacgacaagaggatctcatcatgaaagtggaaaatctggctctcaagaacagatttcaggctgtactggatgagctcaaacaaaaggaagaccgagaaaaggagcaactcagctctttgcaagaggagctagaatcactcctagagaagtaa

SEQ ID NO: 536 - DNA, 954 bp, Homo sapiens
atgttccaggcggccgagcgcccccaggagtgggccatggagggcccccgcgacgggctgaagaaggagcggctactggacgaccgccacgacagcggcctggactccatgaaagacgaggagtacgagcagatggtcaaggagctgcaggagatccgcctcgagccgcaggaggtgccgcgcggctcggagccctggaagcagcagctcaccgaggacggggactcgttcctgcacttggccatcatccatgaagaaaaggcactgaccatggaagtgatccgccaggtgaagggagacctggctttcctcaacttccagaacaacctgcagcagactccactccacttggctgtgatcaccaaccagccagaaattgctgaggcacttctgggagctggctgtgatcctgagctccgagactttcgaggaaatacccccctacaccttgcctgtgagcagggctgcctggccagcgtgggagtcctgactcagtcctgcaccaccccgcacctccactccatcctgaaggctaccaactacaatggccacacgtgtctacacttagcctctatccatggctacctgggcatcgtggagcttttggtgtccttgggtgctgatgtcaatgctcaggagccctgtaatggccggactgcccttcacctcgcagtggacctgcaaaatcctgacctggtgtcactcctgttgaagtgtggggctgatgtcaacagagttacctaccagggctattctccctaccagctcacctggggccgcccaagcacccggatacagcagcagctgggccagctgacactagaaaaccttcagatgctgccagagagtgaggatgaggagagctatgacacagagtcagagttcacggagttcacagaggacgagctgccctatgatgactgtgtgtttggaggccagcgtctgacgttatga

SEQ ID NO: 537 - DNA, 1224 bp, Homo sapiens
atgtactcaattaaaacggcactcaagtatactttgggatttgttgtgatttgtgcactgcttcttttagttggtgcctttgttccattgaatgttcccaataacaaaaattctacagagtgggaaaaagtgaagtccctatttgaagaacttggaagtagtcatggtttagctgcattgtcattttctatcagttctctgaccttgattggaatgttggcagctataacttacacagcctatggcatgtctgcgttacctttaaatctgataaaaggcactagaagcgctgcttatgaacgtttggaaaacactgaagacattgaagaagtagaacaacacattcaaacgattaaatcaaaaagcaaagatggtcgacctttgccagcaagggataaacgcgccttaaaacaatttgaagaaaggttacgaacacttaagaagagagagaggcatttagaattcattgaaaacagctggtggacaaaattttgtggcgctctgcgtcccctgaagatcgtctggggaatatttttcatcttagttgcattgctgtttgtaatttctctcttcttgtcaaatttagataaagctcttcattcagctggaatagattctggtttcataatttttggagctaacctgagtaatccactgaatatgcttttgcctttactacaaacagttttccctcttgattatattcttataacaattattattatgtactttatttttacttcaatggcaggaattcgaaatattggcatatggttcttttggattagattatataaaatcagaagaggtagaaccaggccccaagcactcctttttctctgcatgatacttctgcttattgtccttcacactagctacatgatttatagtcttgctccccaatatgttatgtatggaagccaaaattacttaatagagactaatataacttctgataatcataaaggcaattcaaccctttctgtgccaaagagatgtgatgcagatgctcctgaagatcagtgtactgttacccggacatacctattccttcacaagttctggttcttcagtgctgcttactattttggtaactgggcctttcttggggtatttttgattggattaattgtatcctgttgtaaagggaagaaatcggttattgaaggagtagatgaagattcagacataagtgatgatgagccctctgtctattctgcttga

SEQ ID NO: 538 - DNA, 2661 bp, Homo sapiens
atggggcagaagctgaagcagcggctgcgactggacgtgggacgcgagatctgccgccagtacccgctgttctgcttcctgctgctctgtctcagcgccgcctccctgcttcttaacaggtatattcatattttaatgatcttctggtcatttgttgctggagttgtcacattctactgctcactaggacctgattctctcttaccaaatatattcttcacaataaaatacaaacccaagcagttaggacttcaggaattatttcctcaaggtcatagctgtgctgtttgtggtaaagtgaaatgtaaacgacataggccttctttgctacttgaaaactaccagccatggctagacctgaaaatttcttccaaggttgatgcatctctctcagaggtggatattccatctattataaccaagaaactattaaaagcagcaatgaagcatatagaagtgatagttaaagccagacagaaagtaaaaaatacagagtttttacagcaagctgctttagaagaatatggtccagagcttcatgttgctttgagaagtcgaagagatgaattgcactatttaaggaaacttactgaactgctttttccttatattttgcctcctaaagcaacagactgcagatctctgaccttacttataagagagattctgtctggctctgtgttccttccttctttggatttcctagctgatccagatactgtgaatcatttgcttatcatcttcatagatgacagtccacctgaaaaagcaactgaaccggcttctcctttggttccattcttgcagaaatttgcagaacctagaaataaaaagccatctgtgctgaagttagaattgaagcaaatcagagagcaacaagatcttttatttcgttttatgaactttctgaaacaagaaggcgcagtgcacgtgttgcagttttgtttgactgtggaggaatttaatgatagaattttacgaccagaattatcaaatgatgaaatgctgtctcttcatgaagaattgcagaagatttataaaacatactgtttggatgaaagtattgacaaaattagatttgatcccttcattgtagaagagattcaaagaattgctgaaggcccatacatagatgttgtgaaacttcaaactatgagatgtctttttgaagcatatgaacatgttctttcccttttggagaatgtatttactcctatgttctgccatagtgatgagtatttcagacaacttttaagaggtgcagaatcaccaacacgcaattcaaaattgaacaggaacacacagaaaaggggagaatcatttggaatcagcagaataggtagcaaaattaaaggagtattcaaaagtaccacaatggagggagctatgttgcctaattatggtgtagctgaaggtgaagatgattttattgaagaaggtattgttgtaatggaagatgattctccagtggaggctgtgagcacacctaatactccccgaaaccttgctgcatggaaaattagcattccatatgtagacttttttgaggatccctcctctgaaaggaaggagaaaaaagaaagaattcctgtgttttgtattgatgttgaaagaaatgatagaagagcagttggacacgagcctgaacattggtctgtctatagaagatatcttgaattctatgtacttgaatcaaaactaacagaatttcatggtgcatttcctgatgcccagcttccttctaagaggatcattggccccaaaaattatgaattcttaaagtcaaagagggaagagttccaagaatatctacagaaacttctgcagcatccagaactgagtaatagtcaacttctggcagactttctttcccctaatggtggggaaacacaatttcttgataagatactaccagatgtaaatcttgggaaaattataaaatctgttcctggaaaactaatgaaagagaaaggtcagcatttggaaccttttatcatgaatttcattaattcttgtgagtctccaaagcctaaaccaagtagaccagaactgaccattctcagccctacttcagaaaacaacaagaagcttttcaatgatctgtttaaaaataatgcaaaccgtgctgaaaatacagagagaaagcaaaatcagaattattttatggaggtgatgactgtagaaggagtctatgattacctgatgtatgtaggacgggtagttttccaggttcctgactggcttcatcatctcttaatgggaactcgaatcctctttaaaaacaccctggaaatgtatactgattactatcttcagtgtaaactagaacagctatttcaggagcaccgtttggtctcactcataacacttctcagagatgctatattctgtgaaaacactgaacctcgctctctccaagataagcaaaaaggagcaaaacagacttttgaagaaatgatgaattacattccagatctgttagtcaagtgtattggtgaagaaaccaagtatgaaagcatcagacttctgtttgatggcttacagcaaccagtactcaacaagcagctgacttatgttttattggacattgtgatacaggaactgtttccagagctcaataaggtacaaaaggaagttacctctgtgacatcttggatgtaa

SEQ ID NO: 539 - DNA, 342 bp, Homo sapiens
atgtccgctatccagaacctccactctttcgacccctttgctgatgcaagtaagggtgatgacctgcttcctgctggcactgaggattatatccatataagaattcaacagagaaacggcaggaagacccttactactgtccaagggatcgctgatgattacgataaaaagaaactagtgaaggcgtttaagaaaaagtttgcctgcaatggtactgtaattgagcatccggaatatggagaagtaattcagctacagggtgaccaacgcaagaacatatgccagttcctcgtagagattggactggctaaggacgatcagctgaaggttcatgggttttaa

SEQ ID NO: 540 - DNA, 1314 bp, Homo sapiens
atggcatccgttgcagttgatccacaaccgagtgtggtgactcgggtggtcaacctgcccttggtgagctccacgtatgacctcatgtcctcagcctatctcagtacaaaggaccagtatccctacctgaagtctgtgtgtgagatggcagagaacggtgtgaagaccatcacctccgtggccatgaccagtgctctgcccatcatccagaagctagagccgcaaattgcagttgccaatacctatgcctgtaaggggctagacaggattgaggagagactgcctattctgaatcagccatcaactcagattgttgccaatgccaaaggcgctgtgactggggcaaaagatgctgtgacgactactgtgactggggccaaggattctgtggccagcacgatcacaggggtgatggacaagaccaaaggggcagtgactggcagtgtggagaagaccaagtctgtggtcagtggcagcattaacacagtcttggggagtcggatgatgcagctcgtgagcagtggcgtagaaaatgcactcaccaaatcagagctgttggtagaacagtacctccctctcactgaggaagaactagaaaaagaagcaaaaaaagttgaaggatttgatctggttcagaagccaagttattatgttagactgggatccctgtctaccaagcttcactcccgtgcctaccagcaggctctcagcagggttaaagaagctaagcaaaaaagccaacagaccatttctcagctccattctactgttcacctgattgaatttgccaggaagaatgtgtatagtgccaatcagaaaattcaggatgctcaggataagctctacctctcatgggtagagtggaaaaggagcattggatatgatgatactgatgagtcccactgtgctgagcacattgagtcacgtactcttgcaattgcccgcaacctgactcagcagctccagaccacgtgccacaccctcctgtccaacatccaaggtgtaccacagaacatccaagatcaagccaagcacatgggggtgatggcaggcgacatctactcagtgttccgcaatgctgcctcctttaaagaagtgtctgacagcctcctcacttctagcaaggggcagctgcagaaaatgaaggaatctttagatgacgtgatggattatcttgttaacaacacgcccctcaactggctggtaggtcccttttatcctcagctgactgagtctcagaatgctcaggaccaaggtgcagagatggacaagagcagccaggagacccagcgatctgagcataaaactcattaa

SEQ ID NO: 541 - DNA, 567 bp, Homo sapiens
atggacgttaatatcgccccactccgcgcctgggacgatttcttcccgggttccgatcgctttgcccggccggacttcagggacatttccaaatggaacaaccgcgtagtgagcaacctgctctattaccagaccaactacctggtggtggctgccatgatgatttccattgtggggtttctgagtcccttcaacatgatcctgggaggaatcgtggtggtgctggtgttcacagggtttgtgtgggcagcccacaataaagacgtccttcgccggatgaagaagcgctaccccacgacgttcgttatggtggtcatgttggcgagctatttccttatctccatgtttggaggagtcatggtctttgtgtttggcattacttttcctttgctgttgatgtttatccatgcatcgttgagacttcggaacctcaagaacaaactggagaataaaatggaaggaataggtttgaagaggacaccgatgggcattgtcctggatgccctagaacagcaggaagaaggcatcaacagactcactgactatatcagcaaagtgaaggaataa

SEQ ID NO: 542 - DNA, 213 bp, Homo sapiens
atgatctcggatgaccaaaccagccttcggagcgttctctgtcctacttctgactttacttgtggtgtgaccatgttcattataatctcaaaggagaaaaaaaaccttgtaaaaaaagcaaaaatgacaacagaaaaacaatcttattccgagcattccagtaacttttttgtgtatgtacttagctgtactataagtagttggtttgtatga

SEQ ID NO: 543 - DNA, 3633 bp, Homo sapiens
atgggagctgttttcatgctatttcactctattaaatcttgcaactgcactcttctggtccatgtttcttacggctcgagctgagcttttgctcaccgtccaccactgctgtttgccaccaccgcagacctgccgctgactcccatccctctggatcctgcagggtgtccgctgtgctcctgatccagcgaggcgcccattgccgctcccaattgggctaaaggcttgccattgttcctgcacggctaagtgcctgggtttgttctaattgagctgaacactagtcactgggttccatggttctcttctgtgacccacggcttctaatagaactataacacttaccacatggcccaagattccattccttggaatccgtgaggccaagaactccaggtcagagaatacgaggcttgccaccatcttggaagcggcctgctaccatcttggaagtggttcaccaccatcttgggagctctgtgagcaaggaccccccggtaacattttggcaaccacgaacggacatccaaagtgatacatcctgggaaggaccctacccagtcattttatctaccccaactgcggttaaagtggctggagtggagtcttggatacatcacacttgagtcaaatcctggatactgccaaaggaacctgaaaatccaggagacaacgctagctattcctgtgaacctctagaggatttgcgcctgctcttcaaacaacaaccaggaggaaagtaactaaaatcataaatccccatggccctcccttatcatatttttctctttactgttcttttaccctctttcactctcactgcaccccctccatgccgctgtatgaccagtagctccccttaccaagagtttctatggagaatgcagcgtcccggaaatattgatgccccatcgtataggagtctttctaagggaacccccaccttcactgcccacacccatatgccccgcaactgctatcactctgccactctttgcatgcatgcaaatactcattattggacaggaaaaatgattaatcctagttgtcctggaggacttggagtcactgtctgttggacttacttcacccaaactggtatgtctgatgggggtggagttcaagatcaggcaagagaaaaacatgtaaaagaagtaatctcccaactcacccgggtacatggcacctctagcccctacaaaggactagatctctcaaaactacatgaaaccctccgtacccatactcgcctggtaagcctatttaataccaccctcactgggctccatgaggtctcggcccaaaaccctactaactgttggatatgcctccccctgaacttcaggccatatgtttcaatccctgtacctgaacaatggaacaacttcagcacagaaataaacaccacttccgttttagtaggacctcttgtttccaatctggaaataacccatacctcaaacctcacctgtgtaaaatttagcaatactacatacacaaccaactcccaatgcatcaggtgggtaactcctcccacacaaatagtctgcctaccctcaggaatattttttgtctgtggtacctcagcctatcgttgtttgaatggctcttcagaatctatgtgcttcctctcattcttagtgccccctatgaccatctacactgaacaagatttatacagttatgtcatatctaagccccgcaacaaaagagtacccattcttccttttgttataggagcgggagtgctaggtgcactaggtactggcattggcggtatcacaacctctactcagttctactacaaactatctcaagaactaaatggggacatggaacgggtcgccgactccctggtcaccttgcaagatcagcttaactccctagcagcagtagtccttcaaaatcgaagagctttagacttgctaaccgctgaaagagggggaacctgtttatttttaggggaagaatgctgttattatgttaatcaatccggaatcgtcactgagaaagttaaagaaattcgagatcgaatacaacgtagagcagaggagcttcgaaacactggaccctggggcctcctcagccaatggatgccctggattctccccttcttaggacctctagcagctataatattgctactcctctttggaccctgtatctttaacctccttgttaactttgtctcttccagaatcgaagctgtaaaactacaaatggagcccaagatgcagtccaagactaagatctaccgcagacccctggaccggcctgctagcccacgatctgatgttaatgacatcaaaggcacccctcctgaggaaatctcagctgcacaacctctactacgccccaattcagcaggaagcagttagagcggtcgtcggccaacctccccaacagcacttaggttttcctgttgagatgggggactgagagacaggactagctggatttcctaggctgactaagaatccctaagcctagctgggaaggtgaccacatccacctttaaacacggggcttgcaacttagctcacacctgaccaatcagagagctcactaaaatgctaattaggcaaagacaggaggtaaagaaatagccaatcatctattgcctgagagcacagcaggagggacaatgatcgggatataaacccaagtcttcgagccggcaacggcaaccccctttgggtcccctccctttgtatgggagctctgttttcatgctatttcactctattaaatcttgcaactgcactcttctggtccatgtttcttacggctcgagctgagcttttgctcaccgtccaccactgctgtttgccaccaccgcagacctgccgctgactcccatccctctggatcctgcagggtgtccgctgtgctcctgatccagcgaggcgcccattgccgctcccaattgggctaaaggcttgccattgttcctgcacggctaagtgcctgggtttgttctaattgagctgaacactagtcactgggttccatggttctcttctgtgacccacggcttctaatagaactataacacttaccacatggcccaagattccattccttggaatccgtgaggccaagaactccaggtcagagaatacgaggcttgccaccatcttggaagcggcctgctaccatcttggaagtggttcaccaccatcttgggagctctgtgagcaaggaccccccggtaacattttggcaaccacgaacggacatccaaagtgaatcgaagctgtaaaactacaaatggagcccaagatgcagtccaagactaagatctaccgcagacccctggaccggcctgctagcccacgatctgatgttaatgacatcaaaggcacccctcctgaggaaatctcagtggcaaccgctataaggcccaatagcagaagcacgtagaaggtcgcggcaactccaaaggactaggattccgggccatgggcctcagacggaaacggatcctagcgaagaacaaagcaaggaggacccccgacacggctaatccccccgacagagcaccttgcagggggatacattgtccgcgcgagggaaactccagacgaccttcggttaaaaagtttgtcctcccctcgtgtggcgtgttcctgc

SEQ ID NO: 544 - DNA, 1080 bp, Homo sapiens
atgaaggccactatcatcctccttctgcttgcacaagtttcctgggctggaccgtttcaacagagaggcttatttgactttatgctagaagatgaggcttctgggataggcccagaagttcctgatgaccgcgacttcgagccctccctaggcccagtgtgccccttccgctgtcaatgccatcttcgagtggtccagtgttctgatttgggtctggacaaagtgccaaaggatcttccccctgacacaactctgctagacctgcaaaacaacaaaataaccgaaatcaaagatggagactttaagaacctgaagaaccttcacgcattgattcttgtcaacaataaaattagcaaagttagtcctggagcatttacacctttggtgaagttggaacgactttatctgtccaagaatcagctgaaggaattgccagaaaaaatgcccaaaactcttcaggagctgcgtgcccatgagaatgagatcaccaaagtgcgaaaagttactttcaatggactgaaccagatgattgtcatagaactgggcaccaatccgctgaagagctcaggaattgaaaatggggctttccagggaatgaagaagctctcctacatccgcattgctgataccaatatcaccagcattcctcaaggtcttcctccttcccttacggaattacatcttgatggcaacaaaatcagcagagttgatgcagctagcctgaaaggactgaataatttggctaagttgggattgagtttcaacagcatctctgctgttgacaatggctctctggccaacacgcctcatctgagggagcttcacttggacaacaacaagcttaccagagtacctggtgggctggcagagcataagtacatccaggttgtctaccttcataacaacaatatctctgtagttggatcaagtgacttctgcccacctggacacaacaccaaaaaggcttcttattcgggtgtgagtcttttcagcaacccggtccagtactgggagatacagccatccaccttcagatgtgtctacgtgcgctctgccattcaactcggaaactataagtaa

SEQ ID NO: 545 - DNA, 471 bp, Homo sapiens
atgcagattttcgtgaaaacccttacggggaagaccatcaccctcgaggttgaaccctcggatacgatagaaaatgtaaaggccaagatccaggataaggaaggaattcctcctgatcagcagagactgatctttgctggcaagcagctggaagatggacgtactttgtctgactacaatattcaaaaggagtctactcttcatcttgtgttgagacttcgtggtggtgctaagaaaaggaagaagaagtcttacaccactcccaagaagaataagcacaagagaaagaaggttaagctggctgtcctgaaatattataaggtggatgagaatggcaaaattagtcgccttcgtcgagagtgcccttctgatgaatgtggtgctggggtgtttatggcaagtcactttgacagacattattgtggcaaatgttgtctgacttactgtttcaacaaaccagaagacaagtaa

SEQ ID NO: 546 - DNA, 708 bp, Homo sapiens
atggaccccgctcgccccctggggctgtcgattctgctgcttttcctgacggaggctgcactgggcgatgctgctcaggagccaacaggaaataacgcggagatctgtctcctgcccctagactacggaccctgccgggccctacttctccgttactactacgacaggtacacgcagagctgccgccagttcctgtacgggggctgcgagggcaacgccaacaatttctacacctgggaggcttgcgacgatgcttgctggaggatagaaaaagttcccaaagtttgccggctgcaagtgagtgtggacgaccagtgtgaggggtccacagaaaagtatttctttaatctaagttccatgacatgtgaaaaattcttttccggtgggtgtcaccggaaccggattgagaacaggtttccagatgaagctacttgtatgggcttctgcgcaccaaagaaaattccatcattttgctacagtccaaaagatgagggactgtgctctgccaatgtgactcgctattattttaatccaagatacagaacctgtgatgctttcacctatactggctgtggagggaatgacaataactttgttagcagggaggattgcaaacgtgcatgtgcaaaagctttgaaaaagaaaaagaagatgccaaagcttcgctttgccagtagaatccggaaaattcggaagaagcaattttaa

SEQ ID NO: 547 - DNA, 786 bp, Homo sapiens
atgtctcgaagatatgactccaggaccactatattttctccagaaggtcgcttataccaagttgaatatgccatggaagctattggacatgcaggcacctgtttgggaattttagcaaatgatggtgttttgcttgcagcagagagacgcaacatccacaagcttcttgatgaagtctttttttctgaaaaaatttataaactcaatgaggacatggcttgcagtgtggcaggcataacttctgatgctaatgttctgactaatgaactaaggctcattgctcaaaggtatttattacagtatcaggagccaataccttgtgagcagttggttacagcgctgtgtgatatcaaacaagcttatacacaatttggaggaaaacgtccctttggtgtttcattgctgtacattggctgggataagcactatggctttcagctctatcagagtgaccctagtggaaattacgggggatggaaggccacatgcattggaaataatagcgctgcagctgtgtcaatgttgaaacaagactataaagaaggagaaatgaccttgaagtcagcacttgctttagctatcaaagtactaaataagaccatggatgttagtaaactctctgctgaaaaagtggaaattgcaacactaacaagagagaatggaaagacagtaatcagagttctcaaacaaaaagaagtggagcagttgatcaaaaaacacgaggaagaagaagccaaagctgagcgtgagaagaaagaaaaagaacagaaagaaaaggataaatag

SEQ ID NO: 548 - DNA, 771 bp, Homo sapiens
atgctgtcccgggtggtactttccgccgccgccacagcggccccctctctgaagaatgcagccttcctaggtccaggggtattgcaggcaacaaggacctttcatacagggcagccacaccttgtccctgtaccacctcttcctgaatacggaggaaaagttcgttatggactgatccctgaggaattcttccagtttctttatcctaaaactggtgtaacaggaccctatgtactcggaactgggcttatcttgtacgctttatccaaagaaatatatgtgattagcgcagagaccttcactgccctatcagtactaggtgtaatggtctatggaattaaaaaatatggcccctttgttgcagactttgctgataaactcaatgagcaaaaacttgcccaactagaagaggcgaagcaggcttccatccaacacatccagaatgcaattgatacggagaagtcacaacaggcactggttcagaagcgccattacctttttgatgtgcaaaggaataacattgctatggctttggaagttacttaccgggaacgactgtatagagtatataaggaagtaaagaatcgcctggactatcatatatctgtgcagaacatgatgcgtcgaaaggaacaagaacacatgataaattgggtggagaagcacgtggtgcaaagcatctccacacagcaggaaaaggagacaattgccaagtgcattgcggacctaaagctgctggcaaagaaggctcaagcacagccagttatgtaa

SEQ ID NO: 549 - DNA, 1170 bp, Homo sapiens
atggcggaccctagagataaggcgcttcaggactaccgcaagaagttgcttgaacacaaggagatcgacggccgtcttaaggagttaagggaacaattaaaagaacttaccaagcagtatgaaaagtctgaaaatgatctgaaggccctacagagtgttgggcagatcgtgggtgaagtgcttaaacagttaactgaagaaaaattcattgttaaagctaccaatggaccaagatatgttgtgggttgtcgtcgacagcttgacaaaagtaagctgaagccaggaacaagagttgctttggatatgactacactaactatcatgagatatttgccgagagaggtggatccactggtttataacatgtctcatgaggaccctgggaatgtttcttattctgagattggagggctatcagaacagatccgggaattaagagaggtgatagaattacctcttacaaacccagagttatttcagcgtgtaggaataatacctccaaaaggctgtttgttatatggaccaccaggtacgggaaaaacactcttggcacgagccgttgctagccagctggactgcaatttcttaaaggttgtatctagttctattgtagacaagtacattggtgaaagtgctcgtttgatcagagaaatgtttaattatgctagagatcatcaaccatgcatcatttttatggatgaaatagatgctattggtggtcgtcggttttctgagggtacttcagctgacagagagattcagagaacgttaatggagttactgaatcaaatggatggatttgatactctgcatagagttaaaatgatcatggctacaaacagaccagatacactggatcctgctttgctgcgtccaggaagattagatagaaaaatacatattgatttgccaaatgaacaagcaagattagacatactgaaaatccatgcaggtcccattacaaagcatggtgaaatagattatgaagcaattgtgaagctttcggatggctttaatggagcagatctgagaaatgtttgtactgaagcaggtatgttcgcaattcgtgctgatcatgattttgtagtacaggaagacttcatgaaagcagtcagaaaagtggctgattctaagaagctggagtctaaattggactacaaacctgtgtaa

SEQ ID NO: 550 - DNA, 1047 bp, Homo sapiens
atgggggcccggggcgctccttcacgccgtaggcaagcggggcggcggctgcggtacctgcccaccgggagctttcccttccttctcctgctgctgctgctctgcatccagctcgggggaggacagaagaaaaaggagaatcttttagctgaaaaagtagagcagctgatggaatggagttccagacgctcaatcttccgaatgaatggtgataaattccgaaaatttataaaggcaccacctcgaaactattccatgattgttatgttcactgctcttcagcctcagcggcagtgttctgtgtgcaggcaagctaatgaagaatatcaaatactggcgaactcctggcgctattcatctgctttttgtaacaagctcttcttcagtatggtggactatgatgaggggacagacgtttttcagcagctcaacatgaactctgctcctacattcatgcattttcctccaaaaggcagacctaagagagctgatacttttgacctccaaagaattggatttgcagctgagcaactagcaaagtggattgctgacagaacggatgttcatattcgggttttcagaccacccaactactctggtaccattgctttggccctgttagtgtcgcttgttggaggtttgctttatttgagaaggaacaacttggagttcatctataacaagactggttgggccatggtgtctctgtgtatagtctttgctatgacttctggccagatgtggaaccatatccgtggacctccatatgctcataagaacccacacaatggacaagtgagctacattcatgggagcagccaggctcagtttgtggcagaatcacacattattctggtactgaatgccgctatcaccatggggatggttcttctaaatgaagcagcaacttcgaaaggcgatgttggaaaaagacggataatttgcctagtgggattgggcctggtggtcttcttcttcagttttctactttcaatatttcgttccaagtaccacggctatccttatagtgatctggactttgagtga

SEQ ID NO: 551 - DNA, 792 bp, Homo sapiens
atgcgtcccggggcgccagggccactctggcctctgccctggggggccctggcttgggccgtgggcttcgtgagctccatgggctcggggaaccccgcgcccggtggtgtttgctggctccagcagggccaggaggccacctgcagcctggtgctccagactgatgtcacccgggccgagtgctgtgcctccggcaacattgacaccgcctggtccaacctcacccacccggggaacaagatcaacctcctcggcttcttgggccttgtccactgccttccctgcaaagattcgtgcgacggcgtggagtgcggcccgggcaaggcgtgccgcatgctggggggccgcccgcgctgcgagtgcgcgcccgactgctcggggctcccggcgcggttgcaggtctgcggctcagacggcgccacctaccgcgacgagtgcgagctgcgcgccgcgcgctgccgcggccacccggacctgagcgtcatgtaccggggccgctgccgcaagtcctgtgagcacgtggtgtgcccgcggccacagtcgtgcgtcgtggaccagacgggcagcgcccactgcgtggtgtgtcgagcggcgccctgccctgtgccctccagccccggccaggagctttgcggcaacaacaacgtcacctacatctcctcgtgccacatgcgccaggccacctgcttcctgggccgctccatcggcgtgcgccacgcgggcagctgcgcaggcacccctgaggagccgccaggtggtgagtctgcagaagaggaagagaacttcgtgtga

SEQ ID NO: 552 - DNA, 348 bp, Homo sapiens
atgcgctacgtcgcctcctacctgctggctgccctagggggcaactcctcccccagcgccaaggacatcaagaagatcttggacagcgtgggtatcgaggcggacgacgaccggctcaacaaggttatcagtgagctgaatggaaaaaacattgaagacgtcattgcccagggtattggcaagcttgccagtgtacctgctggtggggctgtagccgtctctgctgccccaggctctgcagcccctgctgctggttctgcccctgctgcagcagaggagaagaaagatgagaagaaggaggagtctgaagagtcagatgatgacatgggatttggcctttttgattaa

SEQ ID NO: 553 - DNA, 1013 bp, Homo sapiens
aaggatccttaattaaattaatccccccccccccccccccccccgttttttgcgaagtgggctcgtgggttggcagtatgagagttgtaatggcccgactgttgagtgagggggagcaggggatcccaacggcttgcgctgcctttgcgcagcagccggcgggcggccacgtcgcggcctggctggggtaggagagggcggtccccagtgcagttgggtgaactaccgttgcacactggagtttctggtgtctttgcttggaactgacctagctcgtggcagggggaactcggctagcggccccacagcccctgctgactcaaaacaactgagttgtaagacgttcatcgccgtgttatccttgagtaaagaatgaactctggaagcccagccagggacaatgcaccttcacagagattctgcactaatctgagtgaaggtctaaggtttggaatctccccctcatggagagaagctttgtatggctgtcatgcttagacagtgattcctgcaacttgaccttcaggctgggagaggtggagagccatgcctgttctccttccttgctatggaatttgctgacacaatatcttccgcctggtgctgggcatatcctaagaacttacaactttcctgtattatcctgtgtgagcagctgtcaccttattgggggaaaaatgcctgaaaattagggggcacttcaagtagatagcttctatttcctatatttgtcttatatacaagtatttgcttttatcaaaataattccaataaagcattttaaagtaaaaaaaaaaaaaagggggcggctaaagttactcgaggcaagtacctgaccagttttgcaagggccaaggagcgttaaaggaggcgcgggtgacagtagtggagcgtctggctgggagcctttgggggttgcaccaagagagccgggaaagtgtggagttgggtgtgtaatatataagaacgcattgcgtcgggttcgttgcatagccggcgaaaggcaaaaaata

SEQ ID NO: 554 - DNA, 342 bp, Homo sapiens
atggccgacgtggaagacggagaggaaacctgcgccctggcctctcactccgggagctcaggctccaagtcgggaggcgacaagatgttctccctcaagaagtggaacgcggtcgccatgtggagctgggacgtggagtgcgatacgtgcgccatctgcagggtccaggtgatggatgcctgtcttagatgtcaagctgaaaacaaacaagaggactgtgttgtggtctggggagaatgtaatcattccttccacaactgctgcatgtccctgtgggtgaaacagaacaatcgctgccctctctgccagcaggactgggtggtccaaagaatcggcaaatga

SEQ ID NO: 555 - DNA, 687 bp, Homo sapiens
atggcttcagaagagctacagaaagatctagaagaggtaaaggtgttgctggaaaaggctactaggaaaagagtacgtgatgcccttacagctgaaaaatccaagattgagacagaaatcaagaacaagatgcaacagaaatcacagaagaaagcagaacttcttgataatgaaaaaccagctgctgtggttgctcccattacaacgggctatacggtgaaaatcagtaattatggatgggatcagtcagataagtttgtgaaaatctacattaccttaactggagttcatcaagttcccactgagaatgtgcaggtgcatttcacagagaggtcatttgatcttttggtaaagaatctaaatgggaagagttactccatgattgtgaacaatctcttgaaacccatctctgtggaaggcagttcaaaaaaagtcaagactgatacagttcttatattgtgtagaaagaaagtggaaaacacaaggtgggattacctgacccaggttgaaaaggagtgcaaagaaaaagagaagccctcctatgacactgaaacagatcctagtgagggattgatgaatgttctaaagaaaatttatgaagatggagacgatgatatgaagcgaaccattaataaagcctgggtggaatcaagagagaagcaagccaaaggagacacggaattttga

SEQ ID NO: 556 - DNA, 429 bp, Homo sapiens
atgatccgctttatcctcatccagaaccgggcaggcaagacgcgcctggccaagtggtacatgcagtttgatgatgatgagaaacagaagctgatcgaggaggtgcatgccgtggtcaccgtccgagacgccaaacacaccaactttgtggagttccggaactttaagatcatttaccgccgctatgctggcctctacttctgcatctgtgtggatgtcaatgacaacaacctggcttacctggaggccattcacaacttcgtggaggtcttaaacgaatatttccacaatgtctgtgaactggacctggtgttcaacttctacaaggtttacacggtcgtggacgagatgttcctggctggcgaaatccgagagaccagccagacgaaggtgctgaaacagctgctgatgctacagtccctggagtga

SEQ ID NO: 557 - DNA, 1938 bp, Homo sapiens
atgaggccccggaaagccttcctgctcctgctgctcttggggctggtgcagctgctggccgtggcgggtgccgagggcccggacgaggattcttctaacagagaaaatgccattgaggatgaagaggaggaggaggaggaagatgatgatgaggaagaagacgacttggaagttaaggaagaaaatggagtcttggtcctaaatgatgcaaactttgataattttgtggctgacaaagacacagtgctgctggagttttatgctccatggtgtggacattgcaagcagtttgctccggaatatgaaaaaattgccaacatattaaaggataaagatcctcccattcctgttgccaagatcgatgcaacctcagcgtctgtgctggccagcaggtttgatgtgagtggctaccccaccatcaagatccttaagaaggggcaggctgtagactacgagggctccagaacccaggaagaaattgttgccaaggtcagagaagtctcccagcccgactggacgcctccaccagaagtcacgcttgtgttgaccaaagagaactttgatgaagttgtgaatgatgcagatatcattctggtggagttttatgccccatggtgtggacactgcaagaaacttgcccccgagtatgagaaggccgccaaggagctcagcaagcgttctcctccaattcccctggcaaaggtcgacgccaccgcagaaacagacctggccaagaggtttgatgtctctggctatcccaccctgaaaattttccgcaaaggaaggccttatgactacaacggcccacgagaaaaatatggaatcgttgattacatgatcgagcagtccgggcctccctccaaggagattctgaccctgaagcaggtccaggagttcctgaaggatggagacgatgtcatcatcatcggggtctttaagggggagagtgacccagcctaccagcaataccaggatgccgctaacaacctgagagaagattacaaatttcaccacactttcagcacagaaatagcaaagttcttgaaagtctcccaggggcagttggttgtaatgcagcctgagaaattccagtccaagtatgagccccggagccacatgatggacgtccagggctccacccaggactcggccatcaaggacttcgtgctgaagtacgccctgcccctggttggccaccgcaaggtgtcaaacgatgctaagcgctacaccaggcgccccctggtggtcgtctactacagtgtggacttcagctttgattacagagctgcaactcagttttggcggagcaaagtcctagaggtggccaaggacttccctgagtacacctttgccattgcggacgaagaggactatgctggggaggtgaaggacctggggctcagcgagagtggggaggatgtcaatgccgccatcctggacgagagtgggaagaagttcgccatggagccagaggagtttgactctgacaccctccgcgagtttgtcactgctttcaaaaaaggaaaactgaagccagtcatcaaatcccagccagtgcccaagaacaacaagggacccgtcaaggtcgtggtgggaaagacctttgactccattgtgatggaccccaagaaggacgtcctcatcgagttctacgcaccatggtgcgggcactgcaagcagctagagcccgtgtacaacagcctggccaagaagtacaagggccaaaagggcctggtcatcgccaagatggacgccactgccaacgacgtccccagcgaccgctataaggtggagggcttccccaccatctacttcgcccccagtggggacaaaaagaacccagttaaatttgagggtggagacagagatctggagcatttgagcaagtttatagaagaacatgccacaaaactgagcaggaccaaggaagagctttga

SEQ ID NO: 558 - DNA, 678 bp, Homo sapiens
atgttggggaacctgcttcggcctccatatgaaaggccagagctccccacatgtctctatgtaattgggctgactggcatcagtggctctgggaagagctcaatagctcagcgactgaagggcctgggggcgtttgtcattgacagtgaccacctgggtcatcgggcctatgccccaggtggccctgcctaccagcctgtggtggaggcctttggaacagatattctccataaagatggcatcatcaacaggaaggtcctaggcagccgggtgtttgggaataagaagcagctgaagatactcacggacattatgtggccaattatcgcaaagctggcccgagaggagatggatcgggctgtggctgagggaaagcgtgtgtgtgtgattgatgccgctgtgttgcttgaagccggctggcagaacctggtccatgaggtgtggactgctgtcatcccagagactgaggctgtaagacgcattgtggagagggatggcctcagtgaagccgcggctcaaagccggctgcagagccagatgagcgggcagcagcttgtggaacagagccacgtggtgctcagcaccttgtgggagccgcatatcacccaacgccaggtggagaaagcctgggccctcttgcagaagcgcattcccaagactcatcaggccctcgactga

SEQ ID NO: 559 - DNA, 1548 bp, Homo sapiens
atggcctggccctacttccttgactgccaccgctacttcacgagagaggacgagggctgctatgacccgctggagaagcttcggggaggcctggaggctgacgaggcactgccctcagggctgccgcccaccttcatccgcttcagccaccactcctacgcccagatggtgcgtgtgctgaggcggatggcctcccgctgcgcccacgtggccaggacctacagcatcgggcgcagcttcgacggcagggagctgctggtcatcgagttctccagccgccccggccagcacgagctgatggagcccgaggtgaagctcatcggcaacattcatggcaacgaggtggcgggccgggagatgctcatctacctagcccagtacctgtgctctgagtacctgcttggtaacccccgcatccagcgcctgctcaacaccacccgcatccacctgctgccctccatgaaccctgacggctatgaggtggcagctgccgagggtgccggctacaacgggtggacgagcgggaggcagaacgcgcagaacctggatctgaaccgaaatttcccggacctgacgtccgagtactaccggctggcggagacccgcggcgcacgcagcgaccacatccccatcccccagcactactggtggggtaaggtggccccggagacaaaggcaatcatgaagtggatgcagaccataccctttgtgctctcagccagccttcatgggggcgacctggtggtgtcctaccccttcgacttctccaagcacccccaggaggagaagatgttttctcccacgcccgacgagaagatgttcaagctgctgtccagagcctacgctgacgtccaccccatgatgatggacaggtcggagaataggtgtggaggcaatttcctgaagagggggagcatcatcaacggggcggactggtacagcttcacgggaggcatgtccgacttcaactacctgcacaccaactgctttgagatcacggtagagctgggctgtgtgaagttcccccccgaggaggccctgtacacactctggcagcacaacaaggagtcactcctgaatttcgtggagacggtgcaccggggcatcaaaggtgtggtgacagataaattcggcaagccagtcaaaaacgcccggatctcagtcaaaggcattcgccacgacatcaccacagccccagatggtgactactggagactgctgcccccaggtatccacattgtcattgcccaagcccctggctacgccaaagtcatcaagaaagtcatcatccccgcccggatgaagagggctggccgtgtggacttcattctgcaacctctggggatgggacccaagaactttattcatgggctgcggaggactgggccccacgacccgctgggaggtgccagctctttgggggaggccacggagcccgacccgctccgggcgcgcaggcagccctcggccgacgggagtaagccctggtggtggtcctacttcacatcgctgagcacccacaggccacgctggctgctcaagtactag

SEQ ID NO: 560 - DNA, 2112 bp, Homo sapiens
atggagcgcgccgcgccgtcgcgccgggtcccgcttccgctgctgctgctcggcggccttgcgctgctggcggccggagtggacgcggatgtcctcctggaggcctgctgtgcggacggacaccggatggccactcatcagaaggactgctcgctgccatatgctacggaatccaaagaatgcaggatggtgcaggagcagtgctgccacagccagctggaggagctgcactgtgccacgggcatcagcctggccaacgagcaggaccgctgtgccacgccccacggtgacaacgccagcctggaggccacatttgtgaagaggtgctgccattgctgtctgctggggagggcggcccaggcccagggccagagctgcgagtacagcctcatggttggctaccagtgtggacaggtcttccgggcatgctgtgtcaagagccaggagaccggagatttggatgtcgggggcctccaagaaacggataagatcattgaggttgaggaggaacaagaggacccatatctgaatgaccgctgccgaggaggcgggccctgcaagcagcagtgccgagacacgggtgacgaggtggtctgctcctgcttcgtgggctaccagctgctgtctgatggtgtctcctgtgaagatgtcaatgaatgcatcacgggcagccacagctgccggcttggagaatcctgcatcaacacagtgggctctttccgctgccagcgggacagcagctgcgggactggctatgagctcacagaggacaatagctgcaaagatattgacgagtgtgagagtggtattcataactgcctccccgattttatctgtcagaatactctgggatccttccgctgccgacccaagctacagtgcaagagtggctttatacaagatgctctaggcaactgtattgatatcaatgagtgtttgagtatcagtgccccgtgccctattgggcatacatgcatcaacacagagggctcctacacgtgccagaagaacgtgcccaactgtggccgtggctaccatctcaacgaggagggaacgcgctgtgttgatgtggacgagtgcgcgccacctgctgagccctgtgggaagggacatcgctgcgtgaactctcccggcagtttccgctgcgaatgcaagacgggttactattttgacggcatcagcaggatgtgtgtcgatgtcaacgagtgccagcgctaccccgggcgcctgtgtggccacaagtgcgagaacacgctgggctcctacctctgcagctgttccgtgggcttccggctctctgtggatggcaggtcatgtgaagacatcaatgagtgcagcagcagcccctgtagccaggagtgtgccaacgtctacggctcctaccagtgttactgccggcgaggctaccagctcagcgatgtggatggagtcacctgtgaagacatcgacgagtgcgccctgcccaccgggggccacatctgctcctaccgctgcatcaacatccctggaagcttccagtgcagctgcccctcgtctggctacaggctggcccccaatggccgcaactgccaagacattgatgagtgtgtgactggcatccacaactgctccatcaacgagacctgcttcaacatccagggcgcgttccgctgcctggccttcgagtgccctgagaactaccgccgctccgcagccacgctccagcaggagaagacagacacggtccgctgcatcaagtcctgccgccccaacgatgtcacatgcgtgttcgaccccgtgcacaccatctcccacaccgtcatctcgctgcctaccttccgcgagttcacccgccctgaagagatcatcttcctccgggccatcacgccaccgcatcctgccagccaggctaacatcatcttcgacatcacggaagggaacctgcgggactcttttgacatcatcaagcgttacatggacggcatgaccgtgggtgtcgtgcgccaggtgcggcccatcgtgggcccatttcatgccgtcctgaagctggagatgaactatgtggtcgggggcgtggtttcccaccgaaatgttgtcaacgtccgcatcttcgtctctgagtactggttctga

SEQ ID NO: 561 - DNA, 1449 bp, Homo sapiens
atggtgaagctcgcgaaggcaggtaaaaatcaaggtgaccccaagaaaatggctcctcctccaaaggaggtagaagaagatagtgaagatgaggaaatgtcagaagatgaagaagatgatagcagtggagaagaggtcgtcatacctcagaagaaaggcaagaaggctgctgcaacctcagcaaagaaggtggtcgtttccccaacaaaaaaggttgcagttgccacaccagccaagaaagcagctgtcactccaggcaaaaaggcagcagcaacacctgccaagaagacagttacaccagccaaagcagttaccacacctggcaagaagggagccacaccaggcaaagcattggtagcaactcctggtaagaagggtgctgccatcccagccaagggggcaaagaatggcaagaatgccaagaaggaagacagtgatgaagaggaggatgatgacagtgaggaggatgaggaggatgacgaggacgaggatgaggatgaagatgaaattgaaccagcagcgatgaaagcagcagctgctgcccctgcctcagaggatgaggacgatgaggatgacgaagatgatgaggatgggaaaagtaaagggattgcttatattgaatttaagacagaagctgatgcagagaaaacctttgaagaaaagcagggaacagagatcgatgggcgatctatttccctgtactatactggagagaaaggtcaaaatcaagactatagaggtggaaagaatagcacttggagtggtgaatcaaaaactctggttttaagcaacctctcctacagtgcaacagaagaaactcttcaggaagtatttgagaaagcaacttttatcaaagtaccccagaaccaaaatggcaaatctaaagggtatgcatttatagagtttgcttcattcgaagacgctaaagaagctttaaattcctgtaataaaagggaaattgagggcagagcaatcaggctggagttgcaaggacccaggggatcacctaatgccagaagccagccatccaaaactctgtttgtcaaaggcctgtctgaggataccactgaagagacattaaaggagtcatttgacggctccgttcgggcaaggatagttactgaccgggaaactgggtcctccaaagggtttggttttgtagacttcaacagtgaggaggatgccaaagctgccaaggaggccatggaagacggtgaaattgatggaaataaagttaccttggactgggccaaacctaagggtgaaggtggcttcgggggtcgtggtggaggcagaggcggctttggaggacgaggtggtggtagaggaggccgaggaggatttggtggcagaggccggggaggctttggagggcgaggaggcttccgaggaggcagaggaggaggaggtgaccacaagccacaaggaaagaagacgaagtttgaatag

SEQ ID NO: 562 - DNA, 456 bp, Homo sapiens
atggcacctcgaaaggggaaggaaaagaaggaagaacaggtcatcagcctcggacctcaggtggctgaaggagagaatgtatttggtgtctgccatatctttgcatccttcaatgacacttttgtccatgtcactgatctttctggcaaggaaaccatctgccgtgtgactggtgggatgaaggtaaaggcagaccgagatgaatcctcaccatatgctgctatgttggctgcccaggatgtggcccagaggtgcaaggagctgggtatcaccgccctacacatcaaactccgggccacaggaggaaataggaccaagacccctggacctggggcccagtcggccctcagagcccttgcccgctcgggtatgaagatcgggcggattgaggatgtcacccccatcccctctgacagcactcgcaggaaggggggtcgccgtggtcgccgtctgtga

SEQ ID NO: 563 - DNA, 728 bp, Homo sapiens
aaggatccttaattaaattaatccccccccccccgctcttccggttctaggcgcttcgggagccgcggcttatggtgcagacatggccaagtccaagaaccacaccacacacaaccagtcccgaaaatggcacagaaatggtatcaagaaaccccgatcacaaagatacgaatctcttaagggggtggaccccaagttcctgaggaacatgcgctttgccaagaagcacaacaaaaagggcctaaagaagatgcaggccaacaatgccaaggccatgagtgcacgtgccgaggctatcaaggccctcgtaaagcccaaggaggttaagcccaagatcccaaagggtgtcagccgcaagctcgatcgacttgcctacattgcccaccccaagcttgggaagcgtgctcgtgcccgtattgccaaggggctcaggctgtgccggccaaaggccaaggcgccaaggccaaggccaaggccaaggatcaaaccaaggcccaggctgcagccccagcttcagttccagctcaggctcccaaacgtacccaggcccctacaaaggcttcagagtagatatctctgccaacatgaggacagaaggactggtgcgaccccccacccccgcccctgggctaccatctgcatggggctggggtcctcctgtgctatttgtacaaataaacctgaggcaggaaaaaaaaaaaaaacaacacacacaaacaaaaaaaaaa

SEQ ID NO: 564 - DNA, 654 bp, Homo sapiens
atgagcagcaaagtctctcgcgacaccctgtacgaggcggtgcgggaagtcctgcacgggaaccagcgcaagcgccgcaagttcctggagacggtggagttgcagatcagcttgaagaactatgatccccagaaggacaagcgcttctcgggcaccgtcaggcttaagtccactccccgccctaagttctctgtgtgtgtcctgggggaccagcagcactgtgacgaggctaaggccgtggatatcccccacatggacatcgaggcgctgaaaaaactcaacaagaataaaaaactggtcaagaagctggccaagaagtatgatgcgtttttggcctcagagtctctgatcaagcagattccacgaatcctcggcccaggtttaaataaggcaggaaagttcccttccctgctcacacacaacgaaaacatggtggccaaagtggatgaggtgaagtccacaatcaagttccaaatgaagaaggtgttatgtctggctgtagctgttggtcacgtgaagatgacagacgatgagcttgtgtataacattcacctggctgtcaacttcttggtgtcattgctcaagaaaaactggcagaatgtccgggccttatatatcaagagcaccatgggcaagccccagcgcctatattaa

SEQ ID NO: 565 - DNA, 669 bp, Homo sapiens
atgtgtctgcgcctcggaggcctgagtgtgggcgacttccggaaggtgctgatgaagacaggcctggtgctggtggtgctgggccatgtgagcttcatcacagctgccctgttccatggcacagtgctgcgctacgtgggcacccctcaagatgcggtggctctgcagtactgcgtggtcaacatcctctctgtcacttccgccatcgtggtcatcacttcaggcatcgcagccatcgtgttgtcacgctacctccctagcacccccctgcgctggacagtgtttagctcgagcgtggcctgtgctctcctttctctgacctgtgccctcggcctcttggcctccatcgccatgacctttgccacccagggcaaggcactgctggctgcctgcacttttgggagctctgaactactggccctcgcacctgactgtcccttcgaccccacacgcatttatagctccagcctgtgcctctggggcatcgccctagtgctctgcgtggcggagaacgtgtttgctgtacgctgtgctcagctcacccaccagctgctggagctgaggccctggtgggggaaaagcagccaccacatgatgcgggagaacccagagctggtggagggccgtgacctgctgagctgcaccagctctgagcctctgaccctctga

SEQ ID NO: 566 - DNA, 1017 bp, Homo sapiens
atgagtctaagtgcatttactctcttcctggcattgattggtggtaccagtggccagtactatgattatgattttcccctatcaatttatgggcaatcatcaccaaactgtgcaccagaatgtaactgccctgaaagctacccaagtgccatgtactgtgatgagctgaaattgaaaagtgtaccaatggtgcctcctggaatcaagtatctttaccttaggaataaccagattgaccatattgatgaaaaggcctttgagaatgtaactgatctgcagtggctcattctagatcacaaccttctagaaaactccaagataaaagggagagttttctctaaattgaaacaactgaagaagctgcatataaaccacaacaacctgacagagtctgtgggcccacttcccaaatctctggaggatctgcagcttactcataacaagatcacaaagctgggctcttttgaaggattggtaaacctgaccttcatccatctccagcacaatcggctgaaagaggatgctgtttcagctgcttttaaaggtcttaaatcactcgaataccttgacttgagcttcaatcagatagccagactgccttctggtctccctgtctctcttctaactctctacttagacaacaataagatcagcaacatccctgatgagtatttcaagcgttttaatgcattgcagtatctgcgtttatctcacaacgaactggctgatagtggaatacctggaaattctttcaatgtgtcatccctggttgagctggatctgtcctataacaagcttaaaaacataccaactgtcaatgaaaaccttgaaaactattacctggaggtcaatcaacttgagaagtttgacataaagagcttctgcaagatcctggggccattatcctactccaagatcaagcatttgcgtttggatggcaatcgcatctcagaaaccagtcttccaccggatatgtatgaatgtctacgtgttgctaacgaagtcactcttaattaa

SEQ ID NO: 567 - DNA, 816 bp, Homo sapiens
atggaggcgctgccgctgctagccgcgacaactccggaccacggccgccaccgaaggctgcttctgctgccgctactgctgttcctgctgccggctggagctgtgcagggctgggagacagaggagaggccccggactcgcgaagaggagtgccacttctacgcgggtggacaagtgtacccgggagaggcatcccgggtatcggtcgccgaccactccctgcacctaagcaaagcgaagatttccaagccagcgccctactgggaaggaacagctgtgatcgatggagaatttaaggagctgaagttaactgattatcgtgggaaatacttggttttcttcttctacccacttgatttcacatttgtgtgtccaactgaaattatcgcttttggcgacagacttgaagaattcagatctataaatactgaagtggtagcatgctctgttgattcacagtttacccatttggcctggattaatacccctcgaagacaaggaggacttgggccaataaggattccacttctttcagatttgacccatcagatctcaaaggactatggtgtatacctagaggactcaggccacactcttagaggtctcttcattattgatgacaaaggaatcctaagacaaattactctgaatgatcttcctgtgggtagatcagtggatgagacactacgtttggttcaagcattccagtacactgacaaacacggagaagtctgccctgctggctggaaacctggtagtgaaacaataatcccagatccagctggaaagctgaagtatttcgataaactgaattga

SEQ ID NO: 568 - DNA, 549 bp, Homo sapiens
atgaggaggatgtgggccacgcaggggctggcggtggcgctggctctgagcgtgctgccgggcagccgggcgctgcggccgggcgactgcgaagtttgtatttcttatctgggaagattttaccaggacctcaaagacagagatgtcacattctcaccagccactattgaaaacgaacttataaagttctgccgggaagcaagaggcaaagagaatcggttgtgctactatatcggggccacagatgatgcagccaccaaaatcatcaatgaggtatcaaagcctctggcccaccacatccctgtggagaagatctgtgagaagcttaagaagaaggacagccagatatgtgagcttaagtatgacaagcagatcgacctgagcacagtggacctgaagaagctccgagttaaagagctgaagaagattctggatgactggggggagacatgcaaaggctgtgcagaaaagtctgactacatccggaagataaatgaactgatgcctaaatatgcccccaaggcagccagtgcacggaccgatttgtag

SEQ ID NO: 569 - DNA, 570 bp, Homo sapiens
atggtgatgctgctgctgctgctttccgcactggctggcctcttcggtgcggcagagggacaagcatttcatcttgggaagtgccccaatcctccggtgcaggagaattttgacgtgaataagtatctcggaagatggtacgaaattgagaagatcccaacaacctttgagaatggacgctgcatccaggccaactactcactaatggaaaacggaaagatcaaagtgttaaaccaggagttgagagctgatggaactgtgaatcaaatcgaaggtgaagccaccccagttaacctcacagagcctgccaagctggaagttaagttttcctggtttatgccatcggcaccgtactggatcctggccaccgactatgagaactatgccctcgtgtattcctgtacctgcatcatccaactttttcacgtggattttgcttggatcttggcaagaaaccctaatctccctccagaaacagtggactctctaaaaaatatcctgacttctaataacattgatgtcaagaaaatgacggtcacagaccaggtgaactgccccaagctctcgtaa

SEQ ID NO: 570 - DNA, 483 bp, Homo sapiens
atgacgaacacaaagggaaagaggagaggcacccgatatatgttctctaggccttttagaaaacatggagttgttcctttggccacatatatgcgaatctataagaaaggtgatattgtagacatcaagggaatgggtactgttcaaaaaggaatgccccacaagtgttaccatggcaaaactggaagagtctacaatgttacccagcatgctgttggcattgttgtaaacaaacaagttaagggcaagattcttgccaagagaattaatgtgcgtattgagcacattaagcactctaagagccgagatagcttcctgaaacgtgtgaaggaaaatgatcagaaaaagaaagaagccaaagagaaaggtacctgggttcaactaaagcgccagcctgctccacccagagaagcacactttgtgagaaccaatgggaaggagcctgagctgctggaacctattccctatgaattcatggcataa

SEQ ID NO: 571 - DNA, 360 bp, Homo sapiens
atggcttttaaggataccggaaaaacacccgtggagccggaggtggcaattcaccgaattcgaatcaccctaacaagccgcaacgtaaaatccttggaaaaggtgtgtgctgacttgataagaggcgcaaaagaaaagaatctcaaagtgaaaggaccagttcgaatgcctaccaagactttgagaatcactacaagaaaaactccttgtggtgaaggttctaagacgtgggatcgtttccagatgagaattcacaagcgactcattgacttgcacagtccttctgagattgttaagcagattacttccatcagtattgagccaggagttgaggtggaagtcaccattgcagatgcttaa

SEQ ID NO: 572 - DNA, 471 bp, Homo sapiens
atggcgccgaaagcgaagaaggaagctcctgcccctcctaaagctgaagccaaagcgaaggctttaaaggccaagaaggcagtgttgaaaggtgtccacagccacaaaaagaagaagatccgcacgtcacccaccttccggcggccgaagacactgcgactccggagacagcccaaatatcctcggaagagcgctcccaggagaaacaagcttgaccactatgctatcatcaagtttccgctgaccactgagtctgccatgaagaagatagaagacaacaacacacttgtgttcattgtggatgttaaagccaacaagcaccagattaaacaggctgtgaagaagctgtatgacattgatgtggccaaggtcaacaccctgattcggcctgatggagagaagaaggcatatgttcgactggctcctgattacgatgctttggatgttgccaacaaaattgggatcatctaa

SEQ ID NO: 573 - DNA, 1230 bp, Homo sapiens
atgttagttgtcaataacagtgtcctatttcctccctcaggtgacagatctgaatttcctgatgtgaaaatactgattgcatttataagctacaaagactttagagatatgaaccagactctaggagataacattactgtgaaaatgtattctccatcgtggcctaactttgattatactatggtggttatttttgtaattgcggtgttcactgtggcattaggtggatactggagtggactagttgaattggaaaacttgaaagcagtgacaactgaagatagagaaatgaggaaaaagaaggaagaatatttaacttttagtcctcttacagttgtaatatttgtggtcatctgctgtgttatgatggtcttactttatttcttctacaaatggttggtttatgttatgatagcaattttctgcatagcatcagcaatgagtctgtacaactgtcttgctgcactaattcataagataccatatggacaatgcacgattgcatgtcgtggcaaaaacatggaagtgagacttatttttctctccggactgtgcatagcagtagctgttgtttgggctgtgtttcgaaatgaagacaggtgggcttggattttacaggatatcttggggattgctttctgtctgaatttaattaaaacactgaagttgcccaacttcaagtcatgtgtgatacttctaggccttctcctcctctatgatgtattttttgttttcataacaccattcatcacaaagaatggtgagagtatcatggttgaactcgcagctggaccttttggaaataatgaaaagttgccagtagtcatcagagtaccaaaactgatctatttctcagtaatgagtgtgtgcctcatgcctgtttcaatattgggttttggagacattattgtaccaggcctgctgattgcatactgtagaagatttgatgttcagactggttcttcttacatatactatgtttcgtctacagttgcctatgctattggcatgatacttacatttgttgttctggtgctgatgaaaaaggggcaacctgctctcctctatttagtaccttgcacacttattactgcctcagttgttgcctggagacgtaaggaaatgaaaaagttctggaaaggtaacagctatcagatgatggaccatttggattgtgcaacaaatgaagaaaaccctgagatatctggtgaacagattgtccagcaataa

SEQ ID NO: 574 - DNA, 1406 bp, Homo sapiens
ttgaaggtcatagtaacagtcacaactacggccgttataactatagggatggtccccggggggcgaacttgtacaaaatacgagttggtcagcaatcggcgactcgaatttgaaaccgaggggccgaactgttggacggcgcggctggagcacagcgccgaaaggactggcaaggctgaagtgtgggggacagcagccccccggatagcccgggctgccacctcgcaggaccacaaggccacgcgcgccggccccaagctagagccgccttcatgaagccgcccgccggcgcagggcagccccgcggcacgccgccggccgcagccccggccctggactcgggccgcggaggacctgtcggacgcgctgtgcgagtttgacgcggtgctggccgacttcgcgtcgcccttccacgagcgccacttccactacgaggagcacctggagcgcatgaagcggcgcagcagcgccagtgtcagcgacagcagcggcttcagcgactcggagagtgcagattcactttataggaacagcttcagcttcagtgatgaaaaactgaattctccaacagactctaccccagctcttctctctgccactgtcactcctcagaaagctaaattaggagacacaaaagagctagaagccttcattgctgatcttgacaaaactttagcaagtatgtgaaacaagaagttctgggtcctttcatcataagggagaagcttcagaaagttccgaggacctgctaaaatcagctactagaatctgctgccagaggggacaaagacgtgcactcaaccttctaccaggccactctcaggctcaccttaaaatcagcccttgatcccatttctgggcaatttagacagtgaaactgactttgtttacctgcttgcagcatattagaacagacgatccatgctaatattgtattttctcttaaaacatagctttcctgtaatttaaagtgcttttatgaaaatatttgtaattaattatatatagttggaaatagcagtaagctttcccattataatatatttttgctatacaaataaaatttgggaaacaaggaaacataccaccgaagcacacagcgctcccctcgtgtttgtgcgcgcgcctctggcccctccggaagagcctttttggccacacctcgttgggcgcgcgcgggccgccgctggcgtgccagacacaagtggcacatagcgtcggttacccgaagacgagacacccagtgacacagcaacatatgtgcctggcgacatttctcgccacctgttcatacaacccccccgaggcggacatcccgcagtgtcttactcgaacagaacttctcgcaaagggcgtcctctacagagccacacaacgggactcttacaacacggcggaccccagcg

SEQ ID NO: 575 - DNA, 1614 bp, Homo sapiens
atgacctgccataagcggtataaaatccaaaaaaaggttcgagaacatcatcgaaaattaagaaaggaggctaaaaagcggggtcacaagaagcctaggaaagacccaggagttccaaacagtgctccctttaaggaggctcttcttagggaagctgagctaaggaaacagaggcttgaagaactaaaacagcagcagaaacttgacaggcagaaggaactagaaaagaaaagaaaacttgaaactaatcctgatattaagccatcaaatgtggaacctatggaaaaggagtttgggctttgcaaaactgagaacaaagccaagtcgggcaaacagaattcaaagaagctgtactgccaagaacttaaaaaggtgattgaagcctccgatgttgtcctagaggtgttggatgccagagatcctcttggttgcagatgtcctcaggtagaagaggccattgtccagagtggacagaaaaagctggtacttatattaaataaatcagatctggtaccaaaggagaatttggagagctggctaaattatttgaagaaagaattgccaacagtggtgttcagagcctcaacaaaaccaaaggataaagggaagataaccaagcgtgtgaaggcaaagaagaatgctgctccattcagaagtgaagtctgctttgggaaagagggcctttggaaacttcttggaggttttcaggaaacttgcagcaaagccattcgggttggagtaattggtttcccaaatgtggggaaaagcagcattatcaatagcttaaaacaagaacagatgtgtaatgttggtgtatccatggggcttacaaggagcatgcaagttgtccccttggacaaacagatcacaatcatagatagtccgagcttcatcgtatctccacttaattcctcctctgcgcttgctctgcgaagtccagcaagtattgaagtagtaaaaccgatggaggctgccagtgccatcctttcccaggctgatgctcgacaggtagtactgaaatatactgtcccaggctacaggaattctctggaattttttactgtgcttgctcagagaagaggtatgcaccaaaaaggtggaatcccaaatgttgaaggtgctgccaaactgctgtggtctgagtggacaggtgcctcattagcttactattgccatccccctacatcttggactcctcctccatattttaatgagagtattgtggtagacatgaaaagcggcttcaatctggaagaactggaaaagaacaatgcacagagcataagagccatcaagggccctcatttggccaatagcatccttttccagtcttccggtctgacaaatggaataatagaagaaaaggacatacatgaagaattgccaaaacggaaagaaaggaagcaggaggagagggaggatgacaaagacagtgaccaggaaactgttgatgaagaagttgatgaaaacagctcaggcatgtttgctgcagaagagacaggggaggcactgtctgaggagactacagcaggtgaacagtctacaaggtcttttatcttggataaaatcattgaagaggatgatgcttatgacttcagtacagattatgtgtaa

SEQ ID NO: 576 - DNA, 327 bp, Homo sapiens
atggtgaacttgggtctgtcccgggtggacgacgccgtggctgccaagcacccgggactcggggagtatgccgcatgccagtcacacgccttcatgaagggcgttttcaccttcgtcacaggcaccggcatggcctttggcttgcagatgttcattcagaggaagtttccataccctttgcagtggagcctcctagtggccgtggttgcaggctctgtggtcagctacggggtgacgagagtggagtcggagaaatgcaacaacctctggctcttcctggagaccgggcagctccccaaagacaggagcacagatcagagaagctag

SEQ ID NO: 577 - DNA, 1302 bp, Homo sapiens
atggtttggaaagtagctgtattcctcagtgtggccctgggcattggtgccgttcctatagatgatcctgaagatggaggcaagcactgggtggtgatcgtggcaggttcaaatggctggtataattataggcaccaggcagacgcgtgccatgcctaccagatcattcaccgcaatgggattcctgacgaacagatcgttgtgatgatgtacgatgacattgcttactctgaagacaatcccactccaggaattgtgatcaacaggcccaatggcacagatgtctatcagggagtcccgaaggactacactggagaggatgttaccccacaaaatttccttgctgtgttgagaggcgatgcagaagcagtgaagggcataggatccggcaaagtcctgaagagtggcccccaggatcacgtgttcatttacttcactgaccatggatctactggaatactggtttttcccaatgaagatcttcatgtaaaggacctgaatgagaccatccattacatgtacaaacacaaaatgtaccgaaagatggtgttctacattgaagcctgtgagtctgggtccatgatgaaccacctgccggataacatcaatgtttatgcaactactgctgccaaccccagagagtcgtcctacgcctgttactatgatgagaagaggtccacgtacctgggggactggtacagcgtcaactggatggaagactcggacgtggaagatctgactaaagagaccctgcacaagcagtaccacctggtaaaatcgcacaccaacaccagccacgtcatgcagtatggaaacaaaacaatctccaccatgaaagtgatgcagtttcagggtatgaaacgcaaagccagttctcccgtccccctacctccagtcacacaccttgacctcacccccagccctgatgtgcctctcaccatcatgaaaaggaaactgatgaacaccaatgatctggaggagtccaggcagctcacggaggagatccagcggcatctggatgccaggcacctcattgagaagtcagtgcgtaagatcgtctccttgctggcagcgtccgaggctgaggtggagcagctcctgtccgagagagccccgctcacggggcacagctgctacccagaggccctgctgcacttccggacccactgcttcaactggcactcccccacgtacgagtatgcgttgagacatttgtacgtgctggtcaacctttgtgagaagccgtatccacttcacaggataaaattgtccatggaccacgtgtgccttggtcactactga

SEQ ID NO: 578 - DNA, 639 bp, Homo sapiens
atgaacattttccggctgactggggacctgtcccacctggcggccatcgtcatcctgctgctgaagatctggaagacgcgctcctgcgccggtatttctgggaaaagccagcttctgtttgcactggtcttcacaactcgttacctggatctttttacttcatttatttcattgtataacacatctatgaaggttatctaccttgcctgctcctatgccacagtgtacctgatctacctgaaatttaaggcaacctacgatggaaatcatgataccttccgagtggagtttctggtggtccctgtgggaggcctctcatttttagttaatcacgatttctctcctcttgagatcctctggaccttctccatctacctggagtccgtggctatccttccgcagctgtttatgatcagcaagactggggaggccgagaccatcaccacccactacctgttcttcctgggcctctatcgtgctttgtatcttgtcaactggatctggcgcttctactttgagggcttctttgacctcattgctgtggtggccggcgtagtccagaccatcctatactgtgacttcttctacttgtacattacaaaagtactcaagggaaagaagctcagtttgccagcataa

SEQ ID NO: 579 - DNA, 4101 bp, Homo sapiens
atgctcagctttgtggatacgcggactttgttgctgcttgcagtaaccttatgcctagcaacatgccaatctttacaagaggaaactgtaagaaagggcccagccggagatagaggaccacgtggagaaaggggtccaccaggccccccaggcagagatggtgaagatggtcccacaggccctcctggtccacctggtcctcctggcccccctggtctcggtgggaactttgctgctcagtatgatggaaaaggagttggacttggccctggaccaatgggcttaatgggacctagaggcccacctggtgcagctggagccccaggccctcaaggtttccaaggacctgctggtgagcctggtgaacctggtcaaactggtcctgcaggtgctcgtggtccagctggccctcctggcaaggctggtgaagatggtcaccctggaaaacccggacgacctggtgagagaggagttgttggaccacagggtgctcgtggtttccctggaactcctggacttcctggcttcaaaggcattaggggacacaatggtctggatggattgaagggacagcccggtgctcctggtgtgaagggtgaacctggtgcccctggtgaaaatggaactccaggtcaaacaggagcccgtgggcttcctggtgagagaggacgtgttggtgcccctggcccagctggtgcccgtggcagtgatggaagtgtgggtcccgtgggtcctgctggtcccattgggtctgctggccctccaggcttcccaggtgcccctggccccaagggtgaaattggagctgttggtaacgctggtcctgctggtcccgccggtccccgtggtgaagtgggtcttccaggcctctccggccccgttggacctcctggtaatcctggagcaaacggccttactggtgccaagggtgctgctggccttcccggcgttgctggggctcccggcctccctggaccccgcggtattcctggccctgttggtgctgccggtgctactggtgccagaggacttgttggtgagcctggtccagctggctccaaaggagagagcggtaacaagggtgagcccggctctgctgggccccaaggtcctcctggtcccagtggtgaagaaggaaagagaggccctaatggggaagctggatctgccggccctccaggacctcctgggctgagaggtagtcctggttctcgtggtcttcctggagctgatggcagagctggcgtcatgggccctcctggtagtcgtggtgcaagtggccctgctggagtccgaggacctaatggagatgctggtcgccctggggagcctggtctcatgggacccagaggtcttcctggttcccctggaaatatcggccccgctggaaaagaaggtcctgtcggcctccctggcatcgacggcaggcctggcccaattggcccagctggagcaagaggagagcctggcaacattggattccctggacccaaaggccccactggtgatcctggcaaaaacggtgataaaggtcatgctggtcttgctggtgctcggggtgctccaggtcctgatggaaacaatggtgctcagggacctcctggaccacagggtgttcaaggtggaaaaggtgaacagggtcccgctggtcctccaggcttccagggtctgcctggcccctcaggtcccgctggtgaagttggcaaaccaggagaaaggggtctccatggtgagtttggtctccctggtcctgctggtccaagaggggaacgcggtcccccaggtgagagtggtgctgccggtcctactggtcctattggaagccgaggtccttctggacccccagggcctgatggaaacaagggtgaacctggtgtggttggtgctgtgggcactgctggtccatctggtcctagtggactcccaggagagaggggtgctgctggcatacctggaggcaagggagaaaagggtgaacctggtctcagaggtgaaattggtaaccctggcagagatggtgctcgtggtgctcatggtgctgtaggtgcccctggtcctgctggagccacaggtgaccggggcgaagctggggctgctggtcctgctggtcctgctggtcctcggggaagccctggtgaacgtggcgaggtcggtcctgctggccccaacggatttgctggtccggctggtgctgctggtcaaccgggtgctaaaggagaaagaggagccaaagggcctaagggtgaaaacggtgttgttggtcccacaggccccgttggagctgctggcccagctggtccaaatggtccccccggtcctgctggaagtcgtggtgatggaggcccccctggtatgactggtttccctggtgctgctggacggactggtcccccaggaccctctggtatttctggccctcctggtccccctggtcctgctgggaaagaagggcttcgtggtcctcgtggtgaccaaggtccagttggccgaactggagaagtaggtgcagttggtccccctggcttcgctggtgagaagggtccctctggagaggctggtactgctggacctcctggcactccaggtcctcagggtcttcttggtgctcctggtattctgggtctccctggctcgagaggtgaacgtggtctacctggtgttgctggtgctgtgggtgaacctggtcctcttggcattgccggccctcctggggcccgtggtcctcctggtgctgtgggtagtcctggagtcaacggtgctcctggtgaagctggtcgtgatggcaaccctgggaacgatggtcccccaggtcgcgatggtcaacccggacacaagggagagcgcggttaccctggcaatattggtcccgttggtgctgcaggtgcacctggtcctcatggccccgtgggtcctgctggcaaacatggaaaccgtggtgaaactggtccttctggtcctgttggtcctgctggtgctgttggcccaagaggtcctagtggcccacaaggcattcgtggcgataagggagagcccggtgaaaaggggcccagaggtcttcctggcttaaagggacacaatggattgcaaggtctgcctggtatcgctggtcaccatggtgatcaaggtgctcctggctccgtgggtcctgctggtcctaggggccctgctggtccttctggccctgctggaaaagatggtcgcactggacatcctggtacggttggacctgctggcattcgaggccctcagggtcaccaaggccctgctggcccccctggtccccctggccctcctggacctccaggtgtaagcggtggtggttatgactttggttacgatggagacttctacagggctgaccagcctcgctcagcaccttctctcagacccaaggactatgaagttgatgctactctgaagtctctcaacaaccagattgagacccttcttactcctgaaggctctagaaagaacccagctcgcacatgccgtgacttgagactcagccacccagagtggagcagtggttactactggattgaccctaaccaaggatgcactatggatgctatcaaagtatactgtgatttctctactggcgaaacctgtatccgggcccaacctgaaaacatcccagccaagaactggtataggagctccaaggacaagaaacacgtctggctaggagaaactatcaatgctggcagccagtttgaatataatgtagaaggagtgacttccaaggaaatggctacccaacttgccttcatgcgcctgctggccaactatgcctctcagaacatcacctaccactgcaagaacagcattgcatacatggatgaggagactggcaacctgaaaaaggctgtcattctacagggctctaatgatgttgaacttgttgctgagggcaacagcaggttcacttacactgttcttgtagatggctgctctaaaaagacaaatgaatggggaaagacaatcattgaatacaaaacaaataagccatcacgcctgcccttccttgatattgcacctttggacatcggtggtgctgaccatgaattctttgtggacattggcccagtctgtttcaaataa

SEQ ID NO: 580 - DNA, 570 bp, Homo sapiens
atggcttccaaaagagctctggtcatcctggctaaaggagcagaggaaatggagacggtcatccctgtagatgtcatgaggcgagctgggattaaggtcaccgttgcaggcctggctggaaaagacccagtacagtgtagccgtgatgtggtcatttgtcctgatgccagccttgaagatgcaaaaaaagagggaccatatgatgtggtggttctaccaggaggtaatctgggtgcacagaatttatctgagtctgctgctgtgaaggagatactgaaggagcaggaaaaccggaagggcctgatagccgccatctgtgcaggtcctactgctctgttggctcatgaaataggttttggaagtaaagttacaacacaccctcttgctaaagacaaaatgatgaatggaggtcattacacctactctgagaatcgtgtggaaaaagacggcctgattcttacaagccgggggcctgggaccagcttcgagtttgcgcttgcaattgttgaagccctgaatggcaaggaggtggcggctcaagtgaaggctccacttgttcttaaagactag

SEQ ID NO: 581 - DNA, 348 bp, Homo sapiens
atgaacagcggcgtgtgcctgtgcgtgctgatggcggtactggcggctggcgccctgacgcagccggtgcctcccgcagatcccgcgggctccgggctgcagcgggcagaggaggcgccccgtaggcagctgagggtatcgcagagaacggatggcgagtcccgagcgcacctgggcgccctgctggcaagatacatccagcaggcccggaaagctccttctggacgaatgtccatcgttaagaacctgcagaacctggaccccagccacaggataagtgaccgggactacatgggctggatggattttggccgtcgcagtgccgaggagtatgagtacccctcctag

SEQ ID NO: 582 - DNA, 402 bp, Homo sapiens
atgaatcaaactgtccaaaccttcttctctcctgtcaacagcggccagccccccaactatgagatgctcaaggaggagcacgaggtggctgtgctgggggcgccccacaaccctgctcccccgacgtccaccgtgatccacatccgcagcgagacctccgtgcccgaccatgtcgtctggtccctgttcaacaccctcttcatgaacccctgctgcctgggcttcatagcattcgcctactccgtgaagtctagggacaggaagatggttggcgacgtgaccggggcccaggcctatgcctccaccgccaagtgcctgaacatctgggccctgattctgggcatcctcatgaccattctgctcatcgtcatcccagtgctgatcttccaggcctatggatag

SEQ ID NO: 583 - DNA, 834 bp, Homo sapiens
atgtccaagtctctgaagaagttggtggaggagagccgggagaagaaccagcccgaggtggacatgagtgaccggggcatctccaacatgctggatgtcaacggcctctttaccttatcccatatcacacaactggtcctcagccataacaagctaacaatggtgccaccgaacatcgcagaactgaagaatttggaggtgctcaacttttttaataaccaaatcgaggagctgcccacacagatcagtagccttcagaaactcaaacacctgaaccttggcatgaacaggctgaacactttgccacgaggcttcggctccctgccagctcttgaggttctggacttgacgtacaacaacttgagcgaaaattctcttcctggaaacttcttctacctgaccaccctgcgtgcactctatctaagtgacaacgattttgaaatcctgccgccagatattgggaagctcacaaagttgcagatactcagccttagggataacgacctgatctcgctgcctaaggaaatcggggagcttacccagcttaaagagctccacattcaggggaaccgcctcaccgttctgcccccagaactaggaaacttggatttaactggccagaagcaggtattcaaagcagagaacaatccctgggtgacccccattgcagaccagttccagcttggcgtgtcccatgtttttgagtatatccgttctgagacatacaaatacctctacggcagacacatgcaggccaacccagaaccaccgaagaagaataatgacaaatcgaaaaagatcagccggaaacccctggcagccaagaacagataa

SEQ ID NO: 584 - DNA, 1134 bp, Homo sapiens
atggactcggccctcagcgatccgcataacggcagtgccgaggcaggcggccccaccaacagcactacgcggccgccttccacgcccgagggcatcgcgctggcctacggcagcctcctgctcatggcgctgctgcccatcttcttcggcgccctgcgctccgtacgctgcgcccgcggcaagaatgcttcagacatgcctgaaacaatcaccagccgggatgccgcccgcttccccatcatcgccagctgcacactcttggggctctacctctttttcaaaatattctcccaggagtacatcaacctcctgctgtccatgtatttcttcgtgctgggaatcctggccctgtcccacaccatcagccccttcatgaataagttttttccagccagctttccaaatcgacagtaccagctgctcttcacacagggttctggggaaaacaaggaagagatcatcaattatgaatttgacaccaaggacctggtgtgcctgggcctgagcagcatcgttggcgtctggtacctgctgaggaagcactggattgccaacaacctttttggcctggccttctcccttaatggagtagagctcctgcacctcaacaatgtcagcactggctgcatcctgctgggcggactcttcatctacgatgtcttctgggtatttggcaccaatgtgatggtgacagtggccaagttcttcgaggcaccaataaaattggtgtttccccaggatctgctggagaaaggcctcgaagcaaacaactttgccatgctgggacttggagatgtcgtcattccagggatcttcattgccttgctgctgcgctttgacatcagcttgaagaagaatacccacacctacttctacaccagctttgcagcctacatcttcggcctgggccttaccatcttcatcatgcacatcttcaagcatgctcagcctgccctcctatacctggtccccgcctgcatcggttttcctgtcctggtggcgctggccaagggagaagtgacagagatgttcagttatgaggagtcaaatcctaaggatccagcggcagtgacagaatccaaagagggaacagaggcatcagcatcgaaggggctggagaagaaagagaaatga

SEQ ID NO: 585 - DNA, 2355 bp, Homo sapiens
ggcacgaggaagcgcacggcctcggcgaccctctccgacccggccgccgccgccatgcagccctccagccttctgccgctcgccctctgcctgctggctgcacccgcctccgcgctcgtcaggatcccgctgcacaagttcacgtccatccgccggaccatgtcggaggttgggggctctgtggaggacctgattgccaaaggccccgtctcaaagtactcccaggcggtgccagccgtgaccgaggggcccattcccgaggtgctcaagaactacatggacgcccagtactacggggagattggcatcgggacgcccccccagtgcttcacagtcgtcttcgacacgggctcctccaacctgtgggtcccctccatccactgcaaactgctggacatcgcttgctggatccaccacaagtacaacagcgacaagtccagcacctacgtgaagaatggtacctcgtttgacatccactatggctcgggcagcctctccgggtacctgagccaggacactgtgtcggtgccctgccagtcagcgtcgtcagcctctgccctgggcggtgtcaaagtggagaggcaggtctttggggaggccaccaagcagccaggcatcaccttcatcgcagccaagttcgatggcatcctgggcatggcctacccccgcatctccgtcaacaacgtgctgcccgtcttcgacaacctgatgcagcagaagctggtggaccagaacatcttctccttctacctgagcagggacccagatgcgcagcctgggggtgagctgatgctgggtggcacagactccaagtattacaagggttctctgtcctacctgaatgtcacccgcaaggcctactggcaggtccacctggaccaggtggaggtggccagcgggctgaccctgtgcaaggagggctgtgaggccattgtggacacaggcacttccctcatggtgggcccggtggatgaggtgcgcgagctgcagaaggccatcggggccgtgccgctgattcagggcgagtacatgatcccctgtgagaaggtgtccaccctgcccgcgatcacactgaagctgggaggcaaaggctacaagctgtccccagaggactacacgctcaaggtgtcgcaggccgggaagaccctctgcctgagcggcttcatgggcatggacatcccgccacccagcgggccactctggatcctgggcgacgtcttcatcggccgctactacactgtgtttgaccgtgacaacaacagggtgggcttcgccgaggctgcccgcctctagttcccaaggcgtccgcgcgccagcacagaaacagaggagagtcccagagcaggaggcccctggcccggcggcccctcccacacacacccacacactcgcccgcccactgtcctgggcgccctggaagccggcggcccaagcccgacttgctgttttgttctgtggttttcccctccctgggttcagaaatgctgcctgcctgtctgtctctccatctgtttggtgggggtagagctgatccagagcacagatctgtttcgtgcattggaagaccccacccaagcttggcagccgagctcgtgtatcctggggctcccttcatctccagggagtcccctccccggccctaccagcgcccgctgggctgagcccctaccccacaccaggccgtcctcccgggccctcccttggaaacctgccctgcctgagggcccctctgcccagcttgggcccagctgggctctgccaccctacctgttcagtgtcccgggcccgttgaggatgaggccgctagaggcctgaggatgagctggaaggagtgagaggggacaaaacccaccttgttggagcctgcagggtggtgctgggactgagccagtcccaggggcatgtattggcctggaggtggggttgggattgggggctggtgccagccttcctctgcagctgacctctgttgtcctccccttgggcggctgagagccccagctgacatggaaatacagttgttggcctccggcctccctctggaatagacacaatacctacacaactaactcacaaagagcgggggcgcttaagaaataccccccgcgggggccccaacgactagcgacgagaccaccgtatcttgtgacaagcagggggccacaaaagagccacgcattaagacgctagagcggcgcgggacgtcaaaaaacagccgagggggccaacgagcaccgagagacgtcggagagacacccaaatcggggcaggtagttgggcgacacccccagacaaagcgccgcgagaaaccagtcagtgggtgaaaaagaacatagcgaggaggtagaggtaaaa

SEQ ID NO: 586 - DNA, 762 bp, Homo sapiens
atgatgatgaagatcccatggggcagcatcccagtactgatgttgctcctgctcctgggcctaatcgatatctcccaggcccagctcagctgcaccgggcccccagccatccctggcatcccgggtatccctgggacacctggccccgatggccaacctgggaccccagggataaaaggagagaaagggcttccagggctggctggagaccatggtgagttcggagagaagggagacccagggattcctgggaatccaggaaaagtcggccccaagggccccatgggccctaaaggtggcccaggggcccctggagccccaggccccaaaggtgaatcgggagactacaaggccacccagaaaatcgccttctctgccacaagaaccatcaacgtccccctgcgccgggaccagaccatccgcttcgaccacgtgatcaccaacatgaacaacaattatgagccccgcagtggcaagttcacctgcaaggtgcccggtctctactacttcacctaccacgccagctctcgagggaacctgtgcgtgaacctcatgcgtggccgggagcgtgcacagaaggtggtcaccttctgtgactatgcctacaacaccttccaggtcaccaccggtggcatggtcctcaagctggagcagggggagaacgtcttcctgcaggccaccgacaagaactcactactgggcatggagggtgccaacagcatcttttccgggttcctgctctttccagatatggaggcctga

SEQ ID NO: 587 - DNA, 582 bp, Homo sapiens
atggctgcaatccgaaagaagctggtgatcgttggggatggtgcctgtgggaagacctgcctcctcatcgtcttcagcaaggatcagtttccggaggtctacgtccctactgtctttgagaactatattgcggacattgaggtggacggcaagcaggtggagctggctctgtgggacacagcagggcaggaagactatgatcgactgcggcctctctcctacccggacactgatgtcatcctcatgtgcttctccatcgacagccctgacagcctggaaaacattcctgagaagtggaccccagaggtgaagcacttctgccccaacgtgcccatcatcctggtggggaataagaaggacctgaggcaagacgagcacaccaggagagagctggccaagatgaagcaggagcccgttcggtctgaggaaggccgggacatggcgaaccggatcagtgcctttggctaccttgagtgctcagccaagaccaaggagggagtgcgggaggtgtttgagatggccactcgggctggcctccaggtccgcaagaacaagcgtcggaggggctgtcccattctctga

SEQ ID NO: 588 - DNA, 606 bp, Homo sapiens
atgactgaaaaagccccagagccacatgtggaggaggatgacgatgatgagctggacagcaagctcaattataagcctccaccacagaagtccctgaaagagctgcaggaaatggacaaagatgatgagagtctaattaagtacaagaaaacgctgctgggagatggtcctgtggtgacagatccgaaagcccccaatgtcgttgtcacccggctcaccctggtttgtgagagtgccccgggaccaatcaccatggaccttactggagatctggaagccctcaaaaaggaaaccattgtgttaaaggaaggttctgaatatagagtcaaaattcacttcaaagtgaacagggatattgtgtcaggcctgaaatacgttcagcacacctacaggactggggtgaaagtggataaagcaacatttatggttggcagctatggacctcggcctgaggagtatgagttcctcactccagttgaggaggctcccaagggcatgctggcccgaggcacgtaccacaacaagtccttcttcaccgacgatgacaagcaagaccacctcagctgggagtggaacctgtcgattaagaaggagtggacagaatga

SEQ ID NO: 589 - DNA, 657 bp, Homo sapiens
atggctgagctggatccgttcggcgcccctgccggcgcccctggcggtcccgcgctggggaacggagtggccggcgccggcgaagaagacccggctgcggccttcttggcgcagcaagagagcgagattgcgggcatcgagaacgacgaggccttcgccatcctggacggcggcgcccccgggccccagccgcacggcgagccgccggggggtccggatgctgttgatggagtaatgaatggtgaatactaccaggaaagtaatggtccaacagacagttatgcagctatttcacaagtggatcgattgcagtcagagcctgaaagtatccgtaaatggagagaagaacaaatggaacgcttggaagcccttgatgccaattctcggaagcaagaagcagagtggaaagaaaaggcaataaaggagctagaagaatggtatgcaagacaggacgagcagctacagaaaacaaaagcaaacaacagggcagcagaagaagcctttgtaaatgacattgacgagtcgtccccaggcactgagtgggaacgggtggcccggctgtgtgactttaaccccaagtctagcaagcaggccaaagatgtctcccgcatgcgctcagtcctcatctccctcaagcaggccccgctggtgcactga

SEQ ID NO: 590 - DNA, 336 bp, Homo sapiens
atgagttggcgaggaagatcaacatataggcctaggccaagaagaagtttacagcctcctgagctgattggggctatgcttgaacccactgatgaagagcctaaagaagagaaaccacccactaaaagtcggaatcctacacctgatcagaagagagaagatgatcagggtgcagctgagattcaagtgcctgacctggaagccgatctccaggagctatgtcagacaaagactggggatggatgtgaaggtggtactgatgtcaaggggaagattctaccaaaagcagagcattttaaaatgccagaagcaggtgaagggaaatcacaggtttaa

SEQ ID NO: 591 - DNA, 648 bp, Homo sapiens
atgggcaaaggagatcctaagaagccgagaggcaaaatgtcatcatatgcattttttgtgcaaacttgtcgggaggagcataagaagaagcacccagatgcttcagtcaacttctcagagttttctaagaagtgctcagagaggtggaagaccatgtctgctaaagagaaaggaaaatttgaagatatggcaaaagcggacaaggcccgttatgaaagagaaatgaaaacctatatccctcccaaaggggagacaaaaaagaagttcaaggatcccaatgcacccaagaggcctccttcggccttcttcctcttctgctctgagtatcgcccaaaaatcaaaggagaacatcctggcctgtccattggtgatgttgcgaagaaactgggagagatgtggaataacactgctgcagatgacaagcagccttatgaaaagaaggctgcgaagctgaaggaaaaatacgaaaaggatattgctgcatatcgagctaaaggaaagcctgatgcagcaaaaaagggagttgtcaaggctgaaaaaagcaagaaaaagaaggaagaggaggaagatgaggaagatgaagaggatgaggaggaggaggaagatgaagaagatgaagatgaagaagaagatgatgatgatgaataa

SEQ ID NO: 592 - DNA, 3378 bp, Homo sapiens
atggcatctgaagaagcatctctcagggcattggaaagtctgatgacagaattttttcacgattgtacaaccaatgaaagaaaacgtgagatagaggagcttcttaataactttgcccagcaaataggagcctggagattctgcctgtactttctctccagcactaggaatgactatgtaatgatgtacagtttaacagtttttgagaatctgatcaataaaatgtggcttggggtcccatctcaggataagatggaaatccgtagctgtctgcccaaactccttttggctcaccataaaaccttaccttactttatccggaacaagctctgcaaagttattgttgatattggacgtcaggattggcccatgttctaccacgacttttttactaacattttacagttgatccagtcccctgtgacaaccccccttgggctgatcatgttgaagacaacttcagaagagctggcttgtccccgtgaggacctcagtgtggctcggaaggaggagttgcggaagctgctactggaccaggtgcagacagtgcttgggctactgacaggtatcttggagactgtctgggacaaacacagtgttactgctgccactccaccaccatccccgacctcaggagaaagtggtgacttactgagtaacctgttgcagagtcccagttcagccaaactgttgaatcagccaattcccatccttgatgtggagagtgagtatatctgttccctggctttggagtgcctggcccatctcttcagttggattcctctgtctgccagcatcaccccatccctccttaccaccatcttccactttgcacgatttggctgtgacatccgggccagaaagatggcgtcagttaacggcagcagccagaactgtgtctcgggtcaggagcgcggccggctgggggtcctggccatgtcctgcatcaatgaactcatgtccaagaactgtgtgcctatggaatttgaggagtatttactgcgtatgttccagcagactttctacctcctgcagaaaatcaccaaggataacaatgcccacacagtgaagagcaggctagaagagctcgatgagagctatatcgagaagtttactgactttcttcggctctttgtgagtgttcacctaagaagaatcgagtcttactcccagttccctgtggtggagtttttgacacttttgttcaagtacacatttcatcagcctactcatgaaggttacttctcttgtttggatatctggacgctgtttttggactatctgacaagtaaaattaaaagtcgtcttggagacaaggaagcagttctcaacaggtacgaagatgccctggtgctcctgctcacagaggtgttgaatcgaatccagttcagatacaaccaagcccagctggaggagttggatgatgagactctggatgatgatcagcagacggagtggcagcggtacttacggcagagcttggaggtggtggccaaagtgatggagctcctgcccacgcacgccttctccacactgttccctgttcttcaggacaatttagaagtttatttgggattacaacagtttatagtcacttcagggtcaggacacaggttgaacatcacggcggagaacgactgccggcggctgcactgctccctgagagacttgagctccctgctgcaggccgtgggccgcctggccgagtactttatcggggatgtgtttgctgcacggttcaatgatgccctcacagtcgtggaaaggttggtcaaagtcactctgtacggatctcagataaaattgtacaacattgaaactgctgtgccatcagtattgaaacctgacctcattgatgtgcatgctcagtccctggctgcgctgcaggcttactctcactggttagcacagtattgcagtgaagttcaccggcagaacacgcagcagttcgtgacactcatctctactaccatggatgcaatcacacctctaatcagcaccaaggtccaagacaagctgctgctatctgcgtgccacttactggtctcactggccaccaccgtgcggcccgtctttctgatcagcatccctgcagtgcagaaagtattcaacagaatcactgatgcctctgccctgcgacttgtcgataaggcccaggtgttggtgtgccgagccctctctaacatcttgctgcttccgtggccaaaccttccagagaatgagcagcagtggcccgtgcgctccatcaaccacgccagcctcatctctgcactctcccgggactatcgcaacctgaagcccagtgctgttgccccacagagaaagatgccactggatgacaccaaactgattatccaccagacactcagcgtcttagaagatattgtggagaatatctcgggggagtccaccaagtctcgacagatttgctaccagtcgctgcaggaatctgttcaggtctccctggccctctttccagcttttatccatcagtcagatgtgactgatgagatgctgagcttcttcctcactctgtttcgaggccttagagtacagatgggtgtgcctttcactgagcaaatcatacagactttcctcaacatgtttaccagagagcagttagccgagagcatcctccacgagggcagcacaggctgccgggtggtggagaagtttctgaagatcctgcaggtggtggtccaggagccaggccaggtgttcaagcccttcctccccagcatcatcgccctgtgcatggagcaagtgtatcccatcattgccgagcgtccctcccctgatgtgaaggccgagctgtttgagctccttttccggacgctccatcacaactggaggtacttcttcaagtccaccgtgctggccagtgtccagagggggatcgctgaggagcagatggagaatgagccccagttcagtgccatcatgcaggctttcggacagtcctttctccagcccgacatccacctttttaaacaaaatctcttctacttggagactctcaacaccaagcagaagctgtaccacaagaagatcttccggactgccatgctgttccagtttgtgaacgtgctgctccaggtcctggtccacaagtcccatgatcttctgcaggaggagattggcatcgccatctacaacatggcctcagtcgactttgatggcttctttgccgccttcctcccagagttcctgaccagctgtgatggtgtggatgccaaccagaaaagtgtgctggggcggaatttcaagatggatcgggacctgccctcattcacccagaatgtgcacaggctggtcaacgacctgcgctactacagactctgcaacgacagcctgccccctggcactgtgaagctctag

SEQ ID NO: 593 - DNA, 759 bp, Homo sapiens
atgagagccccgctgctaccgccggcgccggtggtgctgtcgctcttgatactcggctcaggccattatgctgctggattggacctcaatgacacctactctgggaagcgtgaaccattttctggggaccacagtgctgatggatttgaggttacctcaagaagtgagatgtcttcagggagtgagatttcccctgtgagtgaaatgccttctagtagtgaaccgtcctcgggagccgactatgactactcagaagagtatgataacgaaccacaaatacctggctatattgtcgatgattcagtcagagttgaacaggtagttaagcccccccaaaacaagacggaaagtgaaaatacttcagataaacccaaaagaaagaaaaagggaggcaaaaatggaaaaaatagaagaaacagaaagaagaaaaatccatgtaatgcagaatttcaaaatttctgcattcacggagaatgcaaatatatagagcacctggaagcagtaacatgcaaatgtcagcaagaatatttcggtgaacggtgtggggaaaagtccatgaaaactcacagcatgattgacagtagtttatcaaaaattgcattagcagccatagctgcctttatgtctgctgtgatcctcacagctgttgctgttattacagtccagcttagaagacaatacgtcaggaaatatgaaggagaagctgaggaacgaaagaaacttcgacaagagaatggaaatgtacatgctatagcataa

SEQ ID NO: 594 - DNA, 297 bp, Homo sapiens
atgacgggctttctgctgccgcccgcaagcagagggactcggagatcatgcagcagaagcagaaaaaggcaaacgagaagaaggaggaacccaagtagctttgtggcttcgtgtccaaccctcttgcccttcgcctgtgtgcctggagccagtcccaccacgctcgcgtttcctcctgtagtgctcacaggtcccagcaccgatggcattccctttgccctgagtctgcagcgggtcccttttgtgcttccttcccctcaggtagcctctctccccctgggccactcccgggggtga

SEQ ID NO: 595 - DNA, 1101 bp, Homo sapiens
atggcagcagcacggcacagcacgctcgacttcatgctcggcgccaaagctgatggtgagaccattctaaaaggcctccagtccattttccaggagcaggggatggcggagtcggtgcacacctggcaggaccatggctatttagcaacctacacaaacaagaacggcagctttgccaatttgagaatttacccacatggattggtgttgctggaccttcagagttatgatggtgatgcgcaaggcaaagaagagatcgacagtattttgaacaaagtagaggaaagaatgaaagaattgagtcaggacagtactgggcgggtgaaacgattaccacccatagtgcgaggaggagccatcgacagatactggcccaccgccgacgggcgcctggttgaatatgacatagatgaagtggtatatgacgaagattcaccttatcaaaatataaaaattctacactcgaagcagtttggaaatattctcatccttagtggggatgttaatttggcagagagtgatttggcatatacccgggccatcatgggcagtggcaaagaagattacactggcaaagatgtactcattctgggaggtggagacggaggcatattgtgtgaaatagtcaaactaaaaccaaagatggtcactatggtagagattgaccaaatggtgattgatgggtgtaagaaatacatgcgaaaaacgtgtggcgatgtcttagacaatcttaaaggagactgctatcaggttctaatagaagactgtatcccggtactgaagaggtacgccaaagaagggagagaatttgattatgtgattaatgatttgacagctgttccaatctccacgtctccagaagaagattccacatgggagtttctcagactgattcttgacctctcaatgaaagtgttgaaacaggatgggaaatattttacacaggggaactgtgtcaatctgacagaagcactgtcgctctatgaagaacagctggggcgcctgtattgtcctgtggaattttcaaaggagatcgtctgtgtcccttcatacttggaattgtgggtattttacactgtttggaagaaagctaaaccctga

SEQ ID NO: 596 - DNA, 2139 bp, Homo sapiens
gcgagtcctcagggcgcccgggagccaccagtctgctctcgggctctactcagactagcgccaacagtctccgcggacagactcgcatcagccgccctggggctcggcctcctcccataggctcctcttcctctctttcattcaagtcttcaaactttgaaaaaaatatgagcttttgccaaataagacgggatagtttatggagttttctgaggcgcattgaactctggtcagcccctcgagcgtgggctcggccatcagcaggcccggtgggttggccgggctggccctcccaggctgcctttctctctggtcgcggcctggcccgccccggcctccaccgccgcaattcatgctggtgccgcacccgcagccccactcctggtatgcctgagattctccaggggccaagccggtcctccttcccggcccactcttccagggccaggacgctcccgcggagccagcccatcgtggctgggggtcccaggggctggaggcctgcctggttagcctctgtttcccagacattgactcgaggcgcctccagtcctctcaaccccctgactttcaagtcctttcaagtccttgtgccctgaccaagttatgaggaaaagagggctgagggcctggaggtgggctcgcaccccctcgaacccacctagatgtctcctcctccccagcctatgagttcagacttggggggctccatctgtccctccctgaggtccctcatcttgtccctgctctgattctgtcagcagatcctgaacactccttggtggggacccatgcctccaaggctgcccccaatgccagctgtcctggggaaactccccagaactctcggggaaaggcccgagaaccttcggaggaagcctccgggactcctcgccacctgctctgtttctctcccggccccactgccttcaggtatcaggaagagggcaggcccctgtgccccctctccccttcccagggcggccaacaatactccaccatggggcgcttcctttcttctctggaaactaagacattggactgaaggaactggcctgaggggggctgaccgggggcccgtgctgctgggagctctacgcacaagaggccgccggggtcacggacaggaacctcagcccagggtgctggcctttctccttcgcaggagtcccccaaaatccacacagcgactcgagcagccttccactcagccagaggagggtcgggctcccccgcctgctctcggtggtggcgtctggcccttcctgccgtttccaaggcctccggaagcaccaacccagttctcagttacctcctctggccggaaggcctcacgttgtcctccagagctgctctgggcccagggctggctccgtgaccacctgatggacgtgctgggcagcatgggctcccaaggcagcatccccagctgctctcccaccccaccccagctgcccggcggctgggcccacgagggctctggggacacttccataggaaaggggcctggcactttgtgattgccacgtgtttcctgttaagccgcctgcccccagtgcaaatctctgtgttttgctctctcctgaacaaaaatgtaaaccgacgccggaaagcaaatggtatcgaatacctttcttgcccataagggtttttacaaagaacgtgtctcactaggaactaggacactcatcggcccgagaccaactcctggataaaaggaataaggagaatcgtgtttgtaacgagttacaggattgtttctttcctggattttaaacttttgttaaattgtgaaattatggaggagttttatagaaaaaaaaagtgaaataaagtcagatgggaaagcaacaaaaaaaggggggggtttaagttccggagggccaagctaagcggcccccgctctggctaagaggggcgctccaacagagggacaataaacagacccggccgacggtacacaacgggaggccaaccggcacacggcactgtgagaaacccatcgggggggacacgggcaacaaggacgaaacgagaacaagaggagctgatgacacacagatgagcactggggagaatagacagacaagacacagcagcgcacaggcaagcagcaacgaacgacgaaacgcacaccag

SEQ ID NO: 597 - DNA, 918 bp, Homo sapiens
atgtggcccctggtagcggcgctgttgctgggctcggcgtgctgcggatcagctcagctactatttaataaaacaaaatctgtagaattcacgttttgtaatgacactgtcgtcattccatgctttgttactaatatggaggcacaaaacactactgaagtatacgtaaagtggaaatttaaaggaagagatatttacacctttgatggagctctaaacaagtccactgtccccactgactttagtagtgcaaaaattgaagtctcacaattactaaaaggagatgcctctttgaagatggataagagtgatgctgtctcacacacaggaaactacacttgtgaagtaacagaattaaccagagaaggtgaaacgatcatcgagctaaaatatcgtgttgtttcatggttttctccaaatgaaaatattcttattgttattttcccaatttttgctatactcctgttctggggacagtttggtattaaaacacttaaatatagatccggtggtatggatgagaaaacaattgctttacttgttgctggactagtgatcactgtcattgtcattgttggagccattcttttcgtcccaggtgaatattcattaaagaatgctactggccttggtttaattgtgacttctacagggatattaatattacttcactactatgtgtttagtacagcgattggattaacctccttcgtcattgccatattggttattcaggtgatagcctatatcctcgctgtggttggactgagtctctgtattgcggcgtgtataccaatgcatggccctcttctgatttcaggtttgagtatcttagctctagcacaattacttggactagtttatatgaaatttgtggcttccaatcagaagactatacaacctcctaggaataactga

SEQ ID NO: 598 - DNA, 459 bp, Homo sapiens
atgatgagtccagggctcctgctgaagccctggtggggaggggcacagagcgagatggggcgtaatggaatgcttgaaggctgctccgtgatgtcggtcggagcttccagactaggcgagggcagggtgaggcctcgggcacacagccggcgcccagtcacccggcccagatggagggcggccgggccctgcacaggcacttgccaaggtggctcacactcacgcacactcgtactgagactcaaggccgtctccacaactccaaccagtgcaaatgacttagtgcaaattaaattcagaagggacgggggaaacagagtcgtggaggctttgaatctctcagaaaaaaggaaagacaggaaagctcagaaacaaagagacagaaggatgaaaaagaagaagagggatatggtcgttatctcgatctccatgactgttacctcaagtacattaacctga

SEQ ID NO: 599 - DNA, 378 bp, Homo sapiens
atgccccgctacgagctggctttaatcctgaaagccatgcagcggccagagactgctgctactttgaaacgtacgatagaggccctgatggacagaggagcaatagtgagggacttggaaaacctgggtgaacgagcgcttccttataggatctctgcccacagtcagcagcacaacagaggcgggtatttcttggtggatttttatgcacccaccgcagctgttgaaagcatggtggagcacttgtctcgagatatagatgtgattagagggaatattgtcaaacaccctctgacccaggaactaaaagaatgtgaagggattgtcccagtcccactcgcagaaaaattatattccacaaagaagaggaagaagtga

SEQ ID NO: 600 - DNA, 522 bp, Homo sapiens
atggcggcgcccagcggagggtggaacggcgtcggcgcgagcttgtgggccgcgctgctcctaggggccgtggcgctgaggccggcggaggcggtgtccgagcccacgacggtggcgtttgacgtgcggcccggcggcgtcgtgcattccttctcccataacgtgggcccgggggacaaatatacgtgtatgttcacttacgcctctcaaggagggaccaatgagcaatggcagatgagtctggggaccagcgaagaccaccagcacttcacctgcaccatctggaggccccaggggaagtcctatctgtacttcacacagttcaaggcagaggtgcggggcgctgagattgagtacgccatggcctactctaaagccgcatttgaaagggaaagtgatgtccctctgaaaactgaggaatttgaagtgaccaaaacagcagtggctcacaggcccggggcattcaaagctgagctgtccaagctggtgattgtggccaaggcatcgcgcactgagctgtga

SEQ ID NO: 601 - DNA, 477 bp, Homo sapiens
atggcggacattcagactgagcgtgcctaccaaaagcagccgaccatctttcaaaacaagaagagggtcctgctgggagaaactggcaaggagaagctcccgcggtactacaagaacatcggtctgggcttcaagacacccaaggaggctattgagggcacctacattgacaagaaatgccccttcactggtaatgtgtccattcgagggcggatcctctctggcgtggtgaccaagatgaagatgcagaggaccattgtcatccgccgagactatctgcactacatccgcaagtacaaccgcttcgagaagcgccacaagaacatgtctgtacacctgtccccctgcttcagggacgtccagatcggtgacatcgtcacagtgggcgagtgccggcctctgagcaagacagtgcgcttcaacgtgctcaaggtcaccaaggctgccggcaccaagaagcagttccagaagttctga

SEQ ID NO: 602 - DNA, 618 bp, Homo sapiens
atgtccagcatgaatcccgaatatgattatttattcaagttacttctgattggcgactcaggggttggaaagtcttgccttcttcttaggtttgcagatgatacatatacagaaagctacatcagcacaattggtgtggatttcaaaataagaactatagagttagacgggaaaacaatcaagcttcaaatatgggacacagcaggccaggaaagatttcgaacaatcacctccagttattacagaggagcccatggcatcatagttgtgtatgatgtgacagatcaggagtccttcaataatgttaaacagtggctgcaggaaatagatcgttatgccagtgaaaatgtcaacaaattgttggtagggaacaaatgtgatctgaccacaaagaaagtagtagactacacaacagcgaaggaatttgctgattcccttggaattccgtttttggaaaccagtgctaagaatgcaacgaatgtagaacagtctttcatgacgatggcagctgagattaaaaagcgaatgggtcccggagcaacagctggtggtgctgagaagtccaatgttaaaattcagagcactccagtcaagcagtcaggtggaggttgctgctaa

SEQ ID NO: 603 - DNA, 774 bp, Homo sapiens
atggctcagcggatgacaacacagctgctgctccttctagtgtgggtggctgtagtaggggaggctcagacaaggattgcatgggccaggactgagcttctcaatgtctgcatgaacgccaagcaccacaaggaaaagccaggccccgaggacaagttgcatgagcagtgtcgaccctggaggaagaatgcctgctgttctaccaacaccagccaggaagcccataaggatgtttcctacctatatagattcaactggaaccactgtggagagatggcacctgcctgcaaacggcatttcatccaggacacctgcctctacgagtgctcccccaacttggggccctggatccagcaggtggatcagagctggcgcaaagagcgggtactgaacgtgcccctgtgcaaagaggactgtgagcaatggtgggaagattgtcgcacctcctacacctgcaagagcaactggcacaagggctggaactggacttcagggtttaacaagtgcgcagtgggagctgcctgccaacctttccatttctacttccccacacccactgttctgtgcaatgaaatctggactcactcctacaaggtcagcaactacagccgagggagtggccgctgcatccagatgtggttcgacccagcccagggcaaccccaatgaggaggtggcgaggttctatgctgcagccatgagtggggctgggccctgggcagcctggcctttcctgcttagcctggccctaatgctgctgtggctgctcagctga

SEQ ID NO: 604 - DNA, 1623 bp, Homo sapiens
atggggaccacagccagagcagccttggtcttgacctatttggctgttgcttctgctgcctctgagggaggcttcacggctacaggacagaggcagctgaggccagagcactttcaagaagttggctacgcagctcccccctccccacccctatcccgaagcctccccatggatcaccctgactcctctcagcatggccctccctttgagggacagagtcaagtgcagccccctccctctcaggaggccacccctctccaacaggaaaagctgctacctgcccaactccctgctgaaaaggaagtgggtccccctctccctcaggaagctgtccccctccaaaaagagctgccctctctccagcaccccaatgaacagaaggaaggaacgccagctccatttggggaccagagccatccagaacctgagtcctggaatgcagcccagcactgccaacaggaccggtcccaagggggctggggccaccggctggatggcttcccccctgggcggccttctccagacaatctgaaccaaatctgccttcctaaccgtcagcatgtggtatatggtccctggaacctaccacagtccagctactcccacctcactcgccagggtgagaccctcaatttcctggagattggatattcccgctgctgccactgccgcagccacacaaaccgcctagagtgtgccaaacttgtgtgggaggaagcaatgagccgattctgtgaggccgagttctcggtcaagacccgaccccactggtgctgcacgcggcagggggaggctcggttctcctgcttccaggaggaagctccccagccacactaccagctccgggcctgccccagccatcagcctgatatttcctcgggtcttgagctgcctttccctcctggggtgcccacattggacaatatcaagaacatctgccacctgaggcgcttccgctctgtgccacgcaacctgccagctactgaccccctacaaagggagctgctggcactgatccagctggagagggagttccagcgctgctgccgccaggggaacaatcacacctgtacatggaaggcctgggaggatacccttgacaaatactgtgaccgggagtatgctgtgaagacccaccaccacttgtgttgccgccaccctcccagccctactcgggatgagtgctttgcccgtcgggctccttaccccaactatgaccgggacatcttgaccattgacatcagtcgagtcacccccaacctcatgggccacctctgtggaaaccaaagagttctcaccaagcataaacatattcctgggctgatccacaacatgactgcccgctgctgtgacctgccatttccagaacaggcctgctgtgcagaggaggagaaattaaccttcatcaatgatctgtgtggtccccgacgtaacatctggcgagaccctgccctctgctgttacctgagtcctggggatgaacaggtcaactgcttcaacatcaattatctgaggaacgtggctctagtgtctggagacactgagaacgccaagggccagggggagcagggctcaactggaggaacaaatatcagctccacctctgagcccaaggaagaatga

SEQ ID NO: 605 - DNA, 309 bp, Homo sapiens
atgagtgcacgagtgagatcaagatccagaggaagaggagatggtcaggaggctcccgatgtggttgcattcgtggctcccggtgaatctcagcaagaggaaccaccaactgacaatcaggatattgaacctggacaagagagagaaggaacacctccgatcgaagaacgtaaagtagaaggtgattgccaggaaatggatctggaaaagactcggagtgagcgtggagatggctctgatgtaaaagagaagactccacctaatcctaagcatgctaagactaaagaagcaggagatgggcagccataa

SEQ ID NO: 606 - DNA, 1503 bp, Homo sapiens
atggcctccaggctgaccctgctgaccctcctgctgctgctgctggctggggatagagcctcctcaaatccaaatgctaccagctccagctcccaggatccagagagtttgcaagacagaggcgaagggaaggtcgcaacaacagttatctccaagatgctattcgttgaacccatcctggaggtttccagcttgccgacaaccaactcaacaaccaattcagccaccaaaataacagctaataccactgatgaacccaccacacaacccaccacagagcccaccacccaacccaccatccaacccacccaaccaactacccagctcccaacagattctcctacccagcccactactgggtccttctgcccaggacctgttactctctgctctgacttggagagtcattcaacagaggccgtgttgggggatgctttggtagatttctccctgaagctctaccacgccttctcagcaatgaagaaggtggagaccaacatggccttttccccattcagcatcgccagcctccttacccaggtcctgctcggggctggggagaacaccaaaacaaacctggagagcatcctctcttaccccaaggacttcacctgtgtccaccaggccctgaagggcttcacgaccaaaggtgtcacctcagtctctcagatcttccacagcccagacctggccataagggacacctttgtgaatgcctctcggaccctgtacagcagcagccccagagtcctaagcaacaacagtgacgccaacttggagctcatcaacacctgggtggccaagaacaccaacaacaagatcagccggctgctagacagtctgccctccgatacccgccttgtcctcctcaatgctatctacctgagtgccaagtggaagacaacatttgatcccaagaaaaccagaatggaaccctttcacttcaaaaactcagttataaaagtgcccatgatgaatagcaagaagtaccctgtggcccatttcattgaccaaactttgaaagccaaggtggggcagctgcagctctcccacaatctgagtttggtgatcctggtaccccagaacctgaaacatcgtcttgaagacatggaacaggctctcagcccttctgttttcaaggccatcatggagaaactggagatgtccaagttccagcccactctcctaacactaccccgcatcaaagtgacgaccagccaggatatgctctcaatcatggagaaattggaattcttcgatttttcttatgaccttaacctgtgtgggctgacagaggacccagatcttcaggtttctgcgatgcagcaccagacagtgctggaactgacagagactggggtggaggcggctgcagcctccgccatctctgtggcccgcaccctgctggtctttgaagtgcagcagcccttcctcttcatgctctgggaccagcagcacaagttccctgtcttcatggggcgagtatatgaccccagggcctga

SEQ ID NO: 607 - DNA, 1151 bp, Homo sapiens
atgaccccaatacgcaaaattaaccccctaataaaattaattaaccactcattcatcgacctccccaccccatccaacatctccgcatgatgaaacttcggctcactccttggcgcctgcctgatcctccaaatcaccacaggactattcctagccatgcactactcaccagacgcctcaaccgccttttcatcaatcgcccacatcactcgagacgtaaattatggctgaatcatccgctaccttcacgccaatggcgcctcaatattctttatctgcctcttcctacacatcgggcgaggcctatattacggatcatttctctactcagaaacctgaaacatcggcattatcctcctgcttgcaactatagcaacagccttcataggctatgtcctcccgtgaggccaaatatcattctgaggggccacagtaattacaaacttactatccgccatcccatacattgggacagacctagttcaatgaatctgaggaggctactcagtagacagtcccaccctcacacgattctttacctttcacttcatcttgcccttcattattgcagccctagcagcactccacctcctattcttgcacgaaacgggatcaaacaaccccctaggaatcacctcccattccgataaaatcaccttccacccttactacacaatcaaagacgccctcggcttacttctcttccttctctccttaatgacattaacactattctcaccagacctcctaggcgacccagacaattataccctagccaaccccttaaacacccctccccacatcaagcccgaatgatatttcctattcgcctacacaattctccgatccgtccctaacaaactaggaggcgtccttgccctattactatccatcctcatcctagcaataatccccatcctccatatatccaaacaacaaagcataatatttcgcccactaagccaatcactttattgactcctagccgcagacctcctcattctaacctgaatcggaggacaaccagtaagctacccttttaccatcattggacaagtagcatccgtactatacttcacaacaatcctaatcctaataccaactatctccctaattgaaaacaaaatactcaaatgggcctaaaaaaaaaa

SEQ ID NO: 608 - DNA, 408 bp, Homo sapiens
atggccgccctcagaccccttgtgaagcccaagatcgtcaaaaagagaaccaagaagttcatccggcaccagtcagaccgatatgtcaaaattaagcgtaactggcggaaacccagaggcattgacaacagggttcgtagaagattcaagggccagatcttgatgcccaacattggttatggaagcaacaaaaaaacaaagcacatgctgcccagtggcttccggaagttcctggtccacaacgtcaaggagctggaagtgctgctgatgtgcaacaaatcttactgtgccgagatcgctcacaatgtttcctccaagaaccgcaaagccatcgtggaaagagctgcccaactggccatcagagtcaccaaccccaatgccaggctgcgcagtgaagaaaatgagtag

SEQ ID NO: 609 - DNA, 342 bp, Homo sapiens
atgaccccgggggtcgtccatgccagtccgcctcagtcgcagagggtccctcggcaagcgccctgtgagtgggccattcggaacattggacagaagcccaaagagccaaattgtcacaattgtggaacccacattggcctgagatccaaaacgcttcgaggcaccccaaattacctgcccattcgtcaggacacccacccacccagtgttatattctgcctcgccggagtgggtgttcccgggggcacttgccgaccagccccttgcgtccccaggtttgcagctctcccctgggccactaaccatcctggcccgggctgcctgtctgacctccgtgcctag

SEQ ID NO: 610 - DNA, 987 bp, Homo sapiens
atggcggcggggatagtggcttctcgcagactccgcgacctactgacccggcgactgacaggctccaactacccgggactcagtattagccttcgcctcactggctcctctgcacaagaggaggcttccggagtagccctcggtgaagccccagaccacagctatgagtcccttcgtgtgacgtctgcgcagaaacatgttctgcatgtccagctcaaccggcccaacaagaggaatgccatgaacaaggtcttctggagagagatggtagagtgcttcaacaagatttcgagagacgctgactgtcgggcggtggtgatctctggtgcaggaaaaatgttcactgcaggtattgacctgatggacatggcttcagacatcctgcagcccaaaggagatgatgtggcccggatcagctggtacctccgtgacatcatcactcgataccaggagaccttcaacgtcatcgagaggtgccccaagcccgtgattgctgccgtccatgggggctgcattggcggaggtgtggaccttgtcaccgcctgtgacatccggtactgtgcccaggatgctttcttccaggtgaaggaggtggacgtgggtttggctgccgatgtaggaacactgcagcgcctgcccaaggtcatcgggaaccagagcctggtcaacgagctggccttcaccgcccgcaagatgatggctgacgaggccctgggcagtgggctggtcagccgggtgttcccagacaaagaggtcatgctggatgctgccttagcgctggcggccgagatttccagcaagagccccgtggcggtgcagagcaccaaggtcaacctgctgtattcccgcgaccattcggtggccgagagcctcaactacgtggcgtcctggaacatgagcatgctgcagacccaagacctcgtgaagtcggtccaggccacgactgagaacaaggaactgaaaaccgtcaccttctccaagctctga

SEQ ID NO: 611 - DNA, 1299 bp, Homo sapiens
atgaccacctccatccgccagttcacctcctccagctccatcaagggctcctccggcctggggggcggctcgtcccgcacctcctgccggctgtctggcggcctgggtgccggctcctgcaggctgggatctgctggcggcctgggcagcaccctcgggggtagcagctactccagctgctacagctttggctctggtggtggctatggcagcagctttgggggtgttgatgggctgctggctggaggtgagaaggccaccatgcagaacctcaatgaccgcctggcctcctacctggacaaggtgcgtgccctggaggaggccaacactgagctggaggtgaagatccgtgactggtaccagaggcaggccccggggcccgcccgtgactacagccagtactacaggacaattgaggagctgcagaacaagatcctcacagccaccgtggacaatgccaacatcctgctacagattgacaatgcccgtctggctgctgatgacttccgcaccaagtttgagacagagcaggccctgcgcctgagtgtggaggccgacatcaatggcctgcgcagggtgctggatgagctgaccctggccagagccgacctggagatgcagattgagaacctcaaggaggagctggcctacctgaagaagaaccacgaggaggagatgaacgccctgcgaggccaggtgggtggtgagatcaatgtggagatggacgctgccccaggcgtggacctgagccgcatcctcaacgagatgcgtgaccagtatgagaagatggcagagaagaaccgcaaggatgccgaggattggttcttcagcaagacagaggaactgaaccgcgaggtggccaccaacagtgagctggtgcagagtggcaagagtgagatctcggagctccggcgcaccatgcaggccttggagatagagctgcagtcccagctcagcatgaaagcatccctggagggcaacctggcggagacagagaaccgctactgcgtgcagctgtcccagatccaggggctgattggcagcgtggaggagcagctggcccagcttcgctgcgagatggagcagcagaaccaggaatacaaaatcctgctggatgtgaagacgcggctggagcaggagattgccacctaccgccgcctgctggagggagaggatgcccacctgactcagtacaagaaagaaccggtgaccacccgtcaggtgcgtaccattgtggaagaggtccaggatggcaaggtcatctcctcccgcgagcaggtccaccagaccacccgctga

SEQ ID NO: 612 - DNA, 2223 bp, Homo sapiens
atggcggccttctccgagatgggtgtaatgcctgagattgcacaagctgtggaagagatggattggctcctcccaactgatatccaggctgaatctatcccattgatcttaggaggaggtgatgtacttatggctgcagaaacaggaagtggcaaaactggtgcttttagtattccagttatccagatagtttatgaaactctgaaagaccaacaggaaggcaaaaaaggaaaaacaacaattaaaactggtgcttcagtgctgaacaaatggcagatgaacccatatgacagaggatctgcttttgcaattgggtcagatggtctttgttgtcaaagcagagaagtaaaggaatggcatgggtgtagagctactaaaggattaatgaaagggaaacactactatgaagtatcctgtcatgaccaagggttatgcagggtcgggtggtctaccatgcaggcctctttggacctaggtactgacaagtttggatttggctttggtggaacaggaaagaaatcccataacaaacaatttgataattatggagaggaattcactatgcatgataccattggatgttacctggatatagataagggacatgtcaagttctccaaaaatggaaaagatcttggtctggcatttgaaataccaccacatatgaaaaaccaagccctctttcctgcctgtgttttgaagaatgctgaactgaaatttaacttcggtgaagaggaatttaagtttccaccaaaagatggctttgttgctctttccaaggcaccggatggttacattgtcaaatcacagcactcaggtaatgcacaggtgacacaaacaaagtttctccccaatgctccgaaagctctcattgttgaaccttcccgggagttagctgaacaaactttgaataacatcaagcagtttaagaaatacattgataatcctaaattaagggagcttctgataattggaggtgttgcagcccgggatcagctctctgttttggaaaatggagtagatatagttgtaggtactccgggaagactagatgacttggtgtcaactggaaagctgaacttatctcaagttagattcctggtcctggatgaagctgatgggcttctttctcaaggttattctgattttataaataggatgcacaatcagattcctcaggttacctctgatggaaaaagacttcaggtgattgtttgctctgccactttgcattctttcgatgtaaagaaactgtccgagaagataatgcattttcctacatgggttgacttaaaaggagaagactctgttccagatactgtacaccatgttgttgtcccagtaaatcccaaaactgacagactctgggaaaggcttggaaagagccacattagaactgatgatgtacatgcaaaagataacacaagacctggtgctaatagtccagagatgtggtctgaagctattaaaatcctgaaaggggagtatgctgtccgggcaatcaaggaacataagatggatcaagcaattatcttctgtagaaccaaaattgactgtgataacttggagcagtactttatacaacaaggaggaggacctgataaaaaaggacaccagttctcatgtgtttgtcttcatggtgacagaaagcctcatgagagaaagcaaaacttggaaagatttaagaaaggagatgtaagattcttgatttgcacagatgtagctgctagaggaattgatatccacggtgttccttatgttataaatgtcactctgcccgatgaaaagcaaaactacgtacatcgaattggcagagtaggaagagctgaaaggatgggtctggcaatttccctggtggcaacagaaaaagaaaaggtttggtaccatgtatgtagcagccgtggaaaagggtgttataacacaagactcaaggaagatggaggctgtaccatatggtacaacgagatgcagttactatctgagatagaagaacacctgaactgtaccatttctcaggttgagccggatataaaggtaccagtggatgaatttgatgggaaagttacctacggtcagaaaagggctgctggtggtggaagctataaaggccatgtggatattttggcacctactgttcaagagttggctgcccttgaaaaggaggcgcagacatctttcctgcatcttggctaccttcctaaccagctgttcagaaccttctga

SEQ ID NO: 613 - DNA, 1443 bp, Homo sapiens
atgcagatcccgcgcgccgctcttctcccgctgctgctgctgctgctggcggcgcccgcctcggcgcagctgtcccgggccggccgctcggcgcctttggccgccgggtgcccagaccgctgcgagccggcgcgctgcccgccgcagccggagcactgcgagggcggccgggcccgggacgcgtgcggctgctgcgaggtgtgcggcgcgcccgagggcgccgcgtgcggcctgcaggagggcccgtgcggcgaggggctgcagtgcgtggtgcccttcggggtgccagcctcggccacggtgcggcggcgcgcgcaggccggcctctgtgtgtgcgccagcagcgagccggtgtgcggcagcgacgccaacacctacgccaacctgtgccagctgcgcgccgccagccgccgctccgagaggctgcaccggccgccggtcatcgtcctgcagcgcggagcctgcggccaagggcaggaagatcccaacagtttgcgccataaatataactttatcgcggacgtggtggagaagatcgcccctgccgtggttcatatcgaattgtttcgcaagcttccgttttctaaacgagaggtgccggtggctagtgggtctgggtttattgtgtcggaagatggactgatcgtgacaaatgcccacgtggtgaccaacaagcaccgggtcaaagttgagctgaagaacggtgccacttacgaagccaaaatcaaggatgtggatgagaaagcagacatcgcactcatcaaaattgaccaccagggcaagctgcctgtcctgctgcttggccgctcctcagagctgcggccgggagagttcgtggtcgccatcggaagcccgttttcccttcaaaacacagtcaccaccgggatcgtgagcaccacccagcgaggcggcaaagagctggggctccgcaactcagacatggactacatccagaccgacgccatcatcaactatggaaactcgggaggcccgttagtaaacctggacggtgaagtgattggaattaacactttgaaagtgacagctggaatctcctttgcaatcccatctgataagattaaaaagttcctcacggagtcccatgaccgacaggccaaaggaaaagccatcaccaagaagaagtatattggtatccgaatgatgtcactcacgtccagcaaagccaaagagctgaaggaccggcaccgggacttcccagacgtgatctcaggagcgtatataattgaagtaattcctgataccccagcagaagctggtggtctcaaggaaaacgacgtcataatcagcatcaatggacagtccgtggtctccgccaatgatgtcagcgacgtcattaaaagggaaagcaccctgaacatggtggtccgcaggggtaatgaagatatcatgatcacagtgattcccgaagaaattgacccatag

SEQ ID NO: 614 - DNA, 534 bp, Homo sapiens
atgagcagcaatgagtgcttcaagtgtggacgatctggccactgggcccgggaatgtcctactggtggaggccgtggtcgtggaatgagaagccgtggcagaggtggttttacctcggatagaggtttccagtttgtttcctcgtctcttccagatatttgttatcgctgtggtgagtctggtcatcttgccaaggattgtgatcttcaggaggatgcctgctataactgcggtagaggtggccacattgccaaggactgcaaggagcccaagagagagcgagagcaatgctgctacaactgtggcaaaccaggccatctggctcgtgactgcgaccatgcagatgagcagaaatgctattcttgtggagaattcggacacattcaaaaagactgcaccaaagtgaagtgctataggtgtggtgaaactggtcatgtagccatcaactgcagcaagacaagtgaagtcaactgttaccgctgtggcgagtcagggcaccttgcacgggaatgcacaattgaggctacagcctaa

SEQ ID NO: 615 - DNA, 636 bp, Homo sapiens
atgaccccttggctcgggctcatcgtgctcctgggcagctggagcctgggggactggggcgccgaggcgtgcacatgctcgcccagccacccccaggacgccttctgcaactccgacatcgtgatccgggccaaggtggtggggaagaagctggtaaaggaggggcccttcggcacgctggtctacaccatcaagcagatgaagatgtaccgaggcttcaccaagatgccccatgtgcagtacatccatacggaagcttccgagagtctctgtggccttaagctggaggtcaacaagtaccagtacctgctgacaggtcgcgtctatgatggcaagatgtacacggggctgtgcaacttcgtggagaggtgggaccagctcaccctctcccagcgcaaggggctgaactatcggtatcacctgggttgtaactgcaagatcaagtcctgctactacctgccttgctttgtgacttccaagaacgagtgtctctggaccgacatgctctccaatttcggttaccctggctaccagtccaaacactacgcctgcatccggcagaagggcggctactgcagctggtaccgaggatgggcccccccggataaaagcatcatcaatgccacagacccctga

SEQ ID NO: 616 - DNA, 576 bp, Homo sapiens
atggccgcctactcttaccgccccggccctggggccggccctgggcctgctgcaggcgcggcgctgccggaccagagcttcctgtggaacgttttccagagggtcgataaagacaggagtggagtgatatcagacaccgagcttcagcaagctctctccaacggcacgtggactccctttaatccagtgactgtcaggtcgatcatatccatgtttgaccgtgagaacaaggccggcgtgaacttcagcgagttcacgggtgtgtggaagtacatcacggactggcagaacgtcttccgcacgtacgaccgggacaactccgggatgatcgataagaacgagctgaagcaggccctctcaggtttcggctaccggctctctgaccagttccacgacatcctcattcgaaagtttgacaggcagggacgggggcagattgccttcgacgacttcatccagggctgcatcgtcctgcagaggttgacggatatattcagacgttacgacacggatcaggacggctggattcaggtgtcgtacgaacagtacctgtccatggtcttcagtatcgtatga

SEQ ID NO: 617 - DNA, 465 bp, Homo sapiens
atggcggagaacagcggtcgcgccggcaagagcagcgggagcggcgcggggaagggggcggtgtccgcagagcaggtgattgctggcttcaaccgccttcggcaggaacagcgaggcctggcatccaaagcagctgagttggagatggagttgaatgagcacagcctagtgatcgatacactgaaggaggtagatgaaactcgtaagtgctaccgcatggttggaggagtgctggtggagcgaactgtcaaagaggtgctgcccgctttggagaacaacaaggagcagatacagaagatcattgagacactgacacagcagcttcaggcaaagggaaaagaactaaatgaattccgggaaaagcacaacattcgtctcatgggagaagatgagaagccagcagccaaggaaaactcagaaggggctggggctaaggccagctcagctggagtgttggtctcctag

SEQ ID NO: 618 - DNA, 1633 bp, Homo sapiens
ttttttttttttaggttttcattatttatttatgacaaatattccacatctgtgattctctccagtcaaaagttctttgagacgatgccatcggccttggccaatcggagaatggaatcatctgactcacccatcctacgaatggccccgcagatagcataagttttaaactggccattaaacctgcctgtgaccttgtcaacctcggccacgttcatctggatggatgcgtggtccttggcaccgatgatgcgattgctagcggagaatttccgcggcacgtacaggtccacgaactcgccggcgtcgttctgcatttcgaggctgggctgcgcctgctgcccggctcggaggaggccaaggtgcaacttccttcggtcgtcccgaatccgggttcatccgacaccagccgcctccaccatgccgccgaagttcgaccccaacgagatcaaagtcgtatacctgaggtgcaccggaggtgaagtcggtgccacttctgccctggcccccaagatcggccccctgggtctgtctccaaaaaaagttggtgatgacattgccaaggcaacgggtgactggaagggcctgaggattacagtgaaactgaccattcagaacagacaggcccagattgaggtggtgccttctgcctctgccctgatcatcaaagccctcaaggaaccaccaagagacagaaagaaacagaaaaacattaaacacagtgggaatatcacttttgatgagattgtcaacattgctcgacagatgcggcaccgatccttagccagagaactctctggaaccattaaagagatcctggggactgcccagtcagtgggctgtaatgttgatggccgccatcctcatgacatcatcgatgacatcaacagtggtgctgtggaatgcccagccagttaagcacaaaggaaaacatttcaataaaggatcatttgacaactggtgaacacacaccacccaacaaacaccacaaccaagccaccacgtaacacacaccacgcgccgacccaagtacacgacgcgcggcaaaaaaccgcgtacacgaacgagcccccagggcgcacacgacgcgcactcacgcacccgcaactgtgtgtaaaaagaggcggaaacacgcgacagccgtacccacccttaattatcaccacccgctctatactacgatctcagtatagccccgcgtgattacaccgtcttagatgacatcatagtcactagctacagcagctataccaacccctgcgcacaacaatactacgcctgctaactcgtcggcaaacacctgcagaggacgggaccgctcacaccgccagggaccgcggctgatcaggcacgcgggacgcgactgagcgagtactagcagacggtgcacagcaacggctgaaatgcggcgcgaaggtaacagcatgtgagtcccgagctagacgaacttgactctagctgcccgccagcctgcatgacagtacgatagcccggatccgaactcacgcgaacctagctcggcgcccgatcagtacagccttgcgctctggctagactgcatgcactgggggatcgagaaatatgctgtgtgtgattctcttctccgaccggctcgtcccggtctcaacagatt

SEQ ID NO: 619 - DNA, 975 bp, Homo sapiens
atgccggagctggcagtgcagaaggtggtggtccaccccctggtgctgctcagtgtggtggatcatttcaaccgaatcggcaaggttggaaaccagaagcgtgttgttggtgtgcttttggggtcatggcaaaagaaagtacttgatgtatcgaacagttttgcagttccttttgatgaagatgacaaagacgattctgtatggtttttagaccatgattatttggaaaacatgtatggaatgtttaagaaagtcaatgccagggaaagaatagttggctggtaccacacaggccctaaactacacaagaatgacattgccatcaacgaactcatgaaaagatactgtcctaattccgtattggtcatcattgatgtgaagccgaaggacctagggctgcctacagaagcgtacatttcagtggaagaagtccatgatgatggaactccaacctcgaaaacatttgaacacgtgaccagtgaaattggagcagaggaagctgaggaagttggagttgaacacttgttacgagatatcaaagacacgacggtgggcactctgtcccagcggatcacaaaccaggtccatggtttgaagggactgaactccaagcttctggatatcaggagctacctggaaaaagtcgccacaggcaagctgcccatcaaccaccagatcatctaccagctgcaggacgtcttcaacctgctgccagatgtcagcctgcaggagttcgtcaaggccttttacctgaagaccaatgaccagatggtggtagtgtacttggcctcgctgatccgttccgtggtcgccctgcacaacctcatcaacaacaagattgccaaccgggatgcagagaagaaagaagggcaggagaaagaagagagcaaaaaggataggaaagaggacaaggagaaagataaagataaggaaaagagtgatgtaaagaaagaggagaaaaaggagaaaaagtaa

SEQ ID NO: 620 - DNA, 840 bp, Homo sapiens
atgacgaagaacgagaagaagtccctcaaccagagcctggccgagtggaagctcttcatctacaacccgaccaccggagaattcctggggcgcaccgccaagagctggggtttgatcttgctcttctacctagttttttatgggttcctggctgcactcttctcattcacgatgtgggttatgcttcagactctcaacgatgaggttccaaaataccgtgaccagattcctagcccaggactcatggtttttccaaaaccagtgaccgcattggaatatacattcagtaggtctgatccaacttcgtatgcagggtacattgaagaccttaagaagtttctaaaaccatatactttagaagaacagaagaacctcacagtctgtcctgatggagcactttttgaacagaagggtccagtttatgttgcatgtcagtttcctatttcattacttcaagcatgcagtggtatgaatgatcctgattttggctattctcaaggaaacccttgtattcttgtgaaaatgaacagaataattggattaaagcctgaaggagtgccaaggatagattgtgtttcaaagaatgaagatataccaaatgtagcagtttatcctcataatggaatgatagacttaaaatatttcccatattatgggaaaaaactgcatgttgggtatctacagccattggttgctgttcaggtcagctttgctcctaacaacactgggaaagaagtaacagttgagtgcaagattgatggatcagccaacctaaaaagtcaggatgatcgtgacaagtttttgggacgagttatgttcaaaatcacagcacgtgcatag

SEQ ID NO: 621 - DNA, 3177 bp, Homo sapiens
atgtccagctcgccgctgtccaagaaacgtcgcgtgtccgggcctgatccaaagccgggttctaactgctcccctgcccagtccgtgttgtccgaagtgccctcggtgccaaccaacggaatggccaagaacggcagtgaagcagacatagacgagggcctttactcccggcagctgtatgtgttgggccatgaggcaatgaagcggctccagacatccagtgtcctggtatcaggcctgcggggcctgggcgtggagatcgctaagaacatcatccttggtggggtcaaggctgttaccctacatgaccagggcactgcccagtgggctgatctttcctcccagttctacctgcgggaggaggacatcggtaaaaaccgggccgaggtatcacagccccgcctcgctgagctcaacagctatgtgcctgtcactgcctacactggacccctcgttgaggacttccttagtggtttccaggtggtggtgctcaccaacacccccctggaggaccagctgcgagtgggtgagttctgtcacaaccgtggcatcaagctggtggtggcagacacgcggggcctgtttgggcagctcttctgtgactttggagaggaaatgatcctcacagattccaatggggagcagccactcagtgctatggtttctatggttaccaaggacaaccccggtgtggttacctgcctggatgaggcccgacacgggtttgagagcggggactttgtctccttttcagaagtacagggcatggttgaactcaacggaaatcagcccatggagatcaaagtcctgggtccttatacctttagcatctgtgacacctccaacttctccgactacatccgtggaggcatcgtcagtcaggtcaaagtacctaagaagattagctttaaatccttggtggcctcactggcagaacctgactttgtggtgacggacttcgccaagttttctcgccctgcccagctgcacattggcttccaggccctgcaccagttctgtgctcagcatggccggccacctcggccccgcaatgaggaggatgcagcagaactggtagccttagcacaggctgtgaatgctcgagccctgccagcagtgcagcaaaataacctggacgaggacctcatccggaagctggcatatgtggctgctggggatctggcacccataaacgccttcattgggggcctggctgcccaggaagtcatgaaggcctgctccgggaagttcatgcccatcatgcagtggctatactttgatgcccttgagtgtctccctgaggacaaagaggtcctcacagaggacaagtgcctccagcgccagaaccgttatgacgggcaagtggctgtgtttggctcagacctgcaagagaagctgggcaagcagaagtatttcctggtgggtgcgggggccattggctgtgagctgctcaagaactttgccatgattgggctgggctgcggggagggtggagaaatcatcgttacagacatggacaccattgagaagtcaaatctgaatcgacagtttcttttccggccctgggatgtcacgaagttaaagtctgacacggctgctgcagctgtgcgccaaatgaatccacatatccgggtgacaagccaccagaaccgtgtgggtcctgacacggagcgcatctatgatgacgattttttccaaaacctagatggcgtggccaatgccctggacaacgtggatgcccgcatgtacatggaccgccgctgtgtctactaccggaagccactgctggagtcaggcacactgggcaccaaaggcaatgtgcaggtggtgatccccttcctgacagagtcgtacagttccagccaggacccacctgagaagtccatccccatctgtaccctgaagaacttccctaatgccatcgagcacaccctgcagtgggctcgggatgagtttgaaggcctcttcaagcagccagcagaaaatgtcaaccagtacctcacagaccccaagtttgtggagcgaacactgcggctggcaggcactcagcccttggaggtgctggaggctgtgcagcgcagcctggtgctgcagcgaccacagacctgggctgactgcgtgacctgggcctgccaccactggcacacccagtactcgaacaacatccggcagctgctgcacaacttccctcctgaccagctcacaagctcaggagcgccgttctggtctgggcccaaacgctgtccacacccgctcacctttgatgtcaacaatcccctgcatctggactatgtgatggctgctgccaacctgtttgcccagacctacgggctgacaggctctcaggaccgagctgctgtggccacattcctgcagtctgtgcaggtccccgaattcacccccaagtctggcgtcaagatccatgtttctgaccaggagctgcagagcgccaatgcctctgttgatgacagtcgtctagaggagctcaaagccactctgcccagcccagacaagctccctggattcaagatgtaccccattgactttgagaaggatgatgacagcaactttcatatggatttcatcgtggctgcatccaacctccgggcagaaaactatgacattccttctgcagaccggcacaagagcaagctgattgcagggaagatcatcccagccattgccacgaccacagcagccgtggttggccttgtgtgtctggagctgtacaaggttgtgcaggggcaccgacagcttgactcctacaagaatggtttcctcaacttggccctgcctttctttggtttctctgaaccccttgccgcaccacgtcaccagtactataaccaagagtggacattgtgggatcgctttgaggtacaagggctgcagcctaatggtgaggagatgaccctcaaacagttcctcgactattttaagacagagcacaaattagagatcaccatgctgtcccagggcgtgtccatgctctattccttcttcatgccagctgccaagctcaaggaacggttggatcagccgatgacagagattgtgagccgtgtgtcgaagcgaaagctgggccgccacgtgcgggcgctggtgcttgagctgtgctgtaacgacgagagcggcgaggatgtcgaggttccctatgtccgatacaccatccgctga

SEQ ID NO: 622 - DNA, 276 bp, Homo sapiens
atggtttacatctcgaacggacaagtgttggacagccggagtcagtctccatggagattatctttgataacagatttcttctggggaatagctgagtttgtggttttgtttttcaaaactctgcttcagcaagatgtgaaaaaaagaagaagctatggaaactcatctgattccagatatgatgatggaagagggccaccaggaaaccctccccgaagaatgggtagaatcaatcatctgcgtggccctagtccccctccaatggctggtggatga

SEQ ID NO: 623 - DNA, 573 bp, Homo sapiens
atggcggagaagactcaaaagagtgtgaagattgctcctggagcagttgtatgtgtagaaagtgaaatcagaggagatgtaactatcggacctcggacagtgatccaccctaaagcaagaattattgcggaagccgggccaatagtgattggcgaagggaacctaatagaagaacaggcccttatcataaatgcttacccagataatatcactcctgacactgaagatccagaaccaaaacctatgatcattggcaccaataatgtgtttgaagttggctgttattcccaagccatgaagatgggagataataatgtcattgaatcaaaagcatatgtaggcagaaatgtaatattgacaagtggctgcatcattggggcttgttgcaacctaaatacatttgaagtcatccctgagaatacggtgatctatggtgcagactgccttcgtcgggtgcagactgagcgaccgcagccccagacactacagctggatttcttgatgaaaatcttgccaaattaccaccacctaaagaagactatgaaaggaagctcaactccagtaaagaactaa

SEQ ID NO: 624 - DNA, 1335 bp, Homo sapiens
atgagggaaatcgtgcacatccaggctggtcagtgtggcaaccagatcggtgccaagttctgggaggtgatcagtgatgaacatggcatcgaccccaccggcacctaccacggggacagcgacctgcagctggaccgcatctctgtgtactacaatgaagccacaggtggcaaatatgttcctcgtgccatcctggtggatctagaacctgggaccatggactctgttcgctcaggtccttttggccagatctttagaccagacaactttgtatttggtcagtctggggcaggtaacaactgggccaaaggccactacacagagggcgccgagctggttgattctgtcctggatgtggtacggaaggaggcagagagctgtgactgcctgcagggcttccagctgacccactcactgggcgggggcacaggctctggaatgggcactctccttatcagcaagatccgagaagaataccctgatcgcatcatgaataccttcagtgtggtgccttcacccaaagtgtctgacaccgtggtcgagccctacaatgccaccctctccgtccatcagttggtagagaatactgatgagacctattgcattgacaacgaggccctctatgatatctgcttccgcactctgaagctgaccacaccaacctacggggatctgaaccaccttgtctcagccaccatgagtggtgtcaccacctgcctccgtttccctggccagctcaatgctgacctccgcaagttggcagtcaacatggtccccttcccacgtctccatttctttatgcctggctttgcccctctcaccagccgtggaagccagcagtatcgagctctcacagtgccggaactcacccagcaggtcttcgatgccaagaacatgatggctgcctgtgacccccgccacggccgatacctcaccgtggctgctgtcttccgtggtcggatgtccatgaaggaggtcgatgagcagatgcttaacgtgcagaacaagaacagcagctactttgtggaatggatccccaacaatgtcaagacagccgtctgtgacatcccacctcgtggcctcaagatggcagtcaccttcattggcaatagcacagccatccaggagctcttcaagcgcatctcggagcagttcactgccatgttccgccggaaggccttcctccactggtacacaggcgagggcatggacgagatggagttcaccgaggctgagagcaacatgaacgacctcgtctctgagtatcagcagtaccaggatgccaccgcagaagaggaggaggatttcggtgaggaggccgaagaggaggcctaa

SEQ ID NO: 625 - DNA, 2004 bp, Homo sapiens
atgaatcccacagaaaccaaggctgtaaaaacagaacctgagaagaagtcacagtcaaccaagccaaaaagcctacccaagcaggcatcagatacaggaagtaacgatgctcacaataaaaaagcagtttccagatcagctgaacagcagccatcagagaaatcaacagaaccaaagactaaaccacaagacatgatttctgctggtggagagagtgttgctggtatcactgcaatatctggcaagccgggtgacaagaaaaaagaaaagaaatcattaaccccagctgtgccagttgaatctaaaccggataaaccatcgggaaagtcaggcatggatgctgctttggatgacttaatagatactttaggaggacctgaagaaactgaagaagaaaatacaacgtatactggaccagaagtttcagatccaatgagttccacctacatagaggaattgggtaaaagagaagtcacaattcctccaaaatatagggaactattggctaaaaaggaagggatcacagggcctcctgcagactcttcgaaacccatagggccagatgatgctatagacgccttgtcatctgacttcacctgtgggtcgcctacagctgctggaaagaaaactgaaaaagaggaatctacagaagttttaaaagctcagtcagcagggacagtcagaagtgctgctccaccccaagagaagaaaagaaaggtggagaaggatacaatgagtgatcaagcactcgaggctctgtcggcttcactgggcacccggcaagcagaacctgagctcgacctccgctcaattaaggaagtcgatgaggcaaaagctaaagaagaaaaactagagaagtgtggtgaggatgatgaaacaatcccatctgagtacagattaaaaccagccacggataaagatggaaaaccactattgccagagcctgaagaaaaacccaagcctcggagtgaatcagaactcattgatgaactttcagaagattttgaccggtctgaatgtaaagagaaaccatctaagccaactgaaaagacagaagaatctaaggccgctgctccagctcctgtgtcggaggctgtgtgtcggacctccatgtgtagtatacagtcagcaccccctgagccggctaccttgaagggcacagtgccagatgatgctgtagaagccttggctgatagcctggggaaaaaggaagcagatccagaagatggaaaacctgtgatggataaagtcaaggagaaggccaaagaagaagaccgtgaaaagcttggtgaaaaagaagaaacaattcctcctgattatagattagaagaggtcaaggataaagatggaaagccactcctgccaaaagagtctaaggaacagcttccacccatgagtgaagacttccttctggatgctttgtctgaggacttctctggtccacaaaatgcttcatctcttaaatttgaagatgctaaacttgctgctgccatctctgaagtggtttcccaaaccccagcttcaacgacccaagctggagccccaccccgtgatacctcgcagagtgacaaagacctcgatgatgccttggataaactctctgacagtctaggacaaaggcagcctgacccagatgagaacaaaccaatggaagataaagtaaaggaaaaagctaaagctgaacatagagacaagcttggagaaagagatgacactatcccacctgaatacagacatctcctggatgataatggacaggacaaaccagtgaagccacctacaaagaaatcagaggattcaaagaaacctgcagatgaccaagaccccattgatgctctctcaggagatctggacagctgtccctccactacagaaacctcacagaacacagcaaaggataagtgcaagaaggctgcttccagctccaaagcacctaagaatggaggtaaagcgaaggattcagcaaagacaacagaggaaacttccaagccaaaagatgactaa

SEQ ID NO: 626 - DNA, 342 bp, Homo sapiens
atgtcggcgtcggtagtgtctgtcatttcgcggttcttagaagagtacttgagctccactccgcagcgtctgaagttgctggacgcgtacctgctgtatatactgctgaccggggcgctgcagttcggttactgtctcctcgtggggaccttccccttcaactcttttctctcgggcttcatctcttgtgtggggagtttcatcctagcggtttgcctgagaatacagatcaacccacagaacaaagcggatttccaaggcatctccccagagcgagcctttgctgattttctctttgccagcaccatcctgcaccttgttgtcatgaactttgttggctga

SEQ ID NO: 627 - DNA, 2247 bp, Homo sapiens
atggggcgggccggggctgccgccgtgatcccgggcctggccctgctctgggcagtggggctggggagtgccgcccccagccccccacgccttcggctctccttccaagagctccaggcctggcatggtctccagactttcagcctggagcgaacctgctgctaccaggccttgctggtggatgaggagcgtggacgcctgtttgtgggtgccgagaaccatgtggcctccctcaacctggacaacatcagcaagcgggccaagaagctggcctggccggcccctgtggaatggcgagaggagtgcaactgggcagggaaggacattggtactgagtgcatgaacttcgtgaagttgctgcatgcctacaaccgcacccatttgctggcctgtggcacgggagccttccacccaacctgtgcctttgtggaagtgggccaccgggcagaggagcccgtcctccggctggacccaggaaggatagaggatggcaaggggaagagtccttatgaccccaggcatcgggctgcctccgtgctggtgggggaggagctatactcaggggtggcagcagacctcatgggacgagactttaccatctttcgcagcctagggcaacgtccaagtctccgaacagagccacacgactcccgctggctcaatgagcccaagtttgtcaaggtattttggatcccggagagcgagaacccagacgacgacaaaatctacttcttctttcgtgagacggcggtagaggcggcgccggcactgggacgcctgtccgtgtcccgcgttggccagatctgccggaacgacgtgggcggccagcgcagcctggtcaacaagtggacgacgttcctgaaggcgcggctggtgtgctcggtgcccggcgtcgagggcgacacccacttcgatcagctccaggatgtgtttctgttgtcctcgcgggaccaccggaccccgctgctctatgccgtcttctccacgtccagcatcttccagggctctgcggtgtgcgtgtacagcatgaacgacgtgcgccgggccttcttgggaccctttgcacacaaggaggggcccatgcaccagtgggtgtcataccagggtcgcgtcccctacccgcggccaggcatgtgccccagcaagacctttggcaccttcagttccaccaaggacttcccagacgatgtcatccagtttgcgcggaaccaccccctcatgtacaactctgtcctgcccactggggggcgccctcttttcctacaagttggagccaattacaccttcactcaaattgccgcggaccgggttgcagccgctgacggacactatgacgtcctcttcattggcacagacgttggcacggtgctgaaggtgatctcggtccccaagggcagtaggcccagcgcagaggggctgctcctggaggagctgcacgtgtttgaggactcggccgctgtcaccagcatgcaaatttcttccaagaggcaccagctgtacgtagcctcgcggagcgcggtggcccagatcgcgttgcaccgctgcgctgcccacggccgcgtctgcaccgaatgctgtctggcgcgtgacccctactgcgcctgggacggggtcgcgtgcacgcgcttccagcccagtgccaagaggcggttccggcggcaagacgtaaggaatggcgaccccagcacgttgtgctccggagactcgtctcgtcccgcgctgctggaacacaaggtgttcggcgtggagggcagcagcgcctttctggagtgtgagccccgctcgctgcaggcgcgcgtggagtggactttccagcgcgcaggggtgacagcccacacccaggtgctggcagaggagcgcaccgagcgcaccgcccggggactactgctgcgcaggctgcggcgccgggactcgggcgtgtacttgtgcgccgccgtcgagcagggctttacgcaaccgctgcgtcgcctgtcgctgcacgtgttgagtgctacgcaggccgaacgactggcgcgggccgaggaggctgcgcccgccgcgccgccgggccccaaactctggtaccgggactttctgcagctggtggagccgggcggaggtggcagcgcgaactccctgcgcatgtgccgcccgcagcctgcgctgcagtcactgcccctggagtcgcggagaaagggccgtaaccggaggacccacgcccctgagcctcgcgctgagcgggggccgcgcagcgcaacgcactggtga

SEQ ID NO: 628 - DNA, 1956 bp, Homo sapiens
atggcccgggggtcggcggttgcctgggcggcgctcgggccgttgttgtggggctgcgcgctggggctgcagggcgggatgctgtacccccaggagagcccgtcgcgggagtgcaaggagctggacggcctctggagcttccgcgccgacttctctgacaaccgacgccggggcttcgaggagcagtggtaccggcggccgctgtgggagtcaggccccaccgtggacatgccagttccctccagcttcaatgacatcagccaggactggcgtctgcggcattttgtcggctgggtgtggtacgaacgggaggtgatcctgccggagcgatggacccaggacctgcgcacaagagtggtgctgaggattggcagtgcccattcctatgccatcgtgtgggtgaatggggtcgacacgctagagcatgaggggggctacctccccttcgaggccgacatcagcaacctggtccaggtggggcccctgccctcccggctccgaatcactatcgccatcaacaacacactcacccccaccaccctgccaccagggaccatccaatacctgactgacacctccaagtatcccaagggttactttgtccagaacacatattttgactttttcaactacgctggactgcagcggtctgtacttctgtacacgacacccaccacctacatcgatgacatcaccgtcaccaccagcgtggagcaagacagtgggctggtgaattaccagatctctgtcaagggcagtaacctgttcaagttggaagtgcgtcttttggatgcagaaaacaaagtcgtggcgaatgggactgggacccagggccaacttaaggtgccaggtgtcagcctctggtggccgtacctgatgcacgaacgccctgcctatctgtattcattggaggtgcagctgactgcacagacgtcactggggcctgtgtctgacttctacacactccctgtggggatccgcactgtggctgtcaccaagagccagttcctcatcaatgggaaacctttctatttccacggtgtcaacaagcatgaggatgcggacatccgagggaagggcttcgactggccgctgctggtgaaggacttcaacctgcttcgctggcttggtgccaacgctttccgtaccagccactacccctatgcagaggaagtgatgcagatgtgtgaccgctatgggattgtggtcatcgatgagtgtcccggcgtgggcctggcgctgccgcagttcttcaacaacgtttctctgcatcaccacatgcaggtgatggaagaagtggtgcgtagggacaagaaccaccccgcggtcgtgatgtggtctgtggccaacgagcctgcgtcccacctagaatctgctggctactacttgaagatggtgatcgctcacaccaaatccttggacccctcccggcctgtgacctttgtgagcaactctaactatgcagcagacaagggggctccgtatgtggatgtgatctgtttgaacagctactactcttggtatcacgactacgggcacctggagttgattcagctgcagctggccacccagtttgagaactggtataagaagtatcagaagcccattattcagagcgagtatggagcagaaacgattgcagggtttcaccaggatccacctctgatgttcactgaagagtaccagaaaagtctgctagagcagtaccatctgggtctggatcaaaaacgcagaaaatacgtggttggagagctcatttggaattttgccgatttcatgactgaacagtcaccgacgagagtgctggggaataaaaaggggatcttcactcggcagagacaaccaaaaagtgcagcgttccttttgcgagagagatactggaagattgccaatgaaaccaggtatccccactcagtagccaagtcacaatgtttggaaaacagcctgtttacttga

SEQ ID NO: 629 - DNA, 2492 bp, Homo sapiens
aagtggctccaaggctgcaggtgtgaggggcgtgcccagggctcggcccgcgccgccccatgtgacccggtccgacatggtgtcgcctcctcccggggcggcggcggtggcggctcgggctgggctccgcgtcgggccggccccgcggccgctcatgggcagccagggccgctcggggccccccgggaacggcgggcccggcgagggcgagggcggagaggcgaggaagctgcaggaagggagggtggcgagggggaagcgaaggaaggggaaggggaagggaaaagcgagagcggggcaaggcggaagaggaagcggggcggaagggaagcccgggccgcagacggcgaaggaggcagccgggccgggggctgacgcgggagcgagggcatgcccaagggaggaagcagagggaggcagaagcgtggaggaaggggcgagaggcatcgtcaagggagtcgaggggagcgcaggggccgggaaggaggcacaaggaagagagtatgggaagaaggaggaatggagggtcagggctaggcggcgggagggcgccaggccgggaagagcacagggacgagggggtcaggcttgggccgacatcgcggggacaggggtggccatggcggcggcggccggggaggaggaggaggaggaggaggcggctcgggagtcggctgcccgcccggccgcggggcctgcgctctggcgcctgccggaggagctgctgctgctcatctgctcctacctggacatgcgggccctcggccgcctggcccaggtgtgccgctggctgcggcgcttcaccagctgcgatctgctctggcgccggatagcccgggcctcgctcaactccggcttcacgcggctcggcaccgacctgatgaccagtgtcccagtgaaggaacgagtgaaggtgtctcagaactggagactggggcgctgccgagaggggattctgctgaagtggagatgcagtcagatgccctggatgcagctagaggatgattctctgtacatatcccaggctaatttcatcctggcctaccagttccgtccagatggtgccagcttgaatcgtcggcctctgggagtctttgctgggcatgatgaggacgtttgccactttgtgctggccaactcgcatattgttagtgcaggaggggatgggaagattggcattcataagattcacagcaccttcactgtcaagtactcggctcatgaacaggaggtgaactgtgtggattgcaaagggggcatcattgtgagtggctccagggacaggacggccaaggtgtggcctttggcctcaggccggctggggcagtgcttacacaccatccagactgaagaccgagtctggtccattgctatcagcccattactcagctcttttgtgacagggacggcttgttgcgggcacttctcacccctgagaatctgggacctcaacagtgggcagctgatgacacacttgggcagtgactttcccccaggggctggggtgctggatgtcatgtatgagtcccctttcacactgctgtcctgtggctatgacacctatgttcgctactgggacctccgcaccagcgtccggaaatgtgtcatggagtgggaggagccccacgacagcaccctgtactgcctgcagacagatggcaaccacctgctggccacaggttcctcctactacggtgttgtacggctgtgggaccggcgtcaaagggcctgcctgcacgccttcccgctgacgtcgactcccctcagcagccctgtgtactgcctgcgtctcaccaccaagcatctctatgctgccctgtcttacaacctccacgtcctggattttcaaaacccatgaccgtcagggccacccctgcctctgggccagggaaaccagctactcagggacttctcttgcctggagggtgcagtgatagctcctcctcactgccccactgtgctcctgggcctgtgaccccagtgctcaggcaccttgcactagaggcttctgactcctgggactttggagcttaccagagatgcagtccctcccaggaacctgttggagaggcaggacctgctgctttagagtgcggctgaacccgggccttgcgtccctgtttggccagagcaaggatctggcctggagaggcccatcctataccccttattagagccatgacagcctacagagtgaggtgaggtgctcccaccttcccagatggttcctttctgccccttcctggaaggaaaggtgaggctgccaatagcctcctggcaccagccagacctcacccttgaccaacctctcggggctgggggttcattcctggggcactgtggcctggttttgctttgaaaccaagaaagagcaaagggaacccagcagttctgagtgagttctgagccagccctacctcaggctggctgttgagacatgctacaattttcatttttgtaaaaataaagcttgattgttcacaaaaaaaaaa

SEQ ID NO: 630 - DNA, 660 bp, Homo sapiens
atggcgtccggcagtaactggctctccggggtgaatgtcgtgctggtgatggcctacgggagcctggacttgaaagaggagattgatattcgactctccagggttcaggatatcaagtatgagccccagctccttgcagatgatgatgctagactactacaactggaaacccagggaaatcaaagttgctacaactatctgtataggatgaaagctctggatgccattcgtacctctgagatcccatttcattctgaaggccggcatccccgttccttaatgggcaagaatttccgctcctacctgctggatctgcgaaacactagtacgcctttcaagggtgtacgcaaagcactcattgatacccttttggatggctatgaaacagcccgctatgggacaggggtctttggccagaatgagtacctacgctatcaggaggccctgagtgagctggccactgcggttaaagcacgaattgggagctctcagcgacatcaccagtcagcagccaaagacctaactcagtcccctgaggtctccccaacaaccatccaggtgacatacctcccctccagtcagaagagtaaacgtgccaagcacttccttgaattgaagagctttaaggataactataacacattggagagtactctgtga

SEQ ID NO: 631 - DNA, 651 bp, Homo sapiens
atggctgcgcagggagagccccaggtccagttcaaacttgtattggttggtgatggtggtactggaaaaacgaccttcgtgaaacgtcatttgactggtgaatttgagaagaagtatgtagccaccttgggtgttgaggttcatcccctagtgttccacaccaacagaggacctattaagttcaatgtatgggacacagccggccaggagaaattcggtggactgagagatggctattatatccaagcccagtgtgccatcataatgtttgatgtaacatcgagagttacttacaagaatgtgcctaactggcatagagatctggtacgagtgtgtgaaaacatccccattgtgttgtgtggcaacaaagtggatattaaggacaggaaagtgaaggcgaaatccattgtcttccaccgaaagaagaatcttcagtactacgacatttctgccaaaagtaactacaactttgaaaagcccttcctctggcttgctaggaagctcattggagaccctaacttggaatttgttgccatgcctgctctcgccccaccagaagttgtcatggacccagctttggcagcacagtatgagcacgacttagaggttgctcagacaactgctctcccggatgaggatgatgacctgtga

SEQ ID NO: 632 - DNA, 774 bp, Homo sapiens
atggttctgcaggtttctgcggccccccggacagtggctctgacggcgttactgatggtgctgctcacatctgtggtccagggcagggccactccagagaattacgtgcaccagttacggcaggaatgctacgcgtttaatgggacacagcgcttcctggagagatacatctacaaccgggaggagttcgtgcgcttcgacagcgacgtgggggagttccgggcggtgacggagctggggcggcctgatgaggactactggaacagccagaaggacatcctggaggaggagcgggcagtgccggacaggatgtgcagacacaactacgagctggacgaggccgtgaccctgcagcgccgagtccagcctagggtgaatgtttccccctccaagaaggggcccttgcagcaccacaacctgcttgtctgccacgtgacggatttctacccaggcagcattcaagtccgatggttcctgaatggacaggaggaaacagctggggtcgtgtccaccaacctgatccgtaatggagactggaccttccagatcctggtgatgctggaaatgaccccccagcagggagatgtctacacctgccaagtggagcacaccagcctggatagtcctgtcaccgtggagtggaaggcacagtctgattctgcccggagtaagacattgacgggagctgggggcttcgtgctggggctcatcatctgtggagtgggcatcttcatgcacaggaggagcaagaaagttcaacgaggatctgcataa

SEQ ID NO: 633 - DNA, 552 bp, Homo sapiens
atgagagctgcctacctcttcctgctattcctgcctgcaggcttgctggctcagggccagtatgacctggacccgctgccgccgttccctgaccacgtccagtacacccactatagcgaccagatcgacaacccagactactatgattatcaagaggtgactcctcggccctccgaggaacagttccagttccagtcccagcagcaagtccaacaggaagtcatcccagccccaaccccagaaccaggaaatgcagagctggagcccacagagcctgggcctcttgactgccgtgaggaacagtacccgtgcacccgcctctactccatacacaggccttgcaaacagtgtctcaacgaggtctgcttctacagcctccgccgtgtgtacgtcattaacaaggagatctgtgttcgtacagtgtgtgcccacgaggagctcctccgagctgacctctgtcgggacaagttctccaaatgtggcgtgatggccagcagcggcctgtgccaatccgtggcggcctcctgtgccaggagctgtgggagctgctag

SEQ ID NO: 634 - DNA, 420 bp, Homo sapiens
atgtcttctttacccgtgccatacaaactgcctgtgtctttgtctgttggttcctgcgtgataatcaaagggacaccaatccactcttttatcaatgacccacagctgcaggtggatttctacactgacatggatgaggattcagatattgccttccgtttccgagtgcactttggcaatcatgtggtcatgaacaggcgtgagtttgggatatggatgttggaggagacaacagactacgtgccctttgaggatggcaaacaatttgagctgtgcatctacgtacattacaatgagtatgagataaaggtcaatggcatacgcatttacggctttgtccatcgaatcccgccatcatttgtgaagatggtgcaagtgtcgagagatatctccctgacctcagtgtgtgtctgcaattga

SEQ ID NO: 635 - DNA, 1176 bp, Homo sapiens
atggcagacattgacaacaaagaacagtctgaacttgatcaagatttggatgatgttgaagaagtagaagaagaggaaactggtgaagaaacaaaactcaaagcacgtcagctaactgttcagatgatgcaaaatcctcagattcttgcagcccttcaagaaagacttgatggtctggtagaaacaccaacaggatacattgaaagcctgcctagggtagttaaaagacgagtgaatgctctcaaaaacctgcaagttaaatgtgcacagatagaagccaaattctatgaggaagttcatgatcttgaaaggaagtatgctgttctctatcagcctctatttgataagcgatttgaaattattaatgcaatttatgaacctacggaagaagaatgtgaatggaaaccagatgaagaagatgagatttcggaggaattgaaagaaaaggccaagattgaagatgagaaaaaggatgaagaaaaagaagaccccaaaggaattcctgaattttggttaactgtttttaagaatgttgacttgctcagtgatatggttcaggaacacgatgaacctattctgaagcacttgaaagatattaaagtgaagttctcagatgctggccagcctatgagttttgtcttagaatttcactttgaacccaatgaatattttacaaatgaagtgctgacaaagacatacaggatgaggtcagaaccagatgattctgatcccttttcttttgatggaccagaaattatgggttgtacagggtgccagatagattggaaaaaaggaaagaatgtcactttgaaaactattaagaagaagcagaaacacaagggacgtgggacagttcgtactgtgactaaaacagtttccaatgactctttctttaacttttttgcccctcctgaagttcctgagagtggagatctggatgatgatgctgaagctatccttgctgcagacttcgaaattggtcactttttacgtgagcgtataatcccaagatcagtgttatattttactggagaagctattgaagatgatgatgatgattatgatgaagaaggtgaagaagcggatgaggaaggggaagaagaaggagatgaggaaaatgatccagactatgacccaaagaaggatcaaaacccagcagagtgcaagcagcagtga

SEQ ID NO: 636 - DNA, 1197 bp, Homo sapiens
atgaactggcatctccccctcttcctcttggcctctgtgacgctgccttccatctgctcccacttcaatcctctgtctctcgaggaactaggctccaacacggggatccaggttttcaatcagattgtgaagtcgaggcctcatgacaacatcgtgatctctccccatgggattgcgtcggtcctggggatgcttcagctgggggcggacggcaggaccaagaagcagctcgccatggtgatgagatacggcgtaaatggagttggtaaaatattaaagaagatcaacaaggccatcgtctccaagaagaataaagacattgtgacagtggctaacgccgtgtttgttaagaatgcctctgaaattgaagtgccttttgttacaaggaacaaagatgtgttccagtgtgaggtccggaatgtgaactttgaggatccagcctctgcctgtgattccatcaatgcatgggttaaaaatgaaaccagggatatgattgacaatctgctgtccccagatcttattgatggtgtgctcaccagactggtcctcgtcaacgcagtgtatttcaagggtctgtggaaatcacggttccaacccgagaacacaaagaaacgcactttcgtggcagccgacgggaaatcctatcaagtgccaatgctggcccagctctccgtgttccggtgtgggtcgacaagtgcccccaatgatttatggtacaacttcattgaactgccctaccacggggaaagcatcagcatgctgattgcactgccgactgagagctccactccgctgtctgccatcatcccacacatcagcaccaagaccatagacagctggatgagcatcatggtgcccaagagggtgcaggtgatcctgcccaagttcacagctgtagcacaaacagatttgaaggagccgctgaaagttcttggcattactgacatgtttgattcatcaaaggcaaattttgcaaaaataacaacagggtcagaaaacctccatgtttctcatatcttgcaaaaagcaaaaattgaagtcagtgaagatggaaccaaagcttcagcagcaacaactgcaattctcattgcaagatcatcgcctccctggtttatagtagacagaccttttctgtttttcatccgacataatcctacaggtgctgtgttattcatggggcagataaacaaaccctga

SEQ ID NO: 637 - DNA, 1758 bp, Homo sapiens
atgacccctccgaggctcttctgggtgtggctgctggttgcaggaacccaaggcgtgaacgatggtgacatgcggctggccgatgggggcgccaccaaccagggccgcgtggagatcttctacagaggccagtggggcactgtgtgtgacaacctgtgggacctgactgatgccagcgtcgtctgccgggccctgggcttcgagaacgccacccaggctctgggcagagctgccttcgggcaaggatcaggccccatcatgctggacgaggtccagtgcacgggaaccgaggcctcactggccgactgcaagtccctgggctggctgaagagcaactgcaggcacgagagagacgctggtgtggtctgcaccaatgaaaccaggagcacccacaccctggacctctccagggagctctcggaggcccttggccagatctttgacagccagcggggctgcgacctgtccatcagcgtgaatgtgcagggcgaggacgccctgggcttctgtggccacacggtcatcctgactgccaacctggaggcccaggccctgtggaaggagccgggcagcaatgtcaccatgagtgtggatgctgagtgtgtgcccatggtcagggaccttctcaggtacttctactcccgaaggattgacatcaccctgtcgtcagtcaagtgcttccacaagctggcctctgcctatggggccaggcagctgcagggctactgcgcaagcctctttgccatcctcctcccccaggacccctcgttccagatgcccctggacctgtatgcctatgcagtggccacaggggacgccctgctggagaagctctgcctacagttcctggcctggaacttcgaggccttgacgcaggccgaggcctggcccagtgtccccacagacctgctccaactgctgctgcccaggagcgacctggcggtgcccagcgagctggccctactgaaggccgtggacacctggagctggggggagcgtgcctcccatgaggaggtggagggcttggtggagaagatccgcttccccatgatgctccctgaggagctctttgagctgcagttcaacctgtccctgtactggagccacgaggccctgttccagaagaagactctgcaggccctggaattccacactgtgcccttccagttgctggcccggtacaaaggcctgaacctcaccgaggatacctacaagccccggatttacacctcgcccacctggagtgcctttgtgacagacagttcctggagtgcacggaagtcacaactggtctatcagtccagacgggggcctttggtcaaatattcttctgattacttccaagccccctctgactacagatactacccctaccagtccttccagactccacaacaccccagcttcctcttccaggacaagagggtgtcctggtccctggtctacctccccaccatccagagctgctggaactacggcttctcctgctcctcggacgagctccctgtcctgggcctcaccaagtctggcggctcagatcgcaccattgcctacgaaaacaaagccctgatgctctgcgaagggctcttcgtggcagacgtcaccgatttcgagggctggaaggctgcgattcccagtgccctggacaccaacagctcgaagagcacctcctccttcccctgcccggcagggcacttcaacggcttccgcacggtcatccgccccttctacctgaccaactcctcaggtgtggactag

SEQ ID NO: 638 - DNA, 1212 bp, Homo sapiens
atgtctcacagaaagttctccgctcccagacatgggtccctcggcttcctgcctcggaagcgcagcagcaggcatcgtgggaaggtgaagagcttccctaaggatgacccgtccaagccggtccacctcacagccttcctgggatacaaggctggcatgactcacatcgtgcgggaagtcgacaggccgggatccaaggtgaacaagaaggaggtggtggaggctgtgaccattgtagagacaccacccatggtggttgtgggcattgtgggctacgtggaaacccctcgaggcctccggaccttcaagactgtctttgctgagcacatcagtgatgaatgcaagaggcgtttctataagaattggcataaatctaagaagaaggcctttaccaagtactgcaagaaatggcaggatgaggatggcaagaagcagctggagaaggacttcagcagcatgaagaagtactgccaagtcatccgtgtcattgcccacacccagatgcgcctgcttcctctgcgccagaagaaggcccacctgatggagatccaggtgaacggaggcactgtggccgagaagctggactgggcccgcgagaggcttgagcagcaggtacctgtgaaccaagtgtttgggcaggatgagatgatcgacgtcatcggggtgaccaagggcaaaggctacaaaggggtcaccagtcgttggcacaccaagaagctgccccgcaagacccaccgaggcctgcgcaaggtggcctgtattggggcatggcatcctgctcgtgtagccttctctgtggcacgcgctgggcagaaaggctaccatcaccgcactgagatcaacaagaagatttataagattggccagggctaccttatcaaggacggcaagctgatcaagaacaatgcctccactgactatgacctatctgacaagagcatcaaccctctgggtggctttgtccactatggtgaagtgaccaatgactttgtcatgctgaaaggctgtgtggtgggaaccaagaagcgggtgctcaccctccgcaagtccttgctggtgcagacgaagcggcgggctctggagaagattgaccttaagttcattgacaccacctccaagtttggccatggccgcttccagaccatggaggagaagaaagcattcatgggaccactgaagaaagaccgaattgcaaaggaagaaggagcttaa

SEQ ID NO: 639 - DNA, 1356 bp, Homo sapiens
atgcgtgagtgcatctccatccacgttggccaggctggtgtccagattggcaatgcctgctgggagctctactgcctggaacacggcatccagcccgatggccagatgccaagtgacaagaccattgggggaggagatgactccttcaacaccttcttcagtgagacgggcgctggcaagcacgtgccccgggctgtgtttgtagacttggaacccacagtcattgatgaagttcgcactggcacctaccgccagctcttccaccctgagcagctcatcacaggcaaggaagatgctgccaataactatgcccgagggcactacaccattggcaaggagatcattgaccttgtgttggaccgaattcgcaagctggctgaccagtgcaccggtcttcagggcttcttggttttccacagctttggtgggggaactggttctgggttcacctccctgctcatggaacgtctctcagttgattatggcaagaagtccaagctggagttctccatttacccagcaccccaggtttccacagctgtagttgagccctacaactccatcctcaccacccacaccaccctggagcactctgattgtgccttcatggtagacaatgaggccatctatgacatctgtcgtagaaacctcgatatcgagcgcccaacctacactaaccttaaccgccttattagccagattgtgtcctccatcactgcttccctgagatttgatggagccctgaatgttgacctgacagaattccagaccaacctggtgccctacccccgcatccacttccctctggccacatatgcccctgtcatctctgctgagaaagcctaccatgaacagctttctgtagcagagatcaccaatgcttgctttgagccagccaaccagatggtgaaatgtgaccctcgccatggtaaatacatggcttgctgcctgttgtaccgtggtgacgtggttcccaaagatgtcaatgctgccattgccaccatcaaaaccaagcgcagcatccagtttgtggattggtgccccactggcttcaaggttggcatcaactaccagcctcccactgtggtgcctggtggagacctggccaaggtacagagagctgtgtgcatgctgagcaacaccacagccattgctgaggcctgggctcgcctggaccacaagtttgacctgatgtatgccaagcgtgcctttgttcactggtacgtgggtgaggggatggaggaaggcgagttttcagaggcccgtgaagatatggctgcccttgagaaggattatgaggaggttggtgtggattctgttgaaggagagggtgaggaagaaggagaggaatactaa

SEQ ID NO: 640 - DNA, 1242 bp, Homo sapiens
atatctttttttttttttttttttttttttttttttttttttttttcatggcacagagtttaatgtgaatcatgagatgagacaaaagcctcctccagggcgatgggaagacccagccccaaaccagactcttgagcacgcagccctaaaccagactccgggaaggggctgcgtggtcatgcaccgcctaagactcagaggtgaagatgggaagacccagccctaaaccagactcctggaaggggctgcgtggtcacgcatcgcctaagactcagaggtgaagatgggaagacccagccctaaaccagactcttggaataggctctgtggccacccatcgccgtaaggctccgggatggagacagcatggacagggacctcgcacaaaggcatgtcgggagggcctcctttccaaggcacagccccacctgctccttctcagcccacgacgggagcagagccatgtcgaagccgtgccccacacagggtggacaaggacatggcctgacagctcctcagaaatccttagagatttttccaaacgcaggttaccagggcttctgcagagagaggggcagcaggacgtgctgctgacagtccctggggacttacactgacttgcagtgagagcccacatctgccaccaggatggctcccagcaccaccgcgtcacaagcaccacactctccaccgtgggacgcccagatggctcggcaggcaggccgggctggggagctgacagcagacgcctgggactctgcccagcgtcctcacccacaaccttttaactgtaactggcagaggagacagcagggagggcagaaggtacagtgatggctaggatgcagttctaggttttgccagacatactttcaggggccactcctggctacctaattaatctacctgtgtataagaattttttagcttattaaatattccaagaggccaggcatggtggctcacgcctgtaatcccaacactctgagaggccgaggcagctggatcacgaggtcaagagttcaagaccagtttggtcaagatggtgaaacccccgtctctactaaaaatacaaaaattagccaggcatgacagcggatgcctgtaatcccagctattcgggaggctgaggcagagaatcgcttgaacttgggagggggaggttgcagtgagctgagatcaagccgctacactccaccttgggcaacagggtgagactctgactccatctcaaaaaaaaaa

SEQ ID NO: 641 - DNA, 1891 bp, Homo sapiens
gagtgttgtagagcctcgagcctgcgaggagcgcgccgcccgccagctccctgcgtcccgtcccgcgtccccgcgttcccgcgtcctgcgatccgccgccatggccagtgaggagctggcgtgcaagctggagcgccggctgcggcgcgaggaggccgaggagagtggcccccagctggctcccctcggcgccccagccccggagcccaagcccgagcccgagcctcccgcccgtgcgcccacggccagcgccgacgcggagctgagcgcccagctgagccggcggctggacatcaacgagggcgctgcgcggccccggcgctgcagggtcttcaacccctacacggagttccctgagttcagccgccgcctcatcaaggacctggagagcatgttcaaactgtatgacgctgggcgggatggcttcatcgacctgatggagctgaagctgatgatggagaagctgggggccccccagacccacctgggcctgaagagcatgatcaaggaggtggatgaggacttcgatggcaagctcagcttccgggagttcctgctcattttccacaaggccgcggcaggggagctgcaggaggacagtgggctgatggcgctggcaaagctttctgagatcgatgtggccctggagggtgtcagaggtgccaagaacttctttgaagccaaggtccaagccttgtcatcggccagtaagtttgaagcagagttgaaagctgagcaagatgagcggaagcgggaggaggaggagaggcggctccgccaggcagccttccagaaactcaaggccaacttcaatacatagtcctgctgaccttgccctctgcccacagctgtgcctcacagatgccccgagaagagatgactaggcatcttcatcactgctgtcggtcccctccctgagccagcatctccatccaccaccccgtgccagctcccgtgccagccttcattcctcccagtgtccaagcccctccaggagggtcctggggtgggccagatgcctgcccacctctgtctcctgcctctgctcctctgcccttcttatagccagaacttgtatcttctcagcaaccttcactttgtccttgtccctttaccattccccatcaaagagtagtctgctatatcaatttgtgtagatatgtctgtctttttgggtcctcagagaaaatgcccattttctcggagaattctctgcactcctctctgcttcacattcaacttccctgttctcatctttggtaggattctgccagttgcttttgcatcttctgttcctgggtaatggtgggtcttaatggaggctgggtggaccactgcccgtccactcttcaacaggaggaacagcatgccaccacagtaacacacattagagaaaggacagaggtctgctccttcctgccacctttctcctggccccttagcattcccccagtccctccctcttcaccttgctccgtctatgtcttcccagctcagccttttccccactcttaaatactgtactacttcactgtaagaacgaaagaatagttaggataccaatgagtaaaagggttcctgttcactctgactctgtgcaaattgtattacagtagaccgctgacgttcccaagtgacagatccagggcctttcaaacatccccaaagtcatggccatactcaccattagccagtttctaacatctgtttcagggtatccagctgtagatgttcttatcccccatacttgtgagttcttggggttgctcacaaatactaggggtttttgttgtatttttaacaaatatatcctaatgtcatatttattctcttttgtaactgctgtctttacaataaagaaatcatctgcctttctatcttaaaaaaaaaa

SEQ ID NO: 642 - DNA, 1770 bp, Homo sapiens
atggcggcggccgacggcgacgactcgctgtaccccatcgcggtgctcatagacgaactccgcaatgaggacgttcagcttcgcctcaacagcatcaagaagctgtccaccatcgccttggcccttggggttgaaaggacccgaagtgagcttctgcctttccttacagataccatctatgatgaagatgaggtcctcctggccctggcagaacagctgggaaccttcactaccctggtgggaggcccagagtacgtgcactgcctgctgccaccgctggagtcgctggccacagtggaggagacagtggtgcgggacaaggcagtggagtccttacgggccatctcacacgagcactcgccctctgacctggaggcgcactttgtgccgctagtgaagcggctggcgggcggcgactggttcacctcccgcacctcggcctgcggcctcttctccgtctgctacccccgagtgtccagtgctgtgaaggcggaacttcgacagtacttccggaacctgtgctcagatgacacccccatggtgcggcgggccgcagcctccaagctgggggagtttgccaaggtgctggagctggacaacgtcaagagtgagatcatccccatgttctccaacctggcctctgacgagcaggactcggtgcggctgctggcggtggaggcgtgcgtgaacatcgcccagcttctgccccaggaggatctggaggccctggtgatgcccactctgcgccaggccgctgaagacaagtcctggcgcgtccgctacatggtggctgacaagttcacagagctccagaaagcagtggggcctgagatcaccaagacagacctggtccctgccttccagaacctgatgaaagactgtgaggccgaggtgagggccgcagcctcccacaaggtcaaagagttctgtgaaaacctctcagctgactgtcgggagaatgtgatcatgtcccagatcttgccctgcatcaaggagctggtgtccgatgccaaccaacatgtcaagtctgccctggcctcagtcatcatgggtctctctcccatcttgggcaaagacaacaccatcgagcacctcttgcccctcttcctggctcagctgaaggatgagtgccctgaggtacggctgaacatcatctctaacctggactgtgtgaacgaggtgattggcatccggcagctgtcccagtccctgctccctgccattgtggagctggctgaggacgccaagtggcgggtgcggctggccatcattgagtacatgcccctcctggctggacagctgggagtggagttctttgatgagaaacttaactccttgtgcatggcctggcttgtggatcatgtatatgccatccgcgaggcagccaccagcaacctgaagaagctagtggaaaagtttgggaaggagtgggcccatgccacaatcatccccaaggtcttggccatgtccggagaccccaactacctgcaccgcatgactacgctcttctgcatcaatgtgctgtctgaggtctgtgggcaggacatcaccaccaagcacatgctacccacggttctgcgcatggctggggacccggttgccaatgtccgcttcaatgtggccaagtctctgcagaagatagggcccatcctggacaacagcaccttgcagagtgaagtcaagcccatcctagagaagctgacccaggaccaggatgtggacgtcaaatactttgcccaggaggctctgactgttctgtctctcgcctga

SEQ ID NO: 643 - DNA, 537 bp, Homo sapiens
atgtcgccctctggtcgcctgtgtcttcttaccatcgttggcctgattctccccaccagaggacagacgttgaaagataccacgtccagttcttcagcagactcaactatcatggacattcaggtcccgacacgagccccagatgcagtctacacagaactccagcccacctctccaaccccaacctggcctgctgatgaaacaccacaaccccagacccagacccagcaactggaaggaacggatgggcctctagtgacagatccagagacacacaagagcaccaaagcagctcatcccactgatgacaccacgacgctctctgagagaccatccccaagcacagacgtccagacagacccccagaccctcaagccatctggttttcatgaggatgaccccttcttctatgatgaacacaccctccggaaacgggggctgttggtcgcagctgtgctgttcatcacaggcatcatcatcctcaccagtggcaagtgcaggcagctgtcccggttatgccggaatcattgcaggtga

SEQ ID NO: 644 - DNA, 504 bp, Homo sapiens
atgttggtgcttcttgctttcatcatcgccttccacatcacctctgcagccttgctgttcattgccaccgtcgacaatgcctggtgggtaggagatgagttttttgcagatgtctggagaatatgtaccaacaacacgaattgcacagtcatcaatgacagctttcaagagtactccacgctgcaggcggtccaggccaccatgatcctctccaccattctctgctgcatcgccttcttcatcttcgtgctccagctcttccgcctgaagcagggagagaggtttgtcctaacctccatcatccagctaatgtcatgtctgtgtgtcatgattgcggcctccatttatacagacaggcgtgaagacattcacgacaaaaacgcgaaattctatcccgtgaccagagaaggcagctacggctactcctacatcctggcgtgggtggccttcgcctgcaccttcatcagcggcatgatgtacctgatactgaggaagcgcaaatag

SEQ ID NO: 645 - DNA, 4851 bp, Homo sapiens
atgccggcgcgtaccgccccagcccgggtgcccacactggccgtcccggccatctcgctgcccgacgatgtccgcaggcggctcaaagatttggaaagagacagcttaacagaaaaggaatgtgtgaaggagaaattgaatctcttgcacgaatttctgcaaacagaaataaagaatcagttatgtgacttggaaaccaaattacgtaaagaagaattatccgaggagggctacctggctaaagtcaaatcccttttaaataaagatttgtccttggagaacggtgctcatgcttacaaccgggaagtgaatggacgtctagaaaacgggaaccaagcaagaagtgaagcccgtagagtgggaatggcagatgccaacagcccccccaaacccctttccaaacctcgcacgcccaggaggagcaagtccgatggagaggctaagcctgaaccttcacctagccccaggattacaaggaaaagcaccaggcaaaccaccatcacatctcattttgcaaagggccctgccaaacggaaacctcaggaagagtctgaaagagccaaatcggatgagtccatcaaggaagaagacaaagaccaggatgagaagagacgtagagttacatccagagaacgagttgctagaccgcttcctgcagaagaacctgaaagagcaaaatcaggaacgcgcactgaaaaggaagaagaaagagatgaaaaagaagaaaagagactccgaagtcaaaccaaagaaccaacacccaaacagaaactgaaggaggagccggacagagaagccagggcaggcgtgcaggctgacgaggacgaagatggagacgagaaagatgagaagaagcacagaagtcaacccaaagatctagctgccaaacggaggcccgaagaaaaagaacctgaaaaagtaaatccacagatttctgatgaaaaagacgaggatgaaaaggaggagaagagacgcaaaacgacccccaaagaaccaacggagaaaaaaatggctcgcgccaaaacagtcatgaactccaagacccaccctcccaagtgcattcagtgcgggcagtacctggacgaccctgacctcaaatatgggcagcacccaccagacgcggtggatgagccacagatgctgacaaatgagaagctgtccatctttgatgccaacgagtctggctttgagagttatgaggcgcttccccagcacaaactgacctgcttcagtgtgtactgtaagcacggtcacctgtgtcccatcgacaccggcctcatcgagaagaatatcgaactcttcttttctggttcagcaaaaccaatctatgatgatgacccgtctcttgaaggtggtgttaatggcaaaaatcttggccccataaatgaatggtggatcactggctttgatggaggtgaaaaggccctcatcggcttcagcacctcatttgccgaatacattctgatggatcccagtcccgagtatgcgcccatatttgggctgatgcaggagaagatctacatcagcaagattgtggtggagttcctgcagagcaattccgactcgacctatgaggacctgatcaacaagatcgagaccacggttcctccttctggcctcaacttgaaccgcttcacagaggactccctcctgcgacacgcgcagtttgtggtggagcaggtggagagttatgacgaggccggggacagtgatgagcagcccatcttcctgacgccctgcatgcgggacctgatcaagctggctggggtcacgctgggacagaggcgagcccaggcgaggcggcagaccatcaggcattctaccagggagaaggacaggggacccacgaaagccaccaccaccaagctggtctaccagatcttcgatactttcttcgcagagcaaattgaaaaggatgacagagaagacaaggagaacgcctttaagcgccggcgatgtggcgtctgtgaggtgtgtcagcagcctgagtgtgggaaatgtaaagcctgcaaggacatggttaaatttggtggcagtggacggagcaagcaggcttgccaagagcggaggtgtcccaatatggccatgaaggaggcagatgacgatgaggaagtcgatgataacatcccagagatgccgtcacccaaaaaaatgcaccaggggaagaagaagaaacagaacaagaatcgcatctcttgggtcggagaagccgtcaagactgatgggaagaagagttactataagaaggtgtgcattgatgcggaaaccctggaagtgggggactgtgtctctgttattccagatgattcctcaaaaccgctgtatctagcaagggtcacggcgctgtgggaggacagcagcaacgggcagatgtttcacgcccactggttctgcgctgggacagacacagtcctcggggccacgtcggaccctctggagctgttcttggtggatgaatgtgaggacatgcagctttcatatatccacagcaaagtgaaagtcatctacaaagccccctccgaaaactgggccatggagggaggcatggatcccgagtccctgctggagggggacgacgggaagacctacttctaccagctgtggtatgatcaagactacgcgagattcgagtcccctccaaaaacccagccaacagaggacaacaagttcaaattctgtgtgagctgtgcccgtctggctgagatgaggcaaaaagaaatccccagggtcctggagcagctcgaggacctggatagccgggtcctctactactcagccaccaagaacggcatcctgtaccgagttggtgatggtgtgtacctgccccctgaggccttcacgttcaacatcaagctgtccagtcccgtgaaacgcccacggaaggagcccgtggatgaggacctgtacccagagcactaccggaaatactccgactacatcaaaggcagcaacctggatgcccctgagccctaccgaattggccggatcaaagagatcttctgtcccaagaagagcaacggcaggcccaatgagactgacatcaaaatccgggtcaacaagttctacaggcctgagaacacccacaagtccactccagcgagctaccacgcagacatcaacctgctctactggagcgacgaggaggccgtggtggacttcaaggctgtgcagggccgctgcaccgtggagtatggggaggacctgcccgagtgcgtccaggtgtactccatgggcggccccaaccgcttctacttcctcgaggcctataatgcaaagagcaaaagctttgaagatcctcccaaccatgcccgtagccctggaaacaaagggaagggcaagggaaaagggaagggcaagcccaagtcccaagcctgtgagccgagcgagccagagatagagatcaagctgcccaagctgcggaccctggatgtgttttctggctgcggggggttgtcggagggattccaccaagcaggcatctctgacacgctgtgggccatcgagatgtgggaccctgcggcccaggcgttccggctgaacaaccccggctccacagtgttcacagaggactgcaacatcctgctgaagctggtcatggctggggagaccaccaactcccgcggccagcggctgccccagaagggagacgtggagatgctgtgcggcgggccgccctgccagggcttcagcggcatgaaccgcttcaattcgcgcacctactccaagttcaaaaactctctggtggtttccttcctcagctactgcgactactaccggccccggttcttcctcctggagaatgtcaggaactttgtctccttcaagcgctccatggtcctgaagctcaccctccgctgcctggtccgcatgggctatcagtgcaccttcggcgtgctgcaggccggtcagtacggcgtggcccagactaggaggcgggccatcatcctggccgcggcccctggagagaagctccctctgttcccggagccactgcacgtgtttgctccccgggcctgccagctgagcgtggtggtggatgacaagaagtttgtgagcaacataaccaggttgagctcgggtcctttccggaccatcacggtgcgagacacgatgtccgacctgccggaggtgcggaatggagcctcggcactggagatctcctacaacggggagcctcagtcctggttccagaggcagctccggggcgcacagtaccagcccatcctcagggaccacatctgtaaggacatgagtgcattggtggctgcccgcatgcggcacatccccttggccccagggtcagactggcgcgatctgcccaacatcgaggtgcggctctcagacggcaccatggccaggaagctgcggtatacccaccatgacaggaagaacggccgcagcagctctggggccctccgtggggtctgctcctgcgtggaagccggcaaagcctgcgaccccgcagccaggcagttcaacaccctcatcccctggtgcctgccccacaccgggaaccggcacaaccactgggctggcctctatggaaggctcgagtgggacggcttcttcagcacaaccgtcaccaaccccgagcccatgggcaagcagggccgcgtgctccacccagagcagcaccgtgtggtgagcgtgcgggagtgtgcccgctcccagggcttccctgacacctaccggctcttcggcaacatcctggacaagcaccggcaggtgggcaatgccgtgccaccgcccctggccaaagccattggcttggagatcaagctttgtatgttggccaaagcccgagagagtgcctcagctaaaataaaggaggaggaagctgctaaggactag

SEQ ID NO: 646 - DNA, 558 bp, Homo sapiens
atgaagctggtttccgtcgccctgatgtacctgggttcgctcgccttcctaggcgctgacaccgctcggttggatgtcgcgtcggagtttcgaaagaagtggaataagtgggctctgagtcgtgggaagagggaactgcggatgtccagcagctaccccaccgggctcgctgacgtgaaggccgggcctgcccagacccttattcggccccaggacatgaagggtgcctctcgaagccccgaagacagcagtccggatgccgcccgcatccgagtcaagcgctaccgccagagcatgaacaacttccagggcctccggagctttggctgccgcttcgggacgtgcacggtgcagaagctggcacaccagatctaccagttcacagataaggacaaggacaacgtcgcccccaggagcaagatcagcccccagggctacggccgccggcgccggcgctccctgcccgaggccggcccgggtcggactctggtgtcttctaagccacaagcacacggggctccagcccccccgagtggaagtgctccccactttctttag

SEQ ID NO: 647 - DNA, 294 bp, Homo sapiens
atgccatctcaaatggaacacgccatggaaaccatgatgtttacatttcacaaattcgctggggataaaggctacttaacaaaggaggacctgagagtactcatggaaaaggagttccctggatttttggaaaatcaaaaagaccctctggctgtggacaaaataatgaaggacctggaccagtgtagagatggcaaagtgggcttccagagcttcttttccctaattgcgggcctcaccattgcatgcaatgactattttgtagtacacatgaagcagaagggaaagaagtag

SEQ ID NO: 648 - DNA, 663 bp, Homo sapiens
atgtccatgggcctggagatcacgggcaccgcgctggccgtgctgggctggctgggcaccatcgtgtgctgcgcgttgcccatgtggcgcgtgtcggccttcatcggcagcaacatcatcacgtcgcagaacatctgggagggcctgtggatgaactgcgtggtgcagagcaccggccagatgcagtgcaaggtgtacgactcgctgctggcactgccacaggaccttcaggcggcccgcgccctcatcgtggtggccatcctgctggccgccttcgggctgctagtggcgctggtgggcgcccagtgcaccaactgcgtgcaggacgacacggccaaggccaagatcaccatcgtggcaggcgtgctgttccttctcgccgccctgctcaccctcgtgccggtgtcctggtcggccaacaccattatccgggacttctacaaccccgtggtgcccgaggcgcagaagcgcgagatgggcgcgggcctgtacgtgggctgggcggccgcggcgctgcagctgctggggggcgcgctgctctgctgctcgtgtcccccacgcgagaagaagtacacggccaccaaggtcgtctactccgcgccgcgctccaccggcccgggagccagcctgggcacaggctacgaccgcaaggactacgtctaa

SEQ ID NO: 649 - DNA, 831 bp, Homo sapiens
atggcggctgggttcaaaaccgtggaacctctggagtattacaggagatttctgaaagagaactgccgtcctgatggaagagaacttggtgaattcagaaccacaactgtcaacatcggttcaattagtaccgcagatggttctgctttagtgaagttgggaaatactacagtaatctgtggagttaaagcagaatttgcagcaccatcaacagatgcccctgataaaggatacgttgttcctaatgtggatctaccacccctgtgttcatcgagattccggtctggacctcctggagaagaggcccaagtggctagccagttcattgcagatgtcattgaaaattcacagataattcagaaagaggacttatgcatttctccaggaaagcttgtctgggttctatactgtgatctcatttgcctcgactacgatggaaacattttggatgcctgcacatttgctttgctagcggctttaaaaaatgtacagttgcctgaagttactataaatgaagaaactgctttagcagaagttaatttaaagaagaaaagttatttgaatattagaactcatccagttgcaacttcctttgctgtgtttgatgacactttgcttatagttgaccctactggagaggaggaacatctggcaacaggaaccttaacaatagtaatggatgaggaaggcaaactctgttgtcttcacaaaccaggtggaagtgggctaactggagctaaacttcaggactgtatgagccgagcagttacaagacacaaagaagttaaaaaactgatggatgaagtaattaagagtatgaaacccaaataa

SEQ ID NO: 650 - DNA, 1113 bp, Homo sapiens
atgtcactgcatcagtttttactagagccaatcacctgtcatgcctggaacagggatcgtactcagattgccctcagtcccaataatcacgaagtgcacatctataagaagaacgggagccagtgggtgaaagctcatgaactcaaggagcacaacggacacatcacaggtattgactgggctcccaagagcgaccgtattgtcacttgtggggcagaccgcaatgcctatgtctggagtcagaaagatggtgtttggaagccaaccctggtgatcctgagaattaatcgcgcagctacttttgtgaagtggtcccccctagagaacaaatttgctgtgggaagtggagcacgactcatttctgtttgttactttgaggctgaaaatgactggtgggtgagcaagcacattaaaaagccgattcgctccacagtcctcagcttggattggcatcccaacaacgttttgctggcagcaggatcatgtgacttcaaatgcagagtgttttctgcctacattaaagaagtggatgaaaagaaagccagcacgccctggggcagcaagatgccttttgggcagctgatgtcagagtttggtggcagtggcactggtggctgggtccacggggtaagcttctctgccagtgggagccgcctggcctgggtcagccacgacagcaccgtgtctgttgctgatgcctcaaaaagtgtgcaggtctcgactctgaagacagagttcctgccgctcctaagtgtgtcatttgtctcagagaacagcgtcgtggctgctggccatgactgctgcccaatgctctttatctacgatgaccgcggctgcctgaccttcgtctccaagttagatattccaaaacagagcatccaacgcaacatgtctgccatggaacgcttccgcaacatggacaagagagccacaactgaggaccgcaacacggccttggagacgctgcaccagaatagcatcactcaagtctctatttatgaggtggacaagcaagattgtcgcaaattttgcactactggcatcgatggagccatgacaatttgggatttcaagaccctcgagtcttccatccagggcctccggataatgtga

SEQ ID NO: 651 - DNA, 1115 bp, Homo sapiens
ttttttttttttcaacaaaaagttaaggttttatttagaatatcattttagagacaaaaagcagttcactttatttagcaaaataaacttaaccaatgcatttaaatatagtaaattcaagaactttggtggttttttttcttagatgcttgcttttttgccagttggagtttctgtcttctggcccaacaggcttctttccaagttaatgcagctatattccaaggaagtgttttatgaaatctgaatactcaaacaccccttctgtattttcactcaaccatcattgtattagatgatacataaggaaagtgacttagggaagtaagttcagaaggaaatgtgttcccttctccctcatattatcttttcaacagaggcctggattgctaaatggattatgaaagcaaattgctactgggaggtgatggtcaaaagcaaacttagatggttttcacaccatctgtcatcatgactcaaagggaaatgctagccacaccatttttccagtgaagccactgctttacacagaagatacacatagcttcctattgttattttcttttctaattatgtacatttagaaaaaaaatacaacactgtgttaaacagcaggacagctagcaatggaacatacaacactatgctgaaaaaccacaacagcttggttaagcggaggagagaaacagagatggccttcatggagtgaagctgtcaatgcctgccatctccttagtctgtgacggatctgcactctgagggcaggccttctgagcgccgccactttgccaggcgctgcttaaaccatttctgggtctcctcctcggaaaggcctgcctcggccgcgatgaggcacagcgtggtggaatccgggtgcttgtcgaccttgttgaagttgtactccaggatttccacctggtcctctgtggggccgctcgcggtctccgccgacatggtccctgcgcgctttgacacacaacttcagagctgggaagaaccttggaaattacctcttccagtcttcttctgtaacagcccaggaaaatgagcataggaagactaactttctgaatgttgcccagctggtgacctgcgtccgctagacccttctcagg

SEQ ID NO: 652 - DNA, 1260 bp, Homo sapiens
atggctgtttcaaatattagatatggagcagcagttacaaaggaagtaggaatggacctaaaaaacatgggtgctaaaaatgtgtgcttgatgacagacaagaacctctccaagctccctcctgtgcaagtagctatggattccctagtgaagaatggcatcccctttacggtttatgataatgtgagagtggaaccaacggattcaagcttcatggaagctattgagtttgcccaaaagggagcttttgatgcctatgttgctgtcggtggtggctctaccatggacacctgtaaggctgctaatctgtatgcatccagccctcattctgatttcctagattatgtcagtgcccccattggcaagggaaagcctgtgtctgtgcctcttaagcctctgattgcagtgccaactacctcaggaaccgggagtgaaactactggggttgccatttttgactatgaacacttgaaagtaaaaattggcatcacttcgagagccatcaaacccacactgggactgattgatcctctgcacaccctccacatgcctgcccgagtggtcgccaacagtggctttgatgtgctttgccatgccctggagtcatacaccaccctgccctaccacctgcggagcccctgcccttcaaatcccatcacacggcctgcgtaccagggcagcaacccaatcagtgacatttgggctatccacgcgctgcggatcgtggctaagtatctgaagagggctgtcagaaatcccgatgatcttgaagcaaggtctcatatgcacttggcaagtgcttttgctggcatcggctttggaaatgctggtgttcatctgtgccatggaatgtcttacccaatttcaggtttagtgaagatgtataaagcaaaggattacaatgtggatcacccactggtgccccatggcctttctgtggtgctcacgtccccagcggtgttcactttcaccgcccagatgtttccagagcgacacctggagatggcagaaatactgggagccgacacccgcactgccaggatccaagatgcagggctggtgttggcagacacgctccggaaattcttattcgatctggatgttgatgatggcctagcagctgttggttactccaaagctgatatccccgcactagtgaaaggaacgctgccccaggaaagggtcaccaagcttgcaccccgtccccagtcagaagaggatctggctgctctgtttgaagcttcaatgaaactgtattaa

SEQ ID NO: 653 - DNA, 279 bp, Homo sapiens
atggccaaacgtaccaagaaagtcgggatcgtcggtaaatacgggacccgctatggggcctccctccggaaaatggtgaagaaaattgaaatcagccagcacgccaagtacacttgctctttctgtggcaaaaccaagatgaagagacgagctgtggggatctggcactgtggttcctgcatgaagacagtggctggcggtgcctggacgtacaataccacttccgctgtcacggtaaagtccgccatcagaagactgaaggagttgaaagaccagtag

SEQ ID NO: 654 - DNA, 2175 bp, Homo sapiens
atgcctgaggaagtgcaccatggagaggaggaggtggagacttttgcctttcaggcagaaattgcccaactcatgtccctcatcatcaataccttctattccaacaaggagattttccttcgggagttgatctctaatgcttctgatgccttggacaagattcgctatgagagcctgacagacccttcgaagttggacagtggtaaagagctgaaaattgacatcatccccaaccctcaggaacgtaccctgactttggtagacacaggcattggcatgaccaaagctgatctcataaataatttgggaaccattgccaagtctggtactaaagcattcatggaggctcttcaggctggtgcagacatctccatgattgggcagtttggtgttggcttttattctgcctacttggtggcagagaaagtggttgtgatcacaaagcacaacgatgatgaacagtatgcttgggagtcttctgctggaggttccttcactgtgcgtgctgaccatggtgagcccattggcaggggtaccaaagtgatcctccatcttaaagaagatcagacagagtacctagaagagaggcgggtcaaagaagtagtgaagaagcattctcagttcataggctatcccatcaccctttatttggagaaggaacgagagaaggaaattagtgatgatgaggcagaggaagagaaaggtgagaaagaagaggaagataaagatgatgaagaaaagcccaagatcgaagatgtgggttcagatgaggaggatgacagcggtaaggataagaagaagaaaactaagaagatcaaagagaaatacattgatcaggaagaactaaacaagaccaagcctatttggaccagaaaccctgatgacatcacccaagaggagtatggagaattctacaagagcctcactaatgactgggaagaccacttggcagtcaagcacttttctgtagaaggtcagttggaattcagggcattgctatttattcctcgtcgggctccctttgacctttttgagaacaagaagaaaaagaacaacatcaaactctatgtccgccgtgtgttcatcatggacagctgtgatgagttgataccagagtatctcaattttatccgtggtgtggttgactctgaggatctgcccctgaacatctcccgagaaatgctccagcagagcaaaatcttgaaagtcattcgcaaaaacattgttaagaagtgccttgagctcttctctgagctggcagaagacaaggagaattacaagaaattctatgaggcattctctaaaaatctcaagcttggaatccacgaagactccactaaccgccgccgcctgtctgagctgctgcgctatcatacctcccagtctggagatgagatgacatctctgtcagagtatgtttctcgcatgaaggagacacagaagtccatctattacatcactggtgagagcaaagagcaggtggccaactcagcttttgtggagcgagtgcggaaacggggcttcgaggtggtatatatgaccgagcccattgacgagtactgtgtgcagcagctcaaggaatttgatgggaagagcctggtctcagttaccaaggagggtctggagctgcctgaggatgaggaggagaagaagaagatggaagagagcaaggcaaagtttgagaacctctgcaagctcatgaaagaaatcttagataagaaggttgagaaggtgacaatctccaatagacttgtgtcttcaccttgctgcattgtgaccagcacctacggctggacagccaatatggagcggatcatgaaagcccaggcacttcgggacaactccaccatgggctatatgatggccaaaaagcacctggagatcaaccctgaccaccccattgtggagacgctgcggcagaaggctgaggccgacaagaatgataaggcagttaaggacctggtggtgctgctgtttgaaaccgccctgctatcttctggcttttcccttgaggatccccagacccactccaaccgcatctatcgcatgatcaagctaggtctaggtattgatgaagatgaagtggcagcagaggaacccaatgctgcagttcctgatgagatcccccctctcgagggcgatgaggatgcgtctcgcatggaagaagtcgattag

SEQ ID NO: 655 - DNA, 1020 bp, Homo sapiens
atgtctactgttcacgaaatcctgtgcaagctcagcttggagggtgatcactctacacccccaagtgcatatgggtctgtcaaagcctatactaactttgatgctgagcgggatgctttgaacattgaaacagccatcaagaccaaaggtgtggatgaggtcaccattgtcaacattttgaccaaccgcagcaatgcacagagacaggatattgccttcgcctaccagagaaggaccaaaaaggaacttgcatcagcactgaagtcagccttatctggccacctggagacggtgattttgggcctattgaagacacctgctcagtatgacgcttctgagctaaaagcttccatgaaggggctgggaaccgacgaggactctctcattgagatcatctgctccagaaccaaccaggagctgcaggaaattaacagagtctacaaggaaatgtacaagactgatctggagaaggacattatttcggacacatctggtgacttccgcaagctgatggttgccctggcaaagggtagaagagcagaggatggctctgtcattgattatgaactgattgaccaagatgctcgggatctctatgacgctggagtgaagaggaaaggaactgatgttcccaagtggatcagcatcatgaccgagcggagcgtgccccacctccagaaagtatttgataggtacaagagttacagcccttatgacatgttggaaagcatcaggaaagaggttaaaggagacctggaaaatgctttcctgaacctggttcagtgcattcagaacaagcccctgtattttgctgatcggctgtatgactccatgaagggcaaggggacgcgagataaggtcctgatcagaatcatggtctcccgcagtgaagtggacatgttgaaaattaggtctgaattcaagagaaagtacggcaagtccctgtactattatatccagcaagacactaagggcgactaccagaaagcgctgctgtacctgtgtggtggagatgactga

SEQ ID NO: 656 - DNA, 378 bp, Homo sapiens
atggctcccgcaaagaagggtggcgagaagaaaaagggccgttctgccatcaacgaagtggtaacccgagaatacaccatcaacattcacaagcgcatccatggagtgggcttcaagaagcgtgcacctcgggcactcaaagagattcggaaatttgccatgaaggagatgggaactccagatgtgcgcattgacaccaggctcaacaaagctgtctgggccaaaggaataaggaatgtgccataccgaatccgtgtgcggctgtccagaaaacgtaatgaggatgaagattcaccaaataagctatatactttggttacctatgtacctgttaccactttcaaaaatctacagacagtcaatgtggatgagaactaa

SEQ ID NO: 657 - DNA, 1671 bp, Homo sapiens
atggagctgtgcgggctggggctgccccggccgcccatgctgctggcgctgctgttggcgacactgctggcggcgatgttggcgctgctgactcaggtggcgctggtggtgcaggtggcggaggcggctcgggccccgagcgtctcggccaagccggggccggcgctgtggcccctgccgctctcggtgaagatgaccccgaacctgctgcatctcgccccggagaacttctacatcagccacagccccaattccacggcgggcccctcctgcaccctgctggaggaagcgtttcgacgatatcatggctatatttttggtttctacaagtggcatcatgaacctgctgaattccaggctaaaacccaggttcagcaacttcttgtctcaatcacccttcagtcagagtgtgatgctttccccaacatatcttcagatgagtcttatactttacttgtgaaagaaccagtggctgtccttaaggccaacagagtttggggagcattacgaggtttagagacctttagccagttagtttatcaagattcttatggaactttcaccatcaatgaatccaccattattgattctccaaggttttctcacagaggaattttgattgatacatccagacattatctgccagttaagattattcttaaaactctggatgccatggcttttaataagtttaatgttcttcactggcacatagttgatgaccagtctttcccatatcagagcatcacttttcctgagttaagcaataaaggaagctattctttgtctcatgtttatacaccaaatgatgtccgtatggtgattgaatatgccagattacgaggaattcgagtcctgccagaatttgatacccctgggcatacactatcttggggaaaaggtcagaaagacctcctgactccatgttacagtagacaaaacaagttggactcttttggacctataaaccctactctgaatacaacatacagcttccttactacatttttcaaagaaattagtgaggtgtttccagatcaattcattcatttgggaggagatgaagtggaatttaaatgttgggaatcaaatccaaaaattcaagatttcatgaggcaaaaaggctttggcacagattttaagaaactagaatctttctacattcaaaaggttttggatattattgcaaccataaacaagggatccattgtctggcaggaggtttttgatgataaagcaaagcttgcgccgggcacaatagttgaagtatggaaagacagcgcatatcctgaggaactcagtagagtcacagcatctggcttccctgtaatcctttctgctccttggtacttagatttgattagctatggacaagattggaggaaatactataaagtggaacctcttgattttggcggtactcagaaacagaaacaacttttcattggtggagaagcttgtctatggggagaatatgtggatgcaactaacctcactccaagattatggcctcgggcaagtgctgttggtgagagactctggagttccaaagatgtcagagatatggatgacgcctatgacagactgacaaggcaccgctgcaggatggtcgaacgtggaatagctgcacaacctctttatgctggatattgtaaccatgagaacatgtaa

SEQ ID NO: 658 - DNA, 795 bp, Homo sapiens
atggaagcgtttttggggtcgcggtccggactttgggcggggggtccggccccaggacagttttaccgcattccgtccactcccgattccttcatggatccggcgtctgcactttacagaggtccaatcacgcggacccagaaccccatggtgaccgggacctcagtcctcggcgttaagttcgagggcggagtggtgattgccgcagacatgctgggatcctacggctccttggctcgtttccgcaacatctctcgcattatgcgagtcaacaacagtaccatgctgggtgcctctggcgactacgctgatttccagtatttgaagcaagttctcggccagatggtgattgatgaggagcttctgggagatggacacagctatagtcctagagctattcattcatggctgaccagggccatgtacagccggcgctcgaagatgaaccctttgtggaacaccatggtcatcggaggctatgctgatggagagagcttcctcggttatgtggacatgcttggtgtagcctatgaagccccttcgctggccactggttatggtgcatacttggctcagcctctgctgcgagaagttctggagaagcagccagtgctaagccagaccgaggcccgcgacttagtagaacgctgcatgcgagtgctgtactaccgagatgcccgttcttacaaccggtttcaaaccgccactgtcaccgaaaaaggtgttgaaatagagggaccattgtctacagagaccaactgggatattgcccacatgatcagtggctttgaatga

SEQ ID NO: 659 - DNA, 1545 bp, Homo sapiens
atggccgactacctgattagtgggggcacgtcctacgtgccagacgacggactcacagcacagcagctcttcaactgcggagacggcctcacctacaatgactttctcattctccctgggtacatcgacttcactgcagaccaggtggacctgacttctgctctgaccaagaaaatcactcttaagaccccactggtttcctctcccatggacacagtcacagaggctgggatggccatagcaatggcgcttacaggcggtattggcttcatccaccacaactgtacacctgaattccaggccaatgaagttcggaaagtgaagaaatatgaacagggattcatcacagaccctgtggtcctcagccccaaggatcgcgtgcgggatgtttttgaggccaaggcccggcatggtttctgcggtatcccaatcacagacacaggccggatggggagccgcttggtgggcatcatctcctccagggacattgattttctcaaagaggaggaacatgactgtttcttggaagagataatgacaaagagggaagacttggtggtagcccctgcaggcatcacactgaaggaggcaaatgaaattctgcagcgcagcaagaagggaaagttgcccattgtaaatgaagatgatgagcttgtggccatcattgcccggacagacctgaagaagaatcgggactacccactagcctccaaagatgccaagaaacagctgctgtgtggggcagccattggcactcatgaggatgacaagtataggctggacttgctcgcccaggctggtgtggatgtagtggttttggactcttcccagggaaattccatcttccagatcaatatgatcaagtacatcaaagacaaataccctaatctccaagtcattggaggcaatgtggtcactgctgcccaggccaagaacctcattgatgcaggtgtggatgccctgcgggtgggcatgggaagtggctccatctgcattacgcaggaagtgctggcctgtgggcggccccaagcaacagcagtgtacaaggtgtcagagtatgcacggcgctttggtgttccggtcattgctgatggaggaatccaaaatgtgggtcatattgcgaaagccttggcccttggggcctccacagtcatgatgggctctctcctggctgccaccactgaggcccctggtgaatacttcttttccgatgggatccggctaaagaaatatcgcggtatgggttctctcgatgccatggacaagcacctcagcagccagaacagatatttcagtgaagctgacaaaatcaaagtggcccagggagtgtctggtgctgtgcaggacaaagggtcaatccacaaatttgtcccttacctgattgctggcatccaacactcatgccaggacattggtgccaagagcttgacccaagtccgagccatgatgtactctggggagcttaagtttgagaagagaacgtcctcagcccaggtggaaggtggcgtccatagcctccattcgtatgagaagcggcttttctga

SEQ ID NO: 660 - DNA, 1387 bp, Homo sapiens
ttttttttttttccttttgaaaaatatttattgagtataaataaatgtcctatacattaaatatcaagaaatattcataattgattacaagtcaagatgtaatactgagggaaccatagaatcaaaatacccactcatgatacagtagtgataattccattccaataatggacacagtaacgacttgttcacaagacacaacaaaacccatcaaaaaggccatcactttaaccaacctataataccacaatagaaaatgattctgaatcataatatgaacagccccaataatctcatctttgtcttatcaatttatcaggtcattttgagactgtagagttacactgtcatagacttttaagattccatttccttagttttatttcaaattattattaatgaatgaaaacaagtcatacgagctaaaaatacttttaaactgagttcgtttttcataagaaaaaaaggaatcaaattttagtacgaagaaagcatttcccaagcaatgagtctcttaatggaaaaaataaaagagcaatgtaattaaactttccttcaaagaaaggaaagaaacctaaatctgttatggcaaatttggaaagataaatatttcctagtcccataatatgtgtttgttttacaagatatgcttgaatgatgcaaatctatgaagcagggatctgtggcaatccaaattcatccaccagaactccatccttgttttttgtatcagtgggaacaccttctggaattgcaggtgcagatgctgcctcatccaaataagaactgtcttcatcagccagaagctcatcacctagtgcatccaactctgcttctaaatcatcttcatccagttctggggtgccataactgcgactcagtgcttcttggatttcatttgcatcttccatcatatcctctagctggtcttgtaaatcctcaatctggtcgatcttcacttgcttgtatgccttcttcatttcctttactcccagtttcatagcatcaaccgtggtcttggtgtccttcaaagactggatggtataattggcttgttccatgttgaatgactgttgggcaagattgtcccgctgctgctcatacatcctcttttgctttaaaactcgcaaggctttctgcttgaccatattctttgcaggaccctctctcatcttcttgatctgatccttatacttcactagctcagcatccaatcgagaaatcttcttgtcaatggattctgctctactgtccaccgtgccaatgcagtcagtcaggctgggcggcggagccttgggtttcgctttcccgaagagtcggttcatcttgagcagccgcgaagaaacccaaacactagagcaaaaccagaaacggaagcagagtcact

SEQ ID NO: 661 - DNA, 1680 bp, Homo sapiens
atgagtgatgcccaggatggtccccgagtacgatacaacccctataccacccgacctaaccgtcggggtgatacttggcatgatcgagatcgcattcatgttactgtgcggagagacagagctcctccagagagaggaggggctggcaccagccaggatgggacctcaaagaactgcttcaagattacaattccttatggcagaaagtatgacaaggcatggctcctgagcatgattcagagcaagtgcagtgtgcccttcacccctattgagtttcactatgagaatacacgggcccagttcttcgttgaagacgccagtactgcctctgcattgaaggctgtcaactataagattttggatcgggagaaccgaaggatatctatcatcatcaactcttctgctccaccccacactatactgaatgaactgaagccagaacaagtagaacagctaaagctgatcatgagcaaacgatacgatggctcccaacaagcccttgacctcaaaggcctccgttcagacccagatttggtggcccagaacattgacgttgtcctgaatcgcagaagctgtatggcagctaccctgaggatcattgaagagaacatccctgagctattgtccttgaacttgagcaacaacaggctgtacaggctggatgacatgtctagcattgttcagaaggcacccaacctgaagatcctaaacctttctggaaatgaattgaagtctgagcgggaattggacaagataaaggggctgaagctagaagagctctggctcgatggaaactccctgtgtgacaccttccgagaccagtccacctacatcagcgccattcgcgaacgatttcccaagttactacgcctggatggccatgagctacccccaccaattgcctttgatgttgaagcccccacgacgttaccgccctgcaagggaagctattttggaacagaaaacttgaagagtctggtcttgcacttcctgcaacagtactatgcaatttacgactctggagaccgacaagggctcctggatgcctaccatgatggggcctgctgttccctgagcattcctttcattcctcagaaccctgcccgaagcagcttagccgagtatttcaaggatagcagaaatgtgaagaagcttaaagaccctaccttgcggttccggctgctgaagcacacgcgtctcaacgttgttgccttcctcaatgagttgcccaaaacccagcacgacgtcaattccttcgtggtagacataagcgcccagacaagcacattgctgtgtttttctgtcaatggagtcttcaaggaagtggacggaaagtcccgggattctttgcgagccttcacccggacattcattgctgttcctgctagcaattcagggctatgtattgtaaatgatgagctatttgtgcggaatgccagttctgaagagatccaaagagccttcgctatgcctgcacccacgccttcctccagcccggtgcccaccctctctccagagcagcaggaaatgttgcaagcattctctacccagtctggcatgaacctcgagtggtcccagaagtgccttcaggacaacaactgggactacaccagatctgcccaggccttcactcatctcaaggccaagggcgagatcccagaagtggcattcatgaagtga

SEQ ID NO: 662 - DNA, 2748 bp, Homo sapiens
atggcggacgaggccttagctgggctggatgagggagcccttcggaagctgctggaggtcacagcagatctggcagagcggcggcgcatccgctcagccatccgggaactgcagcggcaggagctggagcgcgaggaggaggccctggcatccaagcgtttccgtgccgagcggcaggacaacaaggagaactggctgcactctcagcagcgggaagctgagcagcgggctgccctggcacggctggcagggcagctggagtccatgaacgatgtggaggaattgactgcactgttgcgaagcgctggtgagtatgaggagcgcaagctgatccgagctgccatccgccgtgtacgggctcaggagattgaggctgccaccttggctgggaggttgtacagcgggcgtcccaacagtggctcaagagaggacagcaaggggctagcggcacacaggctggaacagtgtgaggtgccagagcgagaggaacaggaacagcaggcagaggtttcaaagccaacccccacccctgaaggcaccagccaggatgtgaccacagtgacactcctgctgcgagccccacctgggagcacatccagctcacctgcctcacccagcagttcacccacccctgcctctcctgagcctccattggagcctgccgaggcccagtgccttacagctgaggttccaggcagcccagagccaccccccagcccacccaagaccaccagccctgagcctcaggagtctccaacgctccccagcactgagggccaggtggtcaacaagcttctgtctggccccaaagagacccctgctgcccagagcccccccagaggcccctctgacaccaagagagcagacgtggctggaccccgaccctgccaacgctccctgtcggtgctcagcccccgccaaccagcccagaaccgagagtccaccccccttgccagcggaccttcctcattccagcgggctggctctgtgcgggatcgtgtccacaagttcacatctgattctcctatggctgctaggctccaggatggcacaccccaggctgccctaagtcccctgaccccccgcaaggctcctgggcccctccctcaccagcaccacccctgcgtcctcctccagcggctcctcctctcggggcccagtgatacctcctcccggttcagcaaggagcaacgaggagtagcccagcccctggcccagcttcgaagctgcccccaggaggagggccccagggggcggggcttggctgctaggccccttgaaaacagagcaggggggcctgtggcacgttcagaggagcctggtgccccgctgcccgtggccgtcggcactgccgagccaggggacagtatgaagaccacattcaccatcgagatcaaggacggccgtggccaggcctccacaggccgggtgctgctgcccacaggcaaccagagggcagaactgacactggggctgcgggcgcccccgaccctactcagcaccagtagtgggggcaagagcaccatcacccgtgtcaacagccctgggaccctggctcggctgggcagtgtcactcatgtcaccagcttcagccatgccccccccagtagccgaggaggctgcagcatcaagatggaagcagagccagcagagcctctcgctgcagcagtggaagcggccaatggggctgagcagacccgagtgaacaaagcaccagaagggcggagccctctgagcgctgaggagctgatgactattgaggatgaaggagtcttggacaagatgctggatcagagcacggactttgaagagcggaagctcatccgggctgcacttcgtgagctccgacaaaggaagagagaccagcgggacaaggagcgggaacggcggctgcaggaggcacggggccggccaggggaggggcgcggcaacacagccactgagaccaccacgaggcacagccagcgggcagctgatggctctgctgtcagcactgttaccaagactgagcggctcgtccactccaatgatggcacacggacggcccgcaccaccacagtggagtcgagtttcgtgaggcgctcggagaatggcagtggcagcaccatgatgcaaaccaagaccttctcctcttcctcctcatccaagaagatgggcagcatcttcgaccgcgaggaccaggcgagcccacgggccggcagcctggcggcgctcgagaaacggcaggccgagaagaagaaagagctgatgaaggcgcagagtctgcccaagacctcagcctcccaggcgcgcaaggccatgattgagaagctggagaaggagggcgcggccggcagccctggcggaccccgcgcagccgtgcagcgatccaccagcttcggggtccccaacgccaacagcatcaagcagatgctgctggactggtgtcgagccaagactcgcggctacgagcacgtcgacatccagaacttctcctccagctggagtgatgggatggccttctgtgccctggtgcacaacttcttccctgaggccttcgactatgggcagcttagccctcagaaccgacgccagaacttcgaggtggccttctcatctgcggagacccatgcggactgcccgcagctcctggatacagaggacatggtgcggcttcgagagcctgactggaagtgcgtgtacacgtacatccaggaattctaccgctgtctggtccagaaggggctggtaaaaaccaaaaagtcctaa

SEQ ID NO: 663 - DNA, 705 bp, Homo sapiens
atgaggaagaccaggctctgggggctgctgtggatgctctttgtctcagaactccgagctgcaactaaattaactgaggaaaagtatgaactgaaagaggggcagaccctggatgtgaaatgtgactacacgctagagaagtttgccagcagccagaaagcttggcagataataagggacggagagatgcccaagaccctggcatgcacagagaggccttcaaagaattcccatccagtccaagtggggaggatcatactagaagactaccatgatcatggtttactgcgcgtccgaatggtcaaccttcaagtggaagattctggactgtatcagtgtgtgatctaccagcctcccaaggagcctcacatgctgttcgatcgcatccgcttggtggtgaccaagggtttttcagggacccctggctccaatgagaattctacccagaatgtgtataagattcctcctaccaccactaaggccttgtgcccactctataccagccccagaactgtgacccaagctccacccaagtcaactgccgatgtctccactcctgactctgaaatcaaccttacaaatgtgacagatatcatcagggttccggtgttcaacattgtcattctcctggctggtggattcctgagtaagagcctggtcttctctgtcctgtttgctgtcacgctgaggtcatttgtaccctag

SEQ ID NO: 664 - DNA, 351 bp, Homo sapiens
atggcaggaatagagttggagcggtgccagcagcaggcgaacgaggtgacggaaattatgcgtaacaacttcggcaaggtcctggagcgtggtgtgaagctggccgaactgcagcagcgttcagaccaactcctggatatgagctcaaccttcaacaagactacacagaacctggcccagaagaagtgctgggagaacatccgttaccggatctgcgtggggctggtggtggttggtgtcctgctcatcatcctgattgtgctgctggtcgtctttctccctcagagcagtgacagcagtagtgccccacggacccaggatgcaggcattgcctcagggcctgggaactga

SEQ ID NO: 665 - DNA, 468 bp, Homo sapiens
atggcgtcgctcaaatgtagcaccgtcgtctgcgtgatctgcttggagaagcccaaataccgctgtccagcctgccgcgtgccctactgctcggtagtctgcttccggaagcacaaagaacagtgcaaccctgaaactcgtcctgttgagaaaaaaataagatcagctcttcctaccaaaaccgtaaagcctgtggaaaacaaagatgatgatgactctatagctgattttctcaatagtgatgaggaagaagacagagtttctttgcagaatttaaagaatttaggggaatctgcaacattaagaagcttattgctcaatccacacctcaggcagttgatggtcaacctcgatcagggagaagacaaagcaaagctcatgagagcttacatgcaagagcctttgtttgtggagtttgcagactgctgtttaggaattgtggagccatcccagaatgaggagtcttaa

SEQ ID NO: 666 - DNA, 918 bp, Homo sapiens
atggggatccagacgagccccgtcctgctggcctccctgggggtggggctggtcactctgctcggcctggctgtgggctcctacttggttcggaggtcccgccggcctcaggtcactctcctggaccccaatgaaaagtacctgctacgactgctagacaagacgactgtgagccacaacaccaagaggttccgctttgccctgcccaccgcccaccacactctggggctgcctgtgggcaaacatatctacctctccacccgaattgatggcagcctggtcatcaggccatacactcctgtcaccagtgatgaggatcaaggctatgtggatcttgtcatcaaggtctacctgaagggtgtgcaccccaaatttcctgagggagggaagatgtctcagtacctggatagcctgaaggttggggatgtggtggagtttcgggggccaagcgggttgctcacttacactggaaaagggcattttaacattcagcccaacaagaaatctccaccagaaccccgagtggcgaagaaactgggaatgattgccggcgggacaggaatcaccccaatgctacagctgatccgggccatcctgaaagtccctgaagatccaacccagtgctttctgctttttgccaaccagacagaaaaggatatcatcttgcgggaggacttagaggaactgcaggcccgctatcccaatcgctttaagctctggttcactctggatcatcccccaaaagattgggcctacagcaagggctttgtgactgccgacatgatccgggaacacctgcccgctccaggggatgatgtgctggtactgctttgtgggccacccccaatggtgcagctggcctgccatcccaacttggacaaactgggctactcacaaaagatgcgattcacctactga

SEQ ID NO: 667 - DNA, 1926 bp, Homo sapiens
atggccaaagccgcggcgatcggcatcgacctgggcaccacctactcctgcgtgggggtgttccaacacggcaaggtggagatcatcgccaacgaccagggcaaccgcaccacccccagctacgtggccttcacggacaccgagcggctcatcggggatgcggccaagaaccaggtggcgctgaacccgcagaacaccgtgtttgacgcgaagcggctgatcggccgcaagttcggcgacccggtggtgcagtcggacatgaagcactggcctttccaggtgatcaacgacggagacaagcccaaggtgcaggtgagctacaagggggagaccaaggcattctaccccgaggagatctcgtccatggtgctgaccaagatgaaggagatcgccgaggcgtacctgggctacccggtgaccaacgcggtgatcaccgtgccggcctacttcaacgactcgcagcgccaggccaccaaggatgcgggtgtgatcgcggggctcaacgtgctgcggatcatcaacgagcccacggccgccgccatcgcctacggcctggacagaacgggcaagggggagcgcaacgtgctcatctttgacctgggcgggggcaccttcgacgtgtccatcctgacgatcgacgacggcatcttcgaggtgaaggccacggccggggacacccacctgggtggggaggactttgacaacaggctggtgaaccacttcgtggaggagttcaagagaaaacacaagaaggacatcagccagaacaagcgagccgtgaggcggctgcgcaccgcctgcgagagggccaagaggaccctgtcgtccagcacccaggccagcctggagatcgactccctgtttgagggcatcgacttctacacgtccatcaccagggcgaggttcgaggagctgtgctccgacctgttccgaagcaccctggagcccgtggagaaggctctgcgcgacgccaagctggacaaggcccagattcacgacctggtcctggtcgggggctccacccgcatccccaaggtgcagaagctgctgcaagacttcttcaacgggcgcgacctgaacaagagcatcaaccccgacgaggctgtggcctacggggcggcggtgcaggcggccatcctgatgggggacaagtccgagaacgtgcaggacctgctgctgctggacgtggctcccctgtcgctggggctggagacggccggaggcgtgatgactgccctgatcaagcgcaactccaccatccccaccaagcagacgcagatcttcaccacctactccgacaaccaacccggggtgctgatccaggtgtacgagggcgagagggccatgacgaaagacaacaatctgttggggcgcttcgagctgagcggcatccctccggcccccaggggcgtgccccagatcgaggtgaccttcgacatcgatgccaacggcatcctgaacgtcacggccacggacaagagcaccggcaaggccaacaagatcaccatcaccaacgacaagggccgcctgagcaaggaggagatcgagcgcatggtgcaggaggcggagaagtacaaagcggaggacgaggtgcagcgcgagagggtgtcagccaagaacgccctggagtcctacgccttcaacatgaagagcgccgtggaggatgaggggctcaagggcaagatcagcgaggcggacaagaagaaggttctggacaagtgtcaagaggtcatctcgtggctggacgccaacaccttggccgagaaggacgagtttgagcacaagaggaaggagctggagcaggtgtgtaaccccatcatcagcggactgtaccagggtgccggtggtcccgggcctgggggcttcggggctcagggtcccaagggagggtctgggtcaggccctaccattgaggaggtggattag

SEQ ID NO: 668 - DNA, 1590 bp, Homo sapiens
atgacaagttccaggctttggttttcgctgctgctggcggcagcgttcgcaggacgggcgacggccctctggccctggcctcagaacttccaaacctccgaccagcgctacgtcctttacccgaacaactttcaattccagtacgatgtcagctcggccgcgcagcccggctgctcagtcctcgacgaggccttccagcgctatcgtgacctgcttttcggttccgggtcttggccccgtccttacctcacagggaaacggcatacactggagaagaatgtgttggttgtctctgtagtcacacctggatgtaaccagcttcctactttggagtcagtggagaattataccctgaccataaatgatgaccagtgtttactcctctctgagactgtctggggagctctccgaggtctggagacttttagccagcttgtttggaaatctgctgagggcacattctttatcaacaagactgagattgaggactttccccgctttcctcaccggggcttgctgttggatacatctcgccattacctgccactctctagcatcctggacactctggatgtcatggcgtacaataaattgaacgtgttccactggcatctggtagatgatccttccttcccatatgagagcttcacttttccagagctcatgagaaaggggtcctacaaccctgtcacccacatctacacagcacaggatgtgaaggaggtcattgaatacgcacggctccggggtatccgtgtgcttgcagagtttgacactcctggccacactttgtcctggggaccaggtatccctggattactgactccttgctactctgggtctgagccctctggcacctttggaccagtgaatcccagtctcaataatacctatgagttcatgagcacattcttcttagaagtcagctctgtcttcccagatttttatcttcatcttggaggagatgaggttgatttcacctgctggaagtccaacccagagatccaggactttatgaggaagaaaggcttcggtgaggacttcaagcagctggagtccttctacatccagacgctgctggacatcgtctcttcttatggcaagggctatgtggtgtggcaggaggtgtttgataataaagtaaagattcagccagacacaatcatacaggtgtggcgagaggatattccagtgaactatatgaaggagctggaactggtcaccaaggccggcttccgggcccttctctctgccccctggtacctgaaccgtatatcctatggccctgactggaaggatttctacgtagtggaacccctggcatttgaaggtacccctgagcagaaggctctggtgattggtggagaggcttgtatgtggggagaatatgtggacaacacaaacctggtccccaggctctggcccagagcaggggctgttgccgaaaggctgtggagcaacaagttgacatctgacctgacatttgcctatgaacgtttgtcacacttccgctgtgagttgctgaggcgaggtgtccaggcccaacccctcaatgtaggcttctgtgagcaggagtttgaacagacctga

SEQ ID NO: 669 - DNA, 1221 bp, Homo sapiens
atgggcaaagtgtggaaacagcagatgtaccctcagtacgccacctactattacccccagtatctgcaagccaagcagtctctggtcccagcccaccccatggcccctcccagtcccagcaccaccagcagtaataacaacagtagcagcagtagcaactcaggatgggatcagctcagcaaaacgaacctctatatccgaggactgcctccccacaccaccgaccaggacctggtgaagctctgtcaaccatatgggaaaatagtctccacaaaggcaattttggataagacaacgaacaaatgcaaaggttatggttttgtcgactttgacagccctgcagcagctcaaaaagctgtgtctgccctgaaggccagtggggttcaagctcaaatggcaaagcaacaggaacaagatcctaccaacctctacatttctaatttgccactctccatggatgagcaagaactagaaaatatgctcaaaccatttggacaagttatttctacaaggatactacgtgattccagtggtacaagtcgtggtgttggctttgctaggatggaatcaacagaaaaatgtgaagctgttattggtcattttaatggaaaatttattaagacaccaccaggagtttctgcccccacagaacctttattgtgtaagtttgctgatggaggacagaaaaagagacagaacccaaacaaatacatccctaatggaagaccatggcatagagaaggagaggtgagacttgctggaatgacacttacttacgacccaactacagctgctatacagaacggattttatccttcaccatacagtattgctacaaaccgaatgatcactcaaacttctattacaccctatattgcatctcctgtatctgcctaccaggtgcaaagtccttcgtggatgcaacctcaaccatatattctacagcaccctggtgccgtgttaactccctcaatggagcacaccatgtcactacagcccgcatcaatgatcagccctctggcccagcagatgagtcatctgtcactaggcagcaccggaacatacatgcctgcaacgtcagctatgcaaggagcctacttgccacagtatgcacatatgcagacgacagcggttcctgttgaggaggcaagtggtcaacagcaggtggctgtcgagacgtctaatgaccattctccatatacctttcaacctaataagtaa

SEQ ID NO: 670 - DNA, 528 bp, Homo sapiens
atgagctcccagattcgtcagaattattccaccgacgtggaggcagccgtcaacagcctggtcaatttgtacctgcaggcctcctacacctacctctctctgggcttctatttcgaccgcgatgatgtggctctggaaggcgtgagccacttcttccgcgaactggccgaggagaagcgcgagggctacgagcgtctcctgaagatgcaaaaccagcgtggcggccgcgctctcttccaggacatcaagaagccagctgaagatgagtggggtaaaaccccagacgccatgaaagctgccatggccctggagaaaaagctgaaccaggcccttttggatcttcatgccctgggttctgcccgcacggacccccatctctgtgacttcctggagactcacttcctagatgaggaagtgaagcttatcaagaagatgggtgaccacctgaccaacctccacaggctgggtggcccggaggctgggctgggcgagtatctcttcgaaaggctcactctcaagcacgactaa

SEQ ID NO: 671 - DNA, 3772 bp, Homo sapiens
ttttttttttttggtcaaactccctttttattaagggttatcaagctgtacacggtccctaccctgctccgctccgagttcgggcagcgcaattcaccactctcccaaagccggaccacagctgggtgaggggtgggacagagagtaggagcagtcccagcatgcagtgcagcagcccaaagcctcgggcgaggcatcgcccttcatcccccttcagggcacagcgagatgcgggccagagctcttttgctgggacgtacacagccaaggtcaccctccagcccggtctgtcccatgtgcaggtgatggggggtacgataagcagcaatgagggcccaggaagacctcagtctcctgggggcccatcctaaaagatggcaagggcagcaaagtatttccatcctgctcctacaatttagaaaccttcttttttagtgtcaaaatatagcgttgaggggagctggacgctagggtcttcaccctaacgcaaagcaaaagccgaacggaacgggagcaagcgaacagaacaggagcaagcagcacacacaggccagtgatgtgcaagaagcggagagaggtgagccggctgcagcactgggcgagaactgcgggtgaggtaagggccacagcctgacctgctcatctattgagggggctagggaaggttgcaggggttgagggtccaggcccaacctccccactccacagttggcacaggttctccctgcttggcagcttctatcgtgggcagccctctggggacttgcaggggtaggtgtaaaggtggcagtactggggctgggctggggaccagtttctagcaccacactctgagccaagggggtcctggggatgaggctagagtcccgtgtgccctcggttcctaggccccaaattcctctcctggggctgtggcaagcccagtgttggcacctcccttggccaggcacagacacacaaacaccacacacgtggggccagggaacactcagaggagccgtcccatggcaggcagacgggatggcagggcagcggtggcctccatcctgggccacaggaaccctgctcagccttgtctataccttgtgcacctgagggggtagctcatcctccgagccctcttcgggcacgggctcagggtgccttgatgccgactgcccatcttctgcccaccctccaagaggcagccgagagaaatgagagggaaccctgggcactgtgccaggatctgtgatgccaccgtagcgcctctggaagcccccatgcagggcggtggtctcaggagctccaggccggggtgctgcacagggatagctagcagagcgagggatagactggggggcccgggcgccctctcccccttcatcaggggcgctttctccactctcatcactctcccggcggtgccatacatgccgctcaggttcagcctgggcctgctgcttgtggagctggtgcatatagagggcatgcaggctcatctctgtggatgcatattctgacagcaccaggctctgcagctgtccttcccacacgctgctcccggagctggctgtcctggcatccaccccagagcctgtcatggtgctgtgagcccggcctgtgggcgcctgcccgggttgcagcggggagaaggagcgcagggcagaggcgacttcagccctgtgcctggagccctgcaggtctctgggcagtggagggccccggcaggatgagccagctaccacatttgcgataaggctcaggggctcagactcagattgtaaggactggatagacgtaaagagggcattttcagggagcagacccccttgggcgaggctagcagctgctccatcccgctgaacctgctccttgaggaagcctaggaaggctgtgctctcacgtggtggctgccagccagggttggtgatggcaaagtgcatgagtgacaactctgtctttccatcctcagcttgctggtacactgaggcctctgtctgcccagcagatagccactggggatgaccatgctggcgaacatccatctgagcaaaggagcaggtatctcccacaccaacgacctccacggtgaagtttcggaagaagtctataatctccagggcccgtgggcgcaggcagaagatgaggatgaggggtgtgacaatggggctcagcaactcttccaaaatgaacactgccttgtactggaagagctgggcaaactcgtcccgggtctgcgagcggtgggcattaccctgccagtggtcaggcatgtagtggatgtgagcgaggatcacgcggagcagctgctcagggcagaacaccatgtgctggtccgggataaaggacctgcacacggtcacggtgacccccaggagtgtgacggtggtcagcacatgttccacagccaacacatcttcgtcataaatggtgagggcaataagcacagccaggatggagccagcgaagaaggctccattcttggccagcagtgtcaaaagaggtgacaagaagcaattcatgtacttggaggcgggcttgtagccacggttgaggcgggactgcagctcgtgctccagctcgttgaagtggcggaggtagcagcggccatagagtgaccagcagcgtgctcccagggcccccggctcccgcttcagcacctcagcatagctgaagaaggcatagaggatttgccatatgaggatgagggggcacagcaggaagttagcgatgccaatccacaggatgcggttgctgaggcgctgggccagctctagccgttgccccccacgtttgtactcggccttgaggctccattcattgagaaacagagagccaggtccccagaagaggatcagctcaaagttgtacttgagaccacgggtgaagaagacagcttccccgaggccaggcaggcggaagcgcagaggcaggagggatttgttaaccagtgccaccatgtagttctggaaacggaggatgcggtggtagatgtccagttctgtcagctcacgtttgtggatgcagatctggtgctccttctgcgtctgcacgatccgggcctgcacttcttgccacgtgcaatacggaagggcagacatagggatgcgcagagcgtgcaggtagaaggagtggatctcccagtagcagcaaatgttatagatgaacttgataagccggtggatccagaagacaccagcaatgaccaggatggtgataagggagccattttcctgaatcctggcactacagacttgagcaggcaaaaaggcgtctggcagagtgaccttgacgggttcagtagggtgaagactgtggttcaccatcttgttggcaaataggatgtcatagtccacgcagctgaccaggaaggtagtgaaggcaaccacaaagaggaactgcatgagctcaaagatctccccgatgagcatacatgtgaagccattcttctggtgcagattataaactcgagagaagaagaggtcaaggttttcaatatggtgccaaggtgacttgctcccctcggcgacgtgcaccaacaggtcctcctcccctgggggtgaatcactataggaggcctctaggcgctggtattcagtgtcaaactgcgccatcaccaccgccccctgtccaccttgaccaccagctccatggacagtatgtgctcctctccagccctcgatgctctgcagctgctcaggaacagcgacccgggtgattccagaggctccgccggctccgctcggctcggctcggctcggcgcgacccgcggcgctaggccgggtgtct

SEQ ID NO: 672 - DNA, 456 bp, Homo sapiens
atgggtcgcatgcatgctcccgggaagggcctgtcccagtcggctttaccctatcgacgcagcgtccccacttggttgaagttgacatctgacgacgtgaaggagcagatttacaaactggccaagaagggccttactccttcacagatcggtgtaatcctgagagattcacatggtgttgcacaagtacgttttgtgacaggcaataaaattttaagaattcttaagtctaagggacttgctcctgaccttcctgaagatctctaccatttaattaagaaagcagttgctgttcgaaagcatcttgagaggaacagaaaggataaggatgctaaattccgtctgattctaatagagagccggattcaccgtttggctcgatattataagaccaagcgagtcctccctcccaattggaaatatgaatcatctacagcctctgccctggtcgcataa

SEQ ID NO: 673 - DNA, 1134 bp, Homo sapiens
atgtgtgaagaagaggacagcactgccttggtgtgtgacaatggctctgggctctgtaaggccggctttgctggggacgatgctcccagggctgttttcccatccattgtgggacgtcccagacatcagggggtgatggtgggaatgggacaaaaagacagctacgtgggtgacgaagcacagagcaaaagaggaatcctgaccctgaagtacccgatagaacatggcatcatcaccaactgggacgacatggaaaagatctggcaccactctttctacaatgagcttcgtgttgcccctgaagagcatcccaccctgctcacggaggcacccctgaaccccaaggccaaccgggagaaaatgactcaaattatgtttgagactttcaatgtcccagccatgtatgtggctatccaggcggtgctgtctctctatgcctctggacgcacaactggcatcgtgctggactctggagatggtgtcacccacaatgtccccatctatgagggctatgccttgccccatgccatcatgcgtctggatctggctggccgagatctcactgactacctcatgaagatcctgactgagcgtggctattccttcgttactactgctgagcgtgagattgtccgggacatcaaggagaaactgtgttatgtagctctggactttgaaaatgagatggccactgccgcatggtcatcctcccttgagaagagttacgagttgcctgatgggcaagtgatcaccatcggaaatgaacgtttccgctgcccagagaccctgttccagccatccttcatcgggatggagtctgctggcatccatgaaaccacctacaacagcatcatgaagtgtgatattgacatcaggaaggacctctatgctaacaatgtcctatcagggggcaccactatgtaccctggcattgccgaccgaatgcagaaggagatcacggccctagcacccagcaccatgaagatcaagatcattgcccctccggagcgcaaatactctgtctggatcggtggctccatcctggcctctctgtccaccttccagcagatgtggatcagcaaacaggaatacgatgaagccgggccttccattgtccaccgcaaatgcttctaa

SEQ ID NO: 674 - DNA, 951 bp, Homo sapiens
atggcaagccgtatcctgctcaacaacggcgccaagatgcccatcctggggttgggtacctggaagtcccctccagggcaggtgactgaggccgtgaaggtggccattgacgtcgggtaccgccacatcgactgtgcccatgtgtaccagaatgagaatgaggtgggggtggccattcaggagaagctcagggagcaggtggtgaagcgtgaggagctcttcatcgtcagcaagctgtggtgcacgtaccatgagaagggcctggtgaaaggagcctgccagaagacactcagcgacctgaagctggactacctggacctctaccttattcactggccgactggctttaagcctgggaaggaatttttcccattggatgagtcgggcaatgtggttcccagtgacaccaacattctggacacgtgggcggccatggaagagctggtggatgaagggctggtgaaagctattggcatctccaacttcaaccatctccaggtggagatgatcttaaacaaacctggcttgaagtataagcctgcagttaaccagattgagtgccacccatatctcactcaggagaagttaatccagtactgccagtccaaaggcatcgtggtgaccgcctacagccccctcggctctcctgacaggccctgggcaaagcccgaggacccttctctcctggaggatcccaggatcaaggcgatcgcagccaagcacaataaaactacagcccaggtcctgatccggttccccatgcagaggaacttggtggtgatccccaagtctgtgacaccagaacgcattgctgagaactttaaggtctttgactttgaactgagcagccaggatatgaccaccttactcagctacaacaggaactggagggtctgtgccttgttgagctgtacctcccacaaggattaccccttccatgaagagttttga

SEQ ID NO: 675 - DNA, 1512 bp, Homo sapiens
atggttttggaaatgctgaacccgatacattataacatcaccagcatcgtgcctgaagccatgcctgctgccaccatgccagtcctgctcctcactggcctttttctcttggtgtggaattatgagggcacatcctcaataccaggtcctggctactgcatgggaattggacccctcatctcccacggcagattcctgtggatggggatcggcagtgcctgcaactactacaaccgggtatatggagaattcatgcgagtctggatctctggagaggaaacactcattatcagcaagtcctcaagtatgttccacataatgaagcacaatcattacagctctcgattcggcagcaaacttgggctgcagtgcatcggtatgcatgagaaaggcatcatatttaacaacaatccagagctctggaaaacaactcgacccttctttatgaaagctctgtcaggccccggccttgttcgtatggtcacagtctgtgctgaatccctcaaaacacatctggacaggttggaggaggtgaccaatgaatcgggctatgtggacgtgttgacccttctgcgtcgtgtcatgctggacacctctaacacgctcttcttgaggatccctttggacgaaagtgctatcgtggttaaaatccaaggttattttgatgcatggcaagctctcctcatcaaaccagacatcttctttaagatttcttggctatacaaaaagtatgagaagtctgtcaaggatttgaaagatgccatagaagttctgatagcagaaaaaagacgcaggatttccacagaagagaaactggaagaatgtatggactttgccactgagttgattttagcagagaaacgtggtgacctgacaagagagaatgtgaaccagtgcatattggaaatgctgatcgcagctcctgacaccatgtctgtctctttgttcttcatgctatttctcattgcaaagcaccctaatgttgaagaggcaataataaaggaaatccagactgttattggtgagagagacataaagattgatgatatacaaaaattaaaagtgatggaaaacttcatttatgagagcatgcggtaccagcctgtcgtggacttggtcatgcgcaaagccttagaagatgatgtaatcgatggctacccagtgaaaaaggggacaaacattatcctgaatattggaaggatgcacagactcgagtttttccccaaacccaatgaatttactcttgaaaattttgcaaagaatgttccttataggtactttcagccatttggctttgggccccgtggctgtgcaggaaagtacatcgccatggtgatgatgaaagccatcctcgttacacttctgagacgattccacgtgaagacattgcaaggacagtgtgttgagagcatacagaagatacacgacttgtccttgcacccagatgagactaaaaacatgctggaaatgatctttaccccaagaagctcagacaggtgtctggaacactag

SEQ ID NO: 676 - DNA, 1890 bp, Homo sapiens
atgccccgctacggagcgtcactccgccagagctgccccaggtccggccgggagcagggacaagacgggaccgccggagcccccggactcctttggatgggcctggtgctggcgctggcgctggcgctggcgctggctctgtctgactctcgggttctctgggctccggcagaggctcaccctctttctccccaaggccatcctgccaggttacatcgcatagtgccccggctccgagatgtctttgggtgggggaacctcacctgcccaatctgcaaaggtctattcaccgccatcaacctcgggctgaagaaggaacccaatgtggctcgcgtgggctccgtggccatcaagctgtgcaatctgctgaagatagcaccacctgccgtgtgccaatccattgtccacctctttgaggatgacatggtggaggtgtggagacgctcagtgctgagcccatctgaggcctgtggcctgctcctgggctccacctgtgggcactgggacattttctcatcttggaacatctctttgcctactgtgccgaagccgccccccaaaccccctagccccccagccccaggtgcccctgtcagccgcatcctcttcctcactgacctgcactgggatcatgactacctggagggcacggaccctgactgtgcagacccactgtgctgccgccggggttctggcctgccgcccgcatcccggccaggtgccggatactggggcgaatacagcaagtgtgacctgcccctgaggaccctggagagcctgttgagtgggctgggcccagccggcccttttgatatggtgtactggacaggagacatccccgcacatgatgtctggcaccagactcgtcaggaccaactgcgggccctgaccaccgtcacagcacttgtgaggaagttcctggggccagtgccagtgtaccctgctgtgggtaaccatgaaagcatacctgtcaatagcttccctccccccttcattgagggcaaccactcctcccgctggctctatgaagcgatggccaaggcttgggagccctggctgcctgccgaagccctgcgcaccctcagaattggggggttctatgctctttccccataccccggtctccgcctcatctctctcaatatgaatttttgttcccgtgagaacttctggctcttgatcaactccacggatcccgcaggacagctccagtggctggtgggggagcttcaggctgctgaggatcgaggagacaaagtgcatataattggccacattcccccagggcactgtctgaagagctggagctggaattattaccgaattgtagccaggtatgagaacaccctggctgctcagttctttggccacactcatgtggatgaatttgaggtcttctatgatgaagagactctgagccggccgctggctgtagccttcctggcacccagtgcaactacctacatcggccttaatcctggttaccgtgtgtaccaaatagatggaaactactccaggagctctcacgtggtcctggaccatgagacctacatcctgaatctgacccaggcaaacataccgggagccataccgcactggcagcttctctacagggctcgagaaacctatgggctgcccaacacactgcctaccgcctggcacaacctggtatatcgcatgcggggcgacatgcaacttttccagaccttctggtttctctaccataagggccacccaccctcggagccctgtggcacgccctgccgtctggctactctttgtgcccagctctctgcccgtgctgacagccctgctctgtgccgccacctgatgccagatgggagcctcccagaggcccagagcctgtggccaaggccactgttttgctag

SEQ ID NO: 677 - DNA, 954 bp, Homo sapiens
atgactgagcagatgacccttcgtggcaccctcaagggccacaacggctgggtaacccagatcgctactaccccgcagttcccggacatgatcctctccgcctctcgagataagaccatcatcatgtggaaactgaccagggatgagaccaactatggaattccacagcgtgctctgcggggtcactcccactttgttagtgatgtggttatctcctcagatggccagtttgccctctcaggctcctgggatggaaccctgcgcctctgggatctcacaacgggcaccaccacgaggcgatttgtgggccataccaaggatgtgctgagtgtggccttctcctctgacaaccggcagattgtctctggatctcgagataaaaccatcaagctatggaataccctgggtgtgtgcaaatacactgtccaggatgagagccactcagagtgggtgtcttgtgtccgcttctcgcccaacagcagcaaccctatcatcgtctcctgtggctgggacaagctggtcaaggtatggaacctggctaactgcaagctgaagaccaaccacattggccacacaggctatctgaacacggtgactgtctctccagatggatccctctgtgcttctggaggcaaggatggccaggccatgttatgggatctcaacgaaggcaaacacctttacacgctagatggtggggacatcatcaacgccctgtgcttcagccctaaccgctactggctgtgtgctgccacaggccccagcatcaagatctgggatttagagggaaagatcattgtagatgaactgaagcaagaagttatcagtaccagcagcaaggcagaaccaccccagtgcacctccctggcctggtctgctgatggccagactctgtttgctggctacacggacaacctggtgcgagtgtggcaggtgaccattggcacacgctag

SEQ ID NO: 678 - DNA, 387 bp, Homo sapiens
atgactgaggctgatgtgaatccaaaggcctatccccttgccgatgcccacctcaccaagaagctactggacctcgttcagcagtcatgtaactataagcagcttcggaaaggagccaatgaggccaccaaaaccctcaacaggggcatctctgagttcatcgtgatggctgcagacgccgagccactggagatcattctgcacctgccgctgctgtgtgaagacaagaatgtgccctacgtgtttgtgcgctccaagcaggccctggggagagcctgtggggtctccaggcctgtcatcgcctgttctgtcaccatcaaagaaggctcgcagctgaaacagcagatccaatccattcagcagtccattgaaaggctcttagtctaa

SEQ ID NO: 679 - DNA, 1632 bp, Homo sapiens
atgatgcccacaccagttatcctattgaaagaggggactgatagctcccaaggcatcccccagcttgtgagtaacatcagtgcctgccaggtgattgctgaggctgtaagaactaccctgggtccccgtggcatggacaagcttattgtagatggcagaggcaaagcaacaatttctaatgatggggccacaattctgaaacttcttgatgttgtccatcctgcagcaaagactttggtagacattgccaaatcccaagatgctgaggtgggtgatggcaccacctcagtgaccttgctggctgcagagtttctgaagcaggtgaaaccctatgtggaggaaggtttacacccccagatcatcattcgagctttccgcacagccacccagctggcagttaacaagatcaaagagattgctgtgaccgtgaagaaggcagataaagtggagcagaggaagctgctggaaaagtgtgccatgaccgctctgagctccaagctgatctcccagcagaaagctttctttgctaagatggtggtggatgcagtgatgatgctcgatgatttgctgcagcttaaaatgattggaatcaagaaggtacagggtggagccctcgaggattctcagctggtagctggtgttgcattcaagaagactttctcttacgctgggtttgaaatgcaacccaaaaagtaccacaatcccaagattgcccttttgaatgtcgagctcgagttgaaagctgagaaagacaatgctgagataagagtccacacagttgaggattatcaggcaattgttgatgctgagtggaacattctctatgacaagttagagaagatccatcattctggagccaaagttgtcttgtccaaactccccattggggatgtggccacccagtactttgctgacagggacatgttctgtgctggccgagtacctgaggaggatctgaagaggacaatgatggcctgtggaggctcaatccagaccagtgtgaatgctctgtcagcagatgtgctgggtcgatgccaggtgtttgaagagacccagattggaggcgagaggtacaatttttttactggctgccccaaggccaagacatgcaccttcattctccgtggcggcgccgagcagtttatggaggagacagagcggtccctgcatgatgccatcatgatcgtcaggagggccatcaagaatgattcagtggtggctggtggcggggccattgagatggaactctccaagtacctgcgggattactcaaggactattccaggaaaacagcagctgttgattggggcttatgccaaggccttggagattatcccacgccagctgtgtgacaatgctggctttgatgccacaaacattctcaacaagctgcgggctcggcatgcccaggggggtacatggtatggagtagacatcaacaacgaggacattgctgacaactttgaagctttcgtgtgggagccagctatggtgcggatcaatgcgctgacagcagcctctgaggctgcgtgcctgatcgtgtctgtagatgaaaccatcaagaacccccgctcgactgtggatgctcccacagcagcaggccggggccgtggtcgtggccgcccccactga

SEQ ID NO: 680 - DNA, 2118 bp, Homo sapiens
atgtggctcttgtacctcctggtgccggccctgttctgcagggcaggaggctccattcccatccctcagaagttatttggggaggtgacttcccctctgttccccaagccttaccccaacaactttgaaacaaccactgtgatcacagtccccacgggatacagggtgaagctcgtcttccagcagtttgacctggagccttctgaaggctgcttctatgattatgtcaagatctctgctgataagaaaagcctggggaggttctgtgggcaactgggttctccactgggcaaccccccgggaaagaaggaatttatgtcccaagggaacaagatgctgctgaccttccacacagacttctccaacgaggagaatgggaccatcatgttctacaagggcttcctggcctactaccaagctgtggaccttgatgaatgtgcttcccggagcaaatcaggggaggaggatccccagccccagtgccagcacctgtgtcacaactacgttggaggctacttctgttcctgccgtccaggctatgagcttcaggaagacaggcattcctgccaggctgagtgcagcagcgagctgtacacggaggcatcaggctacatctccagcctggagtaccctcggtcctacccccctgacctgcgctgcaactacagcatccgggtggagcggggcctcaccctgcacctcaagttcctggagccttttgatattgatgaccaccagcaagtacactgcccctatgaccagctacagatctatgccaacgggaagaacattggcgagttctgtgggaagcaaaggccccccgacctcgacaccagcagcaatgctgtggatctgctgttcttcacagatgagtcgggggacagccggggctggaagctgcgctacaccaccgagatcatcaagtgcccccagcccaagaccctagacgagttcaccatcatccagaacctgcagcctcagtaccagttccgtgactacttcattgctacctgcaagcaaggctaccagctcatagaggggaaccaggtgctgcattccttcacagctgtctgccaggatgatggcacgtggcatcgtgccatgcccagatgcaagatcaaggactgtgggcagccccgaaacctgcctaatggtgacttccgttacaccaccacaatgggagtgaacacctacaaggcccgtatccagtactactgccatgagccatattacaagatgcagaccagagctggcagcagggagtctgagcaaggggtgtacacctgcacagcacagggcatttggaagaatgaacagaagggagagaagattcctcggtgcttgccagtgtgtgggaagcccgtgaaccccgtggaacagaggcagcgcataatcggagggcaaaaagccaagatgggcaacttcccctggcaggtgttcaccaacatccacgggcgcgggggcggggccctgctgggcgaccgctggatcctcacagctgcccacaccctgtatcccaaggaacacgaagcgcaaagcaacgcctctttggatgtgttcctgggccacacaaatgtggaagagctcatgaagctaggaaatcaccccatccgcagggtcagcgtccacccggactaccgtcaggatgagtcctacaattttgagggggacatcgccctgctggagctggaaaatagtgtcaccctgggtcccaacctcctccccatctgcctccctgacaacgataccttctacgacctgggcttgatgggctatgtcagtggcttcggggtcatggaggagaagattgctcatgacctcaggtttgtccgtctgcccgtagctaatccacaggcctgtgagaactggctccggggaaagaataggatggatgtgttctctcaaaacatgttctgtgctggacacccatctctaaagcaggacgcctgccagggggatagtgggggcgtttttgcagtaagggacccgaacactgatcgctgggtggccacgggcatcgtgtcctggggcatcgggtgcagcaggggctatggcttctacaccaaagtgctcaactacgtggactggatcaagaaagagatggaggaggaggactga

SEQ ID NO: 681 - DNA, 2067 bp, Homo sapiens
atgtggtgcattgtcctgttttcacttttggcatgggtttatgctgagcctaccatgtatggggagatcctgtcccctaactatcctcaggcatatcccagtgaggtagagaaatcttgggacatagaagttcctgaagggtatgggattcacctctacttcacccatctggacattgagctgtcagagaactgtgcgtatgactcagtgcagataatctcaggagacactgaagaagggaggctctgtggacagaggagcagtaacaatccccactctccaattgtggaagagttccaagtcccatacaacaaactccaggtgatctttaagtcagacttttccaatgaagagcgttttacggggtttgctgcatactatgttgccacagacataaatgaatgcacagattttgtagatgtcccttgtagccacttctgcaacaatttcattggtggttacttctgctcctgccccccggaatatttcctccatgatgacatgaagaattgcggagttaattgcagtggggatgtattcactgcactgattggggagattgcaagtcccaattatcccaaaccatatccagagaactcaaggtgtgaataccagatccggttggagaaagggttccaagtggtggtgaccttgcggagagaagattttgatgtggaagcagctgactcagcgggaaactgccttgacagtttagtttttgttgcaggagatcggcaatttggtccttactgtggtcatggattccctgggcctctaaatattgaaaccaagagtaatgctcttgatatcatcttccaaactgatctaacagggcaaaaaaagggctggaaacttcgctatcatggagatccaatgccctgccctaaggaagacactcccaattctgtttgggagcctgcgaaggcaaaatatgtctttagagatgtggtgcagataacctgtctggatgggtttgaagttgtggagggacgtgttggtgcaacatctttctattcgacttgtcaaagcaatggaaagtggagtaattccaaactgaaatgtcaacctgtggactgtggcattcctgaatccattgagaatggtaaagttgaagacccagagagcactttgtttggttctgtcatccgctacacttgtgaggagccatattactacatggaaaatggaggaggtggggagtatcactgtgctggtaacgggagctgggtgaatgaggtgctgggcccggagctgccgaaatgtgttccagtctgtggagtccccagagaaccctttgaagaaaaacagaggataattggaggatccgatgcagatattaaaaacttcccctggcaagtcttctttgacaacccatgggctggtggagcgctcattaatgagtactgggtgctgacggctgctcatgttgtggagggaaacagggagccaacaatgtatgttgggtccacctcagtgcagacctcacggctggcaaaatccaagatgctcactcctgagcatgtgtttattcatccgggatggaagctgctggaagtcccagaaggacgaaccaattttgataatgacattgcactggtgcggctgaaagacccagtgaaaatgggacccaccgtctctcccatctgcctaccaggcacctcttccgactacaacctcatggatggggacctgggactgatctcaggctggggccgaacagagaagagagatcgtgctgttcgcctcaaggcggcaaggttacctgtagctcctttaagaaaatgcaaagaagtgaaagtggagaaacccacagcagatgcagaggcctatgttttcactcctaacatgatctgtgctggaggagagaagggcatggatagctgtaaaggggacagtggtggggcctttgctgtacaggatcccaatgacaagaccaaattctacgcagctggcctggtgtcctgggggccccagtgtgggacctatgggctctacacacgggtaaagaactatgttgactggataatgaagactatgcaggaaaatagcaccccccgtgaggactaa

SEQ ID NO: 682 - DNA, 3315 bp, Homo sapiens
cccagctggtgctgaagctcgtcagttcaccatccgccctcggcttccgcggggcgctgggccgccagcctcggcaccgtcctttcctttctccctcgcgttaggcaggtgacagcagggacatgtctcgggagatgcaggatgtagacctcgctgaggtgaagcctttggtggagaaaggggagaccatcaccggcctcctgcaagagtttgatgtccaggagcaggacatcgagactttacatggctctgttcacgtcacgctgtgtgggactcccaagggaaaccggcctgtcatcctcacctaccatgacatcggcatgaaccacaaaacctgctacaaccccctcttcaactacgaggacatgcaggagatcacccagcactttgccgtctgccacgtggacgcccctggccagcaggacggcgcagcctccttccccgcagggtacatgtacccctccatggatcagctggctgaaatgcttcctggagtccttcaacagtttgggctgaaaagcattattggcatgggaacaggagcaggcgcctacatcctaactcgatttgctctaaacaaccctgagatggtggagggccttgtccttatcaacgtgaacccttgtgcggaaggctggatggactgggccgcctccaagatctcaggatggacccaagctctgccggacatggtggtgtcccacctttttgggaaggaagaaatgcagagtaacgtggaagtggtccacacctaccgccagcacattgtgaatgacatgaaccccggcaacctgcacctgttcatcaatgcctacaacagccggcgcgacctggagattgagcgaccaatgccgggaacccacacagtcaccctgcagtgccctgctctgttggtggttggggacagctcgcctgcagtggatgccgtggtggagtgcaactcaaaattggacccaacaaagaccactctcctcaagatggcggactgtggcggcctcccgcagatctcccagccggccaagctcgctgaggccttcaagtacttcgtgcagggcatgggatacatgccctcggctagcatgacccgcctgatgcggtcccgcacagcctctggttccagcgtcacttctctggatggcacccgcagccgctcccacaccagcgagggcacccgaagccgctcccacaccagcgagggcacccgcagccgctcgcacaccagcgagggggcccacctggacatcacccccaactcgggtgctgctgggaacagcgccgggcccaagtccatggaggtctcctgctaggcggcctgcccagctgccgcccccggactctgatctctgtagtggccccctcctccccggccccttttcgccccctgcctgccatactgcgcctaactcggtattaatccaaagcttattttgtaagagtgagctctggtggagacaaatgaggtctattacgtgggtgccctctccaaaggcggggtggcggtggaccaaaggaaggaagcaagcatctccgcatcgcatcctcttccattaaccagtggccggttgccactctcctcccctccctcagagacaccaaactgccaaaaacaagacgcgtagcagcacacacttcacaaagccaagcctaggccgccctgagcatcctggttcaaacgggtgcctggtcagaaggccagccgcccacttcccgtttcctctttaactgaggagaagctgatccagtttccggaaacaaaatccttttctcatttggggaggggggtaatagtgacatgcaggcacctcttttaaacaggcaaaacaggaagggggaaaaggtgggattcatgtcgaggctagaggcatttggaacaacaaatctacgtagttaacttgaagaaaccgatttttaaagttggtgcatctagaaagctttgaatgcagaagcaaacaagcttgatttttctagcatcctcttaatgtgcagcaaaagcaggcgacaaaatctcctggctttacagacaaaaatatttcagcaaacgttgggcatcatggtttttgaaggctttagttctgctttctgcctctcctccacagccccaacctcccacccctgatacatgagccagtgattattcttgttcagggagaagatcatttagatttgttttgcattccttagaatggagggcaacattccacagctgccctggctgtgatgagtgtccttgcaggggccggagtaggagcactggggtgggggcggaattggggttactcgatgtaagggattccttgttgttgtgttgagatccagtgcagttgtgatttctgtggatcccagcttggttccaggaattttgtgtgattggcttaaatccagttttcaatcttcgacagctgggctggaacgtgaactcagtagctgaacctgtctgacccggtcacgttcttggatcctcagaactctttgctcttgtcggggtgggggtgggaactcacgtggggagcggtggctgagaaaatgtaaggattctggaatacatattccatgggactttccttccctctcctgcttcctcttttcctgctccctaacctttcgccgaatggggcagcaccactgacgtttctgggcggccagtgcggctgccaggttcctgtactactgccttgtacttttcattttggctcaccgtggattttctcataggaagtttggtcagagtgaattgaatattgtaagtcagccactgggacccgaggatttctgggaccccgcagttgggaggaggaagtagtccagccttccaggtggcgtgagaggcaatgactcgttacctgccgcccatcaccttggaggccttccctggccttgagtagaaaagtcggggatcggggcaagagaggctgagtacggatgggaaactattgtgcacaagtctttccagaggagtttcttaatgagatatttgtatttatttccagaccaataaatttgtaactttgcaaaaaaaaacaacacgacccacatacagccatcaatctccgtctgaaactgcatgctcaacaacacccaccacacacgttgtttgctggcgcccatgcccgccccgacagcaaggtcgttgaacacccactcgtggggcggcagcggccagcaacgacggctgcacaacattggcacagcgttctcgcaagaaaccatcgcggtccaactaggctgctgcgtctaccacaaaaaacgcgccggcggcaccggctgtgcacaacacccgtggggtagagccctagcgcactcacggccccggcgcaa

SEQ ID NO: 683 - DNA, 450 bp, Homo sapiens
atggctgatcagctgaccgaagaacagattgctgaattcaaggaagccttctccctatttgataaagatggcgatggcaccatcacaacaaaggaacttggaactgtcatgaggtcactgggtcagaacccaacagaagctgaattgcaggatatgatcaatgaagtggatgctgatggtaatggcaccattgacttccccgaatttttgactatgatggctagaaaaatgaaagatacagatagtgaagaagaaatccgtgaggcattccgagtctttgacaaggatggcaatggttatatcagtgcagcagaactacgtcacgtcatgacaaacttaggagaaaaactaacagatgaagaagtagatgaaatgatcagagaagcagatattgatggagacggacaagtcaactatgaagaattcgtacagatgatgactgcaaaatga

SEQ ID NO: 684 - DNA, 1254 bp, Homo sapiens
atgctgctatccgtgccgttgctgctcggcctcctcggcctggccgtcgccgagcctgccgtctacttcaaggagcagtttctggacggagacgggtggacttcccgctggatcgaatccaaacacaagtcagattttggcaaattcgttctcagttccggcaagttctacggtgacgaggagaaagataaaggtttgcagacaagccaggatgcacgcttttatgctctgtcggccagtttcgagcctttcagcaacaaaggccagacgctggtggtgcagttcacggtgaaacatgagcagaacatcgactgtgggggcggctatgtgaagctgtttcctaatagtttggaccagacagacatgcacggagactcagaatacaacatcatgtttggtcccgacatctgtggccctggcaccaagaaggttcatgtcatcttcaactacaagggcaagaacgtgctgatcaacaaggacatccgttgcaaggatgatgagtttacacacctgtacacactgattgtgcggccagacaacacctatgaggtgaagattgacaacagccaggtggagtccggctccttggaagacgattgggacttcctgccacccaagaagataaaggatcctgatgcttcaaaaccggaagactgggatgagcgggccaagatcgatgatcccacagactccaagcctgaggactgggacaagcccgagcatatccctgaccctgatgctaagaagcccgaggactgggatgaagagatggacggagagtgggaacccccagtgattcagaaccctgagtacaagggtgagtggaagccccggcagatcgacaacccagattacaagggcacttggatccacccagaaattgacaaccccgagtattctcccgatcccagtatctatgcctatgataactttggcgtgctgggcctggacctctggcaggtcaagtctggcaccatctttgacaacttcctcatcaccaacgatgaggcatacgctgaggagtttggcaacgagacgtggggcgtaacaaaggcagcagagaaacaaatgaaggacaaacaggacgaggagcagaggcttaaggaggaggaagaagacaagaaacgcaaagaggaggaggaggcagaggacaaggaggatgatgaggacaaagatgaggatgaggaggatgaggaggacaaggaggaagatgaggaggaagatgtccccggccaggccaaggacgagctgtag

SEQ ID NO: 685 - DNA, 306 bp, Homo sapiens
atggcgtgccctctggagaaggccctggatgtgatggtgtccaccttccacaagtactcgggcaaagagggtgacaagttcaagctcaacaagtcagaactaaaggagctgctgacccgggagctgcccagcttcttggggaaaaggacagatgaagctgctttccagaagctgatgagcaacttggacagcaacagggacaacgaggtggacttccaagagtactgtgtcttcctgtcctgcatcgccatgatgtgtaacgaattctttgaaggcttcccagataagcagcccaggaagaaatga

SEQ ID NO: 686 - DNA, 387 bp, Homo sapiens
atgggaatccaaggagggtctgtcctgttcgggctgctgctcgtcctggctgtcttctgccattcaggtcatagcctgcagtgctacaactgtcctaacccaactgctgactgcaaaacagccgtcaattgttcatctgattttgatgcgtgtctcattaccaaagctgggttacaagtgtataacaagtgttggaagtttgagcattgcaatttcaacgacgtcacaacccgcttgagggaaaatgagctaacgtactactgctgcaagaaggacctgtgtaactttaacgaacagcttgaaaatggtgggacatccttatcagagaaaacagttcttctgctggtgactccatttctggcagcagcctggagccttcatccctaa

SEQ ID NO: 687 - DNA, 498 bp, Homo sapiens
atggagatgttccaggggctgctgctgttgctgctgctgagcatgggcgggacatgggcatccaaggagccgcttcggccacggtgccgccccatcaatgccaccctggctgtggagaaggagggctgccccgtgtgcatcaccgtcaacaccaccatctgtgccggctactgccccaccatgacccgcgtgctgcagggggtcctgccggccctgcctcaggtggtgtgcaactaccgcgatgtgcgcttcgagtccatccggctccctggctgcccgcgcggcgtgaaccccgtggtctcctacgccgtggctctcagctgtcaatgtgcactctgccgccgcagcaccactgactgcgggggtcccaaggaccaccccttgacctgtgatgacccccgcttccaggactcctcttcctcaaaggcccctccccccagccttccaagcccatcccgactcccggggccctcggacaccccgatcctcccacaataa

SEQ ID NO: 688 - DNA, 915 bp, Homo sapiens
atgatttacacaatgaagaaagtacatgcactttgggcttctgtatgcctgctgcttaatcttgcccctgcccctcttaatgctgattctgaggaagatgaagaacacacaattatcacagatacggagttgccaccactgaaacttatgcattcattttgtgcattcaaggcggatgatggcccatgtaaagcaatcatgaaaagatttttcttcaatattttcactcgacagtgcgaagaatttatatatgggggatgtgaaggaaatcagaatcgatttgaaagtctggaagagtgcaaaaaaatgtgtacaagagataatgcaaacaggattataaagacaacattgcaacaagaaaagccagatttctgctttttggaagaagatcctggaatatgtcgaggttatattaccaggtatttttataacaatcagacaaaacagtgtgaacgtttcaagtatggtggatgcctgggcaatatgaacaattttgagacactggaagaatgcaagaacatttgtgaagatggtccgaatggtttccaggtggataattatggaacccagctcaatgctgtgaataactccctgactccgcaatcaaccaaggttcccagcctttttgaatttcacggtccctcatggtgtctcactccagcagacagaggattgtgtcgtgccaatgagaacagattctactacaattcagtcattgggaaatgccgcccatttaagtacagtggatgtgggggaaatgaaaacaattttacttccaaacaagaatgtctgagggcatgtaaaaaaggtttcatccaaagaatatcaaaaggaggcctaattaaaaccaaaagaaaaagaaagaagcagagagtgaaaatagcatatgaagaaatttttgttaaaaatatgtga

SEQ ID NO: 689 - DNA, 636 bp, Homo sapiens
atggcgcccagccggaatggcatggtcttgaagccccacttccacaaggactggcagcggcgcgtggccacgtggttcaaccagccggcccgtaagatccgcagacgtaaggcccggcaagccaaggcgcgccgcatcgccccgcgccccgcgtcgggtcccatccggcccatcgtgcgctgccccacggttcggtaccacacgaaggtgcgcgccggccgcggcttcagcctggaggagctcagggtggccggcattcacaagaaggtggcccggaccatcggcatttctgtggatccgaggaggcggaacaagtccacggagtccctgcaggccaacgtgcagcggctgaaggagtaccgctccaaactcatcctcttccccaggaagccctcggcccccaagaagggagacagttctgctgaagaactgaaactggccacccagctgaccggaccggtcatgcccgtccggaacgtctataagaaggagaaagctcgagtcatcactgaggaagagaagaatttcaaagccttcgctagtctccgtatggcccgtgccaacgcccggctcttcggcatacgggcaaaaagagccaaggaagccgcagaacaggatgttgaaaagaaaaaataa

SEQ ID NO: 690 - DNA, 753 bp, Homo sapiens
atgaccctgtcgccacttctgctgttcctgccaccgctgctgctgctgctggacgtccccacggcggcggtgcaggcgtcccctctgcaagcgttagacttctttgggaatgggccaccagttaactacaagacaggcaatctatacctgcgggggcccctgaagaagtccaatgcaccgcttgtcaatgtgaccctctactatgaagcactgtgcggtggctgccgagccttcctgatccgggagctcttcccaacatggctgttggtcatggagatcctcaatgtcacgctggtgccctacggaaacgcacaggaacaaaatgtcagtggcaggtgggagttcaagtgccagcatggagaagaggagtgcaaattcaacaaggtggaggcctgcgtgttggatgaacttgacatggagctagccttcctgaccattgtctgcatggaagagtttgaggacatggagagaagtctgccactatgcctgcagctctacgccccagggctgtcgccagacactatcatggagtgtgcaatgggggaccgcggcatgcagctcatgcacgccaacgcccagcggacagatgctctccagccaccacacgagtatgtgccctgggtcaccgtcaatgggaaacccttggaagatcagacccagctccttacccttgtctgccagttgtaccagggcaagaagccggatgtctgcccttcctcaaccagctccctcaggagtgtttgcttcaagtga

SEQ ID NO: 691 - DNA, 528 bp, Homo sapiens
atggacatcgccatccaccacccctggatccgccgccccttctttcctttccactcccccagccgcctctttgaccagttcttcggagagcacctgttggagtctgatcttttcccgacgtctacttccctgagtcccttctaccttcggccaccctccttcctgcgggcacccagctggtttgacactggactctcagagatgcgcctggagaaggacaggttctctgtcaacctggatgtgaagcacttctccccagaggaactcaaagttaaggtgttgggagatgtgattgaggtgcatggaaaacatgaagagcgccaggatgaacatggtttcatctccagggagttccacaggaaataccggatcccagctgatgtagaccctctcaccattacttcatccctgtcatctgatggggtcctcactgtgaatggaccaaggaaacaggtctctggccctgagcgcaccattcccatcacccgtgaagagaagcctgctgtcaccgcagcccccaagaaatag

SEQ ID NO: 692 - DNA, 648 bp, Homo sapiens
atgagcagctcagaggaggtgtcctggatttcctggttctgtgggctccgtggcaatgaattcttctgtgaagtggatgaagactacatccaggacaaatttaatcttactggactcaatgagcaggtccctcactaccgacaagctctagacatgatcttggacctggagcctgatgaagaactggaagacaaccccaaccagagtgacctgattgagcaggcagccgagatgctttatggattgatccacgcccgctacatccttaccaaccgtggcatcgcccagatgttggaaaagtaccagcaaggagactttggttactgtcctcgtgtgtactgtgagaaccagccaatgcttcccattggcctttcagacatcccaggtgaagccatggtgaagctctactgccccaagtgcatggatgtgtacacacccaagtcatcaagacaccatcacacggatggcgcctacttcggcactggtttccctcacatgctcttcatggtgcatcccgagtaccggcccaagagacctgccaaccagtttgtgcccaggctctacggtttcaagatccatgcgatggcctaccagctgcagctccaagccgccagcaacttcaagagcccagtcaagacgattcgctga

SEQ ID NO: 693 - DNA, 8232 bp, Homo sapiens
ttccgctaactccggggggcccaaggcccccccaagagggtccccaaatccacacgagtttcaccccgcctttaaaaggcccgcctggtttataacgccccctggggcccctttgaacaaaaggggtacgcaaattggggccccctctgggaaaatttataagccccccccccttttgtttgtttgtagtgagattttttttttttttggaatgtaaatcttttattaaaacagttgtctttccacagtagtaaagctttggcacatacagtataaaaaataatcacccaccataattataccaaattcctcttatcaactgcatactaagtgttttcaatacaattttttccgtataaaaatactgggaaaaattgataaataacaggtaagagaaagatatttctaggcaattactaggatcatttggaaaaagtgagtactgtggatatttaaaatatcacagtaacaagatcatgcttgttcctacagtattgcgggccagacacttaagtgaaagcagaagtgtttgggtgactttcctacttaaaattttggtcatatcatttcaaaacatttgcatcttggttggctgcatatgctttcctattgatcccaaaccaaatcttagaatcacttcatttaaaatactgagcggtattgaatacttcgaagcagaacaggcaatgtgcagccctcatttatgagaaaaccctcaggaaactcccagggtgatgcttggagaagctgtgagttgagctgaagctggagaacttcctccagagcaaagggcttaagaaagaaagaagaactctaagctgggtctgctaacatcactccagtttagatggatcttggcagagagacatgcttgttcctctggattggaaagatgatttactctcgggaatcttctctgtcagcctgtacatctaaaggcatgaagcactcaattgggcaattaacattagtgtttgttctctgatggtatctctgagaatactggttgtaggactggccagtagtgccttcgggactgggttcacccccaggtctgcggcagttgtcacagcgccagccccgctggcctccaaagcatgtgcaggagcaaatggcaccgagatattccttctgccactgttctcctacgtggtatgtcttcccatcatcataacacgttgcctcatgagggtcacacttgaattctccttttccgttcccaagacatgtgcagctcatcatctggccattttctccctgacggtcccacttctctccaatcttgtagttcacaccattgtcatggcaccatctagatgaatcacatctgaaatgaccacttccaaagcctaagcactggcacaacagtttaaagcctgattcagacattcgttcccactcatctccaacggcataatgggaaactgtgtaggggtcaaagcacgagtcatccgtaggttggttcaagccttcgttgacagagttgcccacggtaacaacctcttcccgaaccttatgcctctgctggtctttcagtgcctccactatgatgttgtaggtggcacctctggtgaggcctgtcagagtggcactggtagaagttccaggaaccctgaactgtaagggttcttcatcagtgccaacaggatgacatgaaatgatgtactcagaagtgtcctggaatggggcccatgagatggttgtctgagagagagcttcttgtcctacattcggcgggtatggtcttggcctatgccttatgggggtggccgttgtgggcggtgtggtccgcctaaaaccatgttcctcaaagatcatttgttgcccaacactgggttgctgaccagaagtgccaggaagctgaataccatttccagtgtcatacccagggtgggtgacgaaaggggtcttttgaactgtggaaggaacatccaagatctctggtccatgaagattggggtgtggaagggttaccagttggggaagctcgtctgtctttttccttccaatcaggggctcgctcttctgattattcttcagggcaatgacataaattgtatattcggttcccggttccaggccagtaatagtagcctctgtgacaccagggcggggccgagggaccacttctctgggaggagacccaggcttctcatacttgatgatgtagccggtaatcctggcacgtggcggctgccatgataccagcaaggaattgggtgtggtggccaggaaacgcaggttggatggtgcatcaatggcagtggaggcgtcgatgaccacaggggagctccgagcattgtcattcaaggtgtacaggtagatcttgtagtcagtgcctggttgtaaacctgtgatggtgtagcttctgacatctggcttgatggttctctggattggagtctggccattggctggaacggcatcaacttggaagccagtgatcgtctcagtcttggttctccagctaatggtgatggtggtctcagtagcatctgtcacacgagcccttcttggtgggctgacattctccagagtggtgacaacaccctgagctggtctgcttgtcaaagtgtccttaagagcatagacactcacttcatatttggtggccaccataagtcctgatacaaccacggatgagctgtcaggagcaaggttgatttctttcattggtccggtcttctccttgggggtcacccgcactcgatatccagtgagctgaacattgggtggtgtccactgggcgctcaggcttgtgggtgtgacctgagtgaacttcaggtcagttggtgcaggaatagctgtggactgggttccaatcaggggctggctctccatatcatcgtgcaaggcaaccacactgactgtgtactcagaacccggtctgaggccttgcagctctgcagtgtcttcttcaccatcaggtgcagggaatagctcatggattccatcctcagggctcgagtaggtcaccctgtacctggaaacttgcccctgtgggctttcccaagcaattttgatggaatcgacatccacatcagtgaatgccagtcctttagggcgatcaatgttggttactgcagtctgaaccagaggctgactctctccgcttggattctgagcatagacactaaccacatactccactgtgggctgcaagccttcaatagtcatttctgtttgatctggacctgcagttttagtttttgttggtcctggtccatttttgggagtggtggttactctgtaaccagtaacaggggaacttgaaggcagccacttgacactaatgctgttgtcctgaacatcggtcacttgcatctgggatggtttgtcaatttctgttcggtaattaatggaaattggcttgctgcttgcggggctgtctccacggccagtgacagcatacacagtgatggtataatcaactccaggtttaaggccgctgatggtagctgtagacttgctcccaggcacagtgaactcctggacagggctatttcctcctgtttctccgtaagtgatcctgtaatatctcactgtgacagcaggagcatcccagctgatcagtaggctggtgggggtcgcagcaacaacttccaggtccctcggaacatcagaaactgttgattgttggccaatcaataagggactttcctctctgccattaagagcaacgatgctgaccacatactctgtgcctggagtgaggttggtgagggtgatggaattccgagagtggggcacccgatcttctcgaggtctcccactgaagtgctcgggatgatggcggatcctgtagccagtgatggtggctcgaggagcaatccagtgcacagtaaaagagttggcagtaatatcagaaaagtcaatgccagttggggaatcaagacctgttttctgtcttcctctaagaggtgtgctctcatgttgttcgtagacactggagacactcactacatattctgtaccaggcaggagatttgttaagaccactgcattgtctgaaggagaaattgacaactctgcaacatcttcctcatttttcacaggtgagtaacgcaccaggaagttggttaaatcaatggatgggggtggagcccaggtgacacgcatggtgtctggaccaatgttggtgaatcgcaggtcagtgggaggaggaacagctgggatgatggtatcagagatagggacactttccttgtcatccttgacagtgtaaacactgacattgtactccaggccgggactcaggttatcaaaagtgcaggagctctgatcagcatggaccacttcttccaaagaatttccctgctggccgtttgtaggggttgtggtaattctataaccagtaatgtctggggtggtgctcctctcccaggagactgtgagcactccagtgtcagggtttgcctccagatgcaagtttgttggtggagacaatggtgtcaccactttgtttacaattggcgcatctctttcctgtccatctctcaggacttggatggtgtagacgtattctactcctggagtcaagccggacacaacgatgcttcctgagtctgaagtcacttctcgtggtgcctctcctccctggcttggtcgtacacccagcttaaaaccaattcttggagcaggcgtccatgtgatcacgatggtggtctcagtcacctcggtgttgtaaggtggaatagagctcccaggctgcagtgtggtaaagactccagtggctttggggctctcttggttgccctttatggccacgagggatacggtgtactcagatgcaggctgcagattcctcagggggtacttggagacagagggacccacattgtactgcctgggctggcctcttcgggtaaggcccacggtcagtcggtatcctgttatctgggcccgaggtggagtccatctcaccaggacagtagaatcagtttcattgacaaactggaggttagtgggagcatccagtttggttgtctgttgagcagtcagaggcttgctctccctcccatggctcactgcaaagactttgaagtaataggtgaccccaggggacagcccggtgacttctgcaaaggtgttcctgctgatgggcagcctctgcccgtgctcgccaggcaggttgacggggatcacatccacacggtagccggtcactgcactctcaggcggtgtccacatgatggtgaccttcacgtctgtcacttccacaaactgcaggtccctgggagagggcactgtatctgagcgtggggtgccagtggtttcttgttgaatgacaacaggtgtactttcttgattttcttccacagcatagatagtgatgttatactgaacaccaggttgcaagtcactgagggtgacggagtttgcagtttcaggaaggttgagttctgtgctgctaccttctactgatggcgaatagactattctgtaccctgtgatgggagcctggggtctgctccagcgaacaacaattgaggtgtcatcaacttggtccacagtcgggtcaggaggggcatcaggcgctgttgtttgtgaagtagacaggatcaaactctgctccccatcctcagatatctgatagacatttacaatgtattttcggccaggaagcaggtcagggatgttcacagaagtggctgtgcttggaagatccaggtactgtggctcatctccctcctcactcagctcatattccacccggaatcccgacacggtgtcggaagctgagacccaggagaccacaaagctactggctgtgatttcggtcacagattcagaagtggccacaagaggagaaaagggagtcgtctctcctgtcacggtgttgctggtcacaggtgtgctggtgctggtggtggtgaagtcaaagcgagtcacttcttggtggccgtactgctggatgctgatgagctggccctcgtataccacaccaggcttcaggcctttgatggtgtaggagtttaagtggcctggtatggtagcttccttccaacggcctacagaatttttaggtctccacctgagaatgtacttggaaatgtgagatggctgtggtgcattccactggatggggtgggagttgggctgactcggagtctcagtgataaatacttcgacaggaccacttgagcttggataggtctgtaaaggttggcaatgccactccccaatgccacggccatagcagtagcactggtatctgacaccatgcacatacttctcccatgaatctccaatttgataaaacgtcccagtctctgaatcctggcattggtcgacgggatcacacttccacctgccccgaccctgaccgaagcatgtacagttcagcatgtgcccctcttcatgacgcttgtggaatgtgtcgttcacattgtaagtgatgtcatcaacaatgcactgatctcgaagctgcgagtaggcaatgcatgtccattccccacgaccattcccaacacacgtgcacctcatcatgtgacccatgtcatgctgcttatcccactgatctccaatgcggtacatgaccccttcattggttgtgcagatttcctcgtgggcagccatggggcagaacccaaacttctggtcggcatcatagttctgtgtggtcccacaccacttcatgttgtctcttctgccctcagaagtgcaatcagtgtaattgtggttgttgtataggaaggggaagtggcacaaggcaccattggaatttcctcctcgagtctgaaccaaaacagtgtggtctgtgcagaaagagtatttctggtcctgctcataattcgaagttgtgctgcaccaaagatgtccgtcctgtcgcccttccgtggtgcaggagtagaacgtcctgccattgtaggtgaatggtaagacacatggctctccatttgagttgccaccgtaagtctgggttacagctgtctcttggcagctgactccgttgcccaggcacgtgcaaagcatttgcttatttccttgtgtcttcagccactgcatccccacagagtagaccacaccactgtctgtgacacagtggccatagggaggaggctgggggtgaggctgcggttggtaaacagctgcacgaacatcggtgaaggggccagatccgctcgatgtggtctgcacagaggtgtgcctctcacacttccactctcctcggccgttgcctgtgcagatgcactggagcaggtttcctcgattatccttcttgctccaggtgtctccaattctataggatgtccttgtgtcctgatcgttgcatctatttctagaagtgcaagtgatgcgtccgctgccttctcccaggcaagtacaatctaccatcatccagccttggtagggcttctcccacgtttctccgaccacataggaagtcccagcagcatgatcaaaacacttctcagctatgggcttgcaggtccattctccttttccattaccaagacacacacactctaacatgtaaccaccagtctcatgtggtctcctccaggtgtcaccaatcttgtaggactgacccccttcatggcagcggtttgcgatggtacagcttattctccctcgcccagccccgatgcaggtacagtcccagatcatggagtctttaggacgctcataagtgtcacccactcggtaagtgttcccagtgtacttgtcaaagcaagtctcttcagcttcaggtttactctcgcagttaaaacctcggcttcctccataacaagtacaaaccaacgcattgcctaggtaggtccgctcccactgttgatttatctgatagtgttttccattgtcataacaaccgggcttgctttgactgacagccaccggggactggggctgaaccatttgctgagcctgcctcttgctcttcgaggctcccgtggagggcaccgctgtccccaggcactggacggccagcagcagcagcccgggccccggacccctaagcatgttgagacggtgggggagagacgcccgcaccgggaggcaagttgccaccaagtttgcttcccttcgcaactgcgggaaaaatcccttctaatgcctcccgggggttgtcgcctccaagaaggtgggggccagagggtggggaaggggacgggtggagggacagaagggatgcagaggaccagagaagttgtggctgcaggtcccctcttcccgctcgcgcctggggttccctctcctccccctgtgcagcacagccggcgcgggcgt

SEQ ID NO: 694 - DNA, 1566 bp, Homo sapiens
atgctggccaagggtcttcccccacgctcagtcctggtcaaaggctaccagacctttctgagtgcccccagggaggggctggggcgtctcagggtgcccactggcgagggagctggcatctccacccgcagtcctcgccccttcaatgagatcccctctcctggtgacaatggctggctaaacctgtaccatttctggagggagacgggcacacacaaagtccaccttcaccatgtccagaatttccagaagtatggcccgatttacagggagaagctcggcaacgtggagtcggtttatgtcatcgaccctgaagatgtggcccttctctttaagtccgagggccccaacccagaacgattcctcatcccgccctgggtcgcctatcaccagtattaccagagacccataggagtcctgttgaagaagtcggcagcctggaagaaagaccgggtggccctgaaccaggaggtgatggctccagaggccaccaagaactttttgcccctgttggatgcagtgtctcgggacttcgtcagtgtcctgcacaggcgcatcaagaaggcgggctccggaaattactcgggggacatcagtgatgacctgttccgctttgcctttgagtccatcactaacgtcatttttggggagcgccaggggatgctggaggaagtagtgaaccccgaggcccagcgattcattgatgccatctaccagatgttccacaccagcgtccccatgctcaaccttcccccagacctgttccgtctgttcaggaccaagacctggaaggaccatgtggctgcatgggacgtgattttcagtaaagctgacatatacacccagaacttctactgggaattgagacagaaaggaagtgttcaccacgattaccgtggcatgctctacagactcctgggagacagcaagatgtccttcgaggacatcaaggccaacgtcacagagatgctggcaggaggggtggacacgacgtccatgaccctgcagtggcacttgtatgagatggcacgcaacctgaaggtgcaggatatgctgcgggcagaggtcttggctgcgcggcaccaggcccagggagacatggccacgatgctacagctggtccccctcctcaaagccagcatcaaggagacactaagacttcaccccatctccgtgaccctgcagagatatcttgtaaatgacttggttcttcgagattacatgattcctgccaagacactggtgcaagtggccatctatgctctgggccgagagcccaccttcttcttcgacccggaaaattttgacccaacccgatggctgagcaaagacaagaacatcacctacttccggaacttgggctttggctggggtgtgcggcagtgtctgggacggcggatcgctgagctagagatgaccatcttcctcatcaatatgctggagaacttcagagttgaaatccaacacctcagcgatgtgggcaccacattcaacctcattctgatgcctgaaaagcccatctccttcaccttctggccctttaaccaggaagcaacccagcagtga

SEQ ID NO: 695 - DNA, 336 bp, Homo sapiens
atgatttggcgaggaagatcaacatataggcctaggccgaggagaagtgtaccacctcctgagctgattgggcctatgctggagcccggtgatgaggagcctcagcaagaggaaccaccaactgaaagtcgggatcctgcacctggtcaggagagagaagaagatcagggtgcagctgagactcaagtgcctgacctggaagctgatctccaggagctgtctcagtcaaagactgggggtgaatgtggaaatggtcctgatgaccaggggaagattctgccaaaatcagaacaatttaaaatgccagaaggaggtgacaggcaaccacaggtttaa

SEQ ID NO: 696 - DNA, 1389 bp, Homo sapiens
atgggaaaggaaaagactcatatcaacattgtcgtcattggacacgtagattcgggcaagtccaccactactggccatctgatctataaatgcggtggcatcgacaaaagaaccattgaaaaatttgagaaggaggctgctgagatgggaaagggctccttcaagtatgcctgggtcttggataaactgaaagctgagcgtgaacgtggtatcaccattgatatctccttgtggaaatttgagaccagcaagtactatgtgactatcattgatgccccaggacacagagactttatcaaaaacatgattacagggacatctcaggctgactgtgctgtcctgattgttgctgctggtgttggtgaatttgaagctggtatctccaagaatgggcagacccgagagcatgcccttctggcttacacactgggtgtgaaacaactaattgtcggtgttaacaaaatggattccactgagccaccctacagccagaagagatatgaggaaattgttaaggaagtcagcacttacattaagaaaattggctacaaccccgacacagtagcatttgtgccaatttctggttggaatggtgacaacatgctggagccaagtgctaacatgccttggttcaagggatggaaagtcacccgtaaggatggcaatgccagtggaaccacgctgcttgaggctctggactgcatcctaccaccaactcgtccaactgacaagcccttgcgcctgcctctccaggatgtctacaaaattggtggtattggtactgttcctgttggccgagtggagactggtgttctcaaacccggtatggtggtcacctttgctccagtcaacgttacaacggaagtaaaatctgtcgaaatgcaccatgaagctttgagtgaagctcttcctggggacaatgtgggcttcaatgtcaagaatgtgtctgtcaaggatgttcgtcgtggcaacgttgctggtgacagcaaaaatgacccaccaatggaagcagctggcttcactgctcaggtgattatcctgaaccatccaggccaaataagcgccggctatgcccctgtattggattgccacacggctcacattgcatgcaagtttgctgagctgaaggaaaagattgatcgccgttctggtaaaaagctggaagatggccctaaattcttgaagtctggtgatgctgccattgttgatatggttcctggcaagcccatgtgtgttgagagcttctcagactatccacctttgggtcgctttgctgttcgtgatatgagacagacagttgcggtgggtgtcatcaaagcagtggacaagaaggctgctggagctggcaaggtcaccaagtctgcccagaaagctcagaaggctaaatga

SEQ ID NO: 697 - DNA, 1314 bp, Homo sapiens
atgagttggtccttgcacccccggaatttaattctctacttctatgctcttttatttctctcttcaacatgtgtagcatatgttgctaccagagacaactgctgcatcttagatgaaagattcggtagttattgtccaactacctgtggcattgcagatttcctgtctacttatcaaaccaaagtagacaaggatctacagtctttggaagacatcttacatcaagttgaaaacaaaacatcagaagtcaaacagctgataaaagcaatccaactcacttataatcctgatgaatcatcaaaaccaaatatgatagacgctgctactttgaagtccaggaaaatgttagaagaaattatgaaatatgaagcatcgattttaacacatgactcaagtattcgatatttgcaggaaatatataattcaaataatcaaaagattgttaacctgaaagagaaggtagcccagcttgaagcacagtgccaggaaccttgcaaagacacggtgcaaatccatgatatcactgggaaagattgtcaagacattgccaataagggagctaaacagagcgggctttactttattaaacctctgaaagctaaccagcaattcttagtctactgtgaaatcgatgggtctggaaatggatggactgtgtttcagaagagacttgatggcagtgtagatttcaagaaaaactggattcaatataaagaaggatttggacatctgtctcctactggcacaacagaattttggctgggaaatgagaagattcatttgataagcacacagtctgccatcccatatgcattaagagtggaactggaagactggaatggcagaaccagtactgcagactatgccatgttcaaggtgggacctgaagctgacaagtaccgcctaacatatgcctacttcgctggtggggatgctggagatgcctttgatggctttgattttggcgatgatcctagtgacaagtttttcacatcccataatggcatgcagttcagtacctgggacaatgacaatgataagtttgaaggcaactgtgctgaacaggatggatctggttggtggatgaacaagtgtcacgctggccatctcaatggagtttattaccaaggtggcacttactcaaaagcatctactcctaatggttatgataatggcattatttgggccacttggaaaacccggtggtattccatgaagaaaaccactatgaagataatcccattcaacagactcacaattggagaaggacagcaacaccacctggggggagccaaacaggctggagacgtttaa

SEQ ID NO: 698 - DNA, 1398 bp, Homo sapiens
atgactggccgcgcgatggacccgctgcccgcggctgcagtcggggcggcagctgaggcggaggctgacgaggaggcggatcccccggcgtcagatctgccgacaccccaggccatcgagccccaggccatcgtgcagcaggtcccagcccccagtcgaatgcagatgccgcaggggaacccgctgctgctgtcccacaccctgcaggagctgctggccagggacaccgtgcaggtggagctcattccggagaagaagggcctcttcctgaagcatgtggagtatgaggtttccagccagcgcttcaagtcctcggtatacagacggtacaatgacttcgtggtcttccaggagatgctcctgcacaagttcccctaccgtatggtgcctgccctgccacccaagagaatgctgggagctgacagggagttcatcgaggccaggaggagagccctgaagcgcttcgtcaacctggtggcgcgacaccccctgttctccgaggatgtggtcctcaagctcttcctgtccttcagcggctcggatgtgcagaacaagttaaaggagtcagcacagtgcgtcggggacgaattcctgaactgtaagctggctaccagggccaaggacttcctcccagctgacatccaggctcagtttgccatcagccgggagctgatccggaacatctacaatagctttcacaagcttcgcgacagggccgagcggatcgcgtcgcgggccatcgacaatgcggcagatcttctcatattcgggaaggagctaagtgcaatagggtctgacacgaccccgctgccctcctgggccgctctgaatagcagcacgtgggggtccctgaagcaggctctgaaaggcctgtctgtggaattcgcgctgctcgccgacaaggctgcacaacagggtaagcaggaagagaacgacgtggtggagaagctgaacctcttcttggatctgctgcagtcctataaggacctgtgcgagcggcatgagaagggcgtgttgcacaagcaccagcgggccctgcacaagtacagcctgatgaagaggcagatgatgagcgccaccgcgcagaaccgcgagccggagtccgtggagcagctggagtcccgcatcgtggagcaggagaacgcgattcagacgatggagctgcggaactacttctccctgtactgcctgcaccaggagacgcagctcatccacgtctacctgcccctcacctcccacatcctccgcgccttcgtcaactctcagatccaagggcacaaggagatgagcaaggtgtggaacgacctgaggcccaagctcagctgcctctttgcgggaccacacagcaccctgaccccaccgtgctccccgccggaggacggcctgtgtcctcactag

SEQ ID NO: 699 - DNA, 669 bp, Homo sapiens
atgaaactccccctacttctggctcttctatttggggcagtttctgctcttcatctaaggtctgagacttccacctttgagacccctttgggtgctaagacgctgcctgaggatgaggagacaccagagcaggagatggaggagaccccttgcagggagctggaggaagaggaggagtggggctctggaagtgaagatgcctccaagaaagatggggctgttgagtctatctcagtgccagatatggtggacaaaaaccttacgtgtcctgaggaagaggacacagtaaaagtggtgggcatccctgggtgccagacctgccgctacctcctggtgagaagtcttcagacgtttagtcaagcttggtttacttgccggaggtgctacaggggcaacctggtttccatccacaacttcaatattaattatcgaatccagtgttctgtcagcgcgctcaaccagggtcaagtctggattggaggcaggatcacaggctcgggtcgctgcagacgctttcagtgggttgacggcagccgctggaactttgcgtactgggctgctcaccagccctggtcccgcggtggtcactgcgtggccctgtgtacccgaggaggctactggcgtcgagcccactgcctcagaagacttcctttcatctgttcctactga

SEQ ID NO: 700 - DNA, 543 bp, Homo sapiens
atgctgtgcctcctgctcaccctgggcgtggccctggtctgtggtgtcccggccatggacatcccccagaccaagcaggacctggagctcccaaagttggcagggacctggcactccatggccatggcgaccaacaacatctccctcatggcgacactgaaggcccctctgagggtccacatcacctcactgttgcccacccccgaggacaacctggagatcgttctgcacagatgggagaacaacagctgtgttgagaagaaggtccttggagagaagactgagaatccaaagaagttcaagatcaactatacggtggcgaacgaggccacgctgctcgatactgactacgacaatttcctgtttctctgcctacaggacaccaccacccccatccagagcatgatgtgccagtacctggccagagtcctggtggaggacgatgagatcatgcagggattcatcagggctttcaggcccctgcccaggcacctatggtacttgctggacttgaaacagatggaagagccgtgccgtttctag

SEQ ID NO: 701 - DNA, 1305 bp, Homo sapiens
atgtctattctcaagatccatgccagggagatctttgactctcgcgggaatcccactgttgaggttgatctcttcacctcaaaaggtctcttcagagctgctgtgcccagtggtgcttcaactggtatctatgaggccctagagctccgggacaatgataagactcgctatatggggaagggtgtctcaaaggctgttgagcacatcaataaaactattgcgcctgccctggttagcaagaaactgaacgtcacagaacaagagaagattgacaaactgatgatcgagatggatggaacagaaaataaatctaagtttggtgcgaacgccattctgggggtgtcccttgccgtctgcaaagctggtgccgttgagaagggggtccccctgtaccgccacatcgctgacttggctggcaactctgaagtcatcctgccagtcccggcgttcaatgtcatcaatggcggttctcatgctggcaacaagctggccatgcaggagttcatgatcctcccagtcggtgcagcaaacttcagggaagccatgcgcattggagcagaggtttaccacaacctgaagaatgtcatcaaggagaaatatgggaaagatgccaccaatgtgggggatgaaggcgggtttgctcccaacatcctggagaataaagaaggcctggagctgctgaagactgctattgggaaagctggctacactgataaggtggtcatcggcatggacgtagcggcctccgagttcttcaggtctgggaagtatgacctggacttcaagtctcccgatgaccccagcaggtacatctcgcctgaccagctggctgacctgtacaagtccttcatcaaggactacccagtggtgtctatcgaagatccctttgaccaggatgactggggagcttggcagaagttcacagccagtgcaggaatccaggtagtgggggatgatctcacagtgaccaacccaaagaggatcgccaaggccgtgaacgagaagtcctgcaactgcctcctgctcaaagtcaaccagattggctccgtgaccgagtctcttcaggcgtgcaagctggcccaggccaatggttggggcgtcatggtgtctcatcgttcgggggagactgaagataccttcatcgctgacctggttgtggggctgtgcactgggcagatcaagactggtgccccttgccgatctgagcgcttggccaagtacaaccagctcctcagaattgaagaggagctgggcagcaaggctaagtttgccggcaggaacttcagaaaccccttggccaagtaa

SEQ ID NO: 702 - DNA, 1509 bp, Homo sapiens
atgctcgcggcgatgggctctctggcggctgccctctgggcagtggtccatcctcggactctcctactgggcactgtcgcctttctgctcgctgctgactttctcaaaagacggcgcccaaagaactacccgccggggccctggcgcctgcccttccttggcaacttcttccttgtggacttcgagcagtcgcacctggaggttcagctgtttgtgaagaaatatgggaacctttttagcttggagcttggtgacatatctgcagttcttattactggcttgcccttaatcaaagaagcccttatccacatggaccaaaactttgggaaccgccccgtgacccctatgcgagaacatatctttaagaaaaatggattgattatgtcaagtggccaggcatggaaggagcaaagaaggttcactctgacagcactaaggaactttggtttaggaaagaagagcttagaggaacgcattcaggaggaggcccaacacctcactgaagcaataaaagaggagaacggacagccttttgaccctcatttcaagatcaacaatgcagtttccaatatcatttgctccatcaccttcggagaacgctttgagtaccaggatagttggtttcagcagctgctgaagttactagatgaagtcacatacttggaggcttcaaagacatgccagctctacaatgtctttccatggataatgaaattcctgcctggaccccaccaaactctcttcagcaactggaaaaaactgaaattgtttgtttctcatatgattgacaaacacagaaaggattggaatcctgcagaaacaagagactttattgatgcttaccttaaagaaatgtcaaagcacacaggcaatcctacttcaagtttccatgaagaaaacctcatctgcagcaccctggacctcttctttgccggaaccgagacaacttccacaactctgcgatgggctctgctttatatggccctctacccagaaatccaagaaaaagtacaagctgagattgacagagtgattggccaggggcagcagccgagcacagccgcccgggagtccatgccctacaccaatgctgtcatccatgaggtgcagagaatgggcaacatcatccccctgaacgttcccagggaagtgacagttgataccactttggctgggtaccacctgcccaagggtaccatgatcctgaccaatttgacggcgctgcacagggaccccacagagtgggccacccctgacacattcaatccggaccattttctggagaatggacagtttaagaaaagggaagcctttatgcctttctcaataggaaagcgggcatgcctcggagaacagttggccaggactgagctgtttattttcttcacttcccttatgcaaaaatttaccttcaggcccccaaacaatgagaagctgagcctgaagtttagaatgggtatcaccatttccccagtcagtcaccgcctctgcgctgttcctcaggtgtaa

SEQ ID NO: 703 - DNA, 795 bp, Homo sapiens
atggcggttggcaagaacaagcgccttacgaaaggcggcaaaaagggagccaagaagaaagtggttgatccattttctaagaaagattggtatgatgtgaaagcacctgctatgttcaatataagaaatattggaaagacgctcgtcaccaggacccaaggaaccaaaattgcatctgatggtctcaagggtcgtgtgtttgaagtgagtcttgctgatttgcagaatgatgaagttgcatttagaaaattcaagctgattactgaagatgttcagggtaaaaactgcctgactaacttccatggcatggatcttacccgtgacaaaatgtgttccatggtcaaaaaatggcagacaatgattgaagctcacgttgatgtcaagactaccgatggttacttgcttcgtctgttctgtgttggttttactaaaaaacgcaacaatcagatacggaagacctcttatgctcagcaccaacaggtccgccaaatccggaagaagatgatggaaatcatgacccgagaggtgcagacaaatgacttgaaagaagtggtcaataaattgattccagacagcattggaaaagacatagaaaaggcttgccaatctatttatcctctccatgatgtcttcgttagaaaagtaaaaatgctgaagaagcccaagtttgaattgggaaagctcatggagcttcatggtgaaggcagtagttctggaaaagccactggggacgagacaggtgctaaagttgaacgagctgatggatatgaaccaccagtccaagaatctgtttaa

SEQ ID NO: 704 - DNA, 1828 bp, Homo sapiens
ggcacgaggcttcaatgccacctaccatgtgcggggctattgcttgccttgggacagaccctgtggcttaggctctggcctgggagctggcgaaggcctaggtgagcgctgctacagtgaggcacagcgctgtgacggctcatgggactgtgctgacggcacagatgaggaggactgcccaggctgcccacctggacacttcccctgtggggctgctggcacctctggtgccacagcctgctacctgcctgctgaccgctgcaactaccagactttctgtgctgatggagcagatgagagacgctgtcggcattgccagcctggcaatttccgatgccgggacgagaagtgcgtgtatgagacgtgggtgtgcgatgggcagccagactgtgcggacggcagtgatgagtgggactgctcctatgttctgccccgcaaggtcattacagctgcagtcattggcagcctagtgtgcggcctgctcctggtcatcgccctgggctgcacctgcaagctctatgccattcgcacccaggagtacagcatctttgcccccctctcccggatggaggctgagattgtgcagcagcaggcacccccttcctacgggcagctcattgcccagggtgccatcccacctgtagaagactttcctacagagaatcctaatgataactcagtgctgggcaacctgcgttctctgctacagatcttacgccaggatatgactccaggaggtggcccaggtgcccgccgtcgtcagcggggccgcttgatgcgacgcctggtacgccgtctccgccgctggggcttgctccctcgaaccaacaccccggctcgggcctctgaggccagatcccaggtcacaccttctgctgctccccttgaggccctagatggtggcacaggtccagcccgtgagggcggggcagtgggtgggcaagatggggagcaggcacccccactgcccatcaaggctcccctcccatctgctagcacgtctccagcccccactactgtccctgaagccccagggccactgccctcactgcccctagagccatcactattgtctggagtggtgcaggccctgcgaggccgcctgttgcccagcctggggcccccaggaccaacccggagcccccctggaccccacacagcagtcctggccctggaagatgaggacgatgtgctactggtgccactggctgagccgggggtgtgggtagctgaggcagaggatgagccactgcttacctgaggggacctgggggctctactgaggcctctcccctgggggctctactcatagtggcacaaccttttagaggtgggtcagcctcccctccaccacttccttccctgtccctggatttcagggacttggtgggcctcccgttgaccctatgtagctgctataaagttaagtgtccctcaggcagggagagggctcacagagtctcctctgtacgtggccatggccagacaccccagtcccttcaccaccacctgctccccacgccaccaccatttgggtggctgtttttaaaaagtaaagttcttagaggatcatagggtctggacactccatccttgccaaacctctacccaaacagtggccttaagcaccggaatgccaattaactagagaccctccagcccccaagggggaggatttgggcagaacctgaggttttgccatccacaatccctcctacaggggcctggctcacaaaaagagtgcaacaaatgcttctattccatagctacggcattgctcagtaagttgaggtcaaaaataaaggaatcatacatctcaaaaaaaaaa

SEQ ID NO: 705 - DNA, 2859 bp, Homo sapiens
atgggagtgaggcacccgccctgctcccaccggctcctggccgtctgcgccctcgtgtccttggcaaccgctgcactcctggggcacatcctactccatgatttcctgctggttccccgagagctgagtggctcctccccagtcctggaggagactcacccagctcaccagcagggagccagcagaccagggccccgggatgcccaggcacaccccggccgtcccagagcagtgcccacacagtgcgacgtcccccccaacagccgcttcgattgcgcccctgacaaggccatcacccaggaacagtgcgaggcccgcggctgctgctacatccctgcaaagcaggggctgcagggagcccagatggggcagccctggtgcttcttcccacccagctaccccagctacaagctggagaacctgagctcctctgaaatgggctacacggccaccctgacccgtaccacccccaccttcttccccaaggacatcctgaccctgcggctggacgtgatgatggagactgagaaccgcctccacttcacgatcaaagatccagctaacaggcgctacgaggtgcccttggagaccccgcatgtccacagccgggcaccgtccccactctacagcgtggagttctccgaggagcccttcggggtgatcgtgcgccggcagctggacggccgcgtgctgctgaacacgacggtggcgcccctgttctttgcggaccagttccttcagctgtccacctcgctgccctcgcagtatatcacaggcctcgccgagcacctcagtcccctgatgctcagcaccagctggaccaggatcaccctgtggaaccgggaccttgcgcccacgcccggtgcgaacctctacgggtctcaccctttctacctggcgctggaggacggcgggtcggcacacggggtgttcctgctaaacagcaatgccatggatgtggtcctgcagccgagccctgcccttagctggaggtcgacaggtgggatcctggatgtctacatcttcctgggcccagagcccaagagcgtggtgcagcagtacctggacgttgtgggatacccgttcatgccgccatactggggcctgggcttccacctgtgccgctggggctactcctccaccgctatcacccgccaggtggtggagaacatgaccagggcccacttccccctggacgtccagtggaacgacctggactacatggactcccggagggacttcacgttcaacaaggatggcttccgggacttcccggccatggtgcaggagctgcaccagggcggccggcgctacatgatgatcgtggatcctgccatcagcagctcgggccctgccgggagctacaggccctacgacgagggtctgcggaggggggttttcatcaccaacgagaccggccagccgctgattgggaaggtatggcccgggtccactgccttccccgacttcaccaaccccacagccctggcctggtgggaggacatggtggctgagttccatgaccaggtgcccttcgacggcatgtggattgacatgaacgagccttccaacttcatcaggggctctgaggacggctgccccaacaatgagctggagaacccaccctacgtgcctggggtggttggggggaccctccaggcggccaccatctgtgcctccagccaccagtttctctccacacactacaacctgcacaacctctacggcctgaccgaagccatcgcctcccacagggcgctggtgaaggctcgggggacacgcccatttgtgatctcccgctcgacctttgctggccacggccgatacgccggccactggacgggggacgtgtggagctcctgggagcagctcgcctcctccgtgccagaaatcctgcagtttaacctgctgggggtgcctctggtcggggccgacgtctgcggcttcctgggcaacacctcagaggagctgtgtgtgcgctggacccagctgggggccttctaccccttcatgcggaaccacaacagcctgctcagtctgccccaggagccgtacagcttcagcgagccggcccagcaggccatgaggaaggccctcaccctgcgctacgcactcctcccccacctctacacactgttccaccaggcccacgtcgcgggggagaccgtggcccggcccctcttcctggagttccccaaggactctagcacctggactgtggaccaccagctcctgtggggggaggccctgctcatcaccccagtgctccaggccgggaaggccgaagtgactggctacttccccttgggcacatggtacgacctgcagacggtgccaatagaggcccttggcagcctcccacccccacctgcagctccccgtgagccagccatccacagcgaggggcagtgggtgacgctgccggcccccctggacaccatcaacgtccacctccgggctgggtacatcatccccctgcagggccctggcctcacaaccacagagtcccgccagcagcccatggccctggctgtggccctgaccaagggtggggaggcccgaggggagctgttctgggacgatggagagagcctggaagtgctggagcgaggggcctacacacaggtcatcttcctggccaggaataacacgatcgtgaatgagctggtacgtgtgaccagtgagggagctggcctgcagctgcagaaggtgactgtcctgggcgtggccacggcgccccagcaggtcctctccaacggtgtccctgtctccaacttcacctacagccccgacaccaaggtcctggacatctgtgtctcgctgttgatgggagagcagtttctcgtcagctggtgttag

SEQ ID NO: 706 - DNA, 444 bp, Homo sapiens
atgggtcatttcacagaggaggacaaggctactatcacaagcctgtggggcaaggtgaatgtggaagatgctggaggagaaaccctgggaaggctcctggttgtctacccatggacccagaggttctttgacagctttggcaacctgtcctctgcctctgccatcatgggcaaccccaaagtcaaggcacatggcaagaaggtgctgacttccttgggagatgccataaagcacctggatgatctcaagggcacctttgcccagctgagtgaactgcactgtgacaagctgcatgtggatcctgagaacttcaagctcctgggaaatgtgctggtgaccgttttggcaatccatttcggcaaagaattcacccctgaggtgcaggcttcctggcagaagatggtgactggagtggccagtgccctgtcctccagataccactga

SEQ ID NO: 707 - DNA, 2511 bp, Homo sapiens
atggcaaggctgggaaactgcagcctgacttgggctgccctgatcatcctgctgctccccggaagtctggaggagtgcgggcacatcagtgtctcagcccccatcgtccacctgggggatcccatcacagcctcctgcatcatcaagcagaactgcagccatctggacccggagccacagattctgtggagactgggagcagagcttcagcccgggggcaggcagcagcgtctgtctgatgggacccaggaatctatcatcaccctgccccacctcaaccacactcaggcctttctctcctgctgcctgaactggggcaacagcctgcagatcctggaccaggttgagctgcgcgcaggctaccctccagccataccccacaacctctcctgcctcatgaacctcacaaccagcagcctcatctgccagtgggagccaggacctgagacccacctacccaccagcttcactctgaagagtttcaagagccggggcaactgtcagacccaaggggactccatcctggactgcgtgcccaaggacgggcagagccactgctgcatcccacgcaaacacctgctgttgtaccagaatatgggcatctgggtgcaggcagagaatgcgctggggaccagcatgtccccacaactgtgtcttgatcccatggatgttgtgaaactggagccccccatgctgcggaccatggaccccagccctgaagcggcccctccccaggcaggctgcctacagctgtgctgggagccatggcagccaggcctgcacataaatcagaagtgtgagctgcgccacaagccgcagcgtggagaagccagctgggcactggtgggccccctccccttggaggcccttcagtatgagctctgcgggctcctcccagccacggcctacaccctgcagatacgctgcatccgctggcccctgcctggccactggagcgactggagccccagcctggagctgagaactaccgaacgggcccccactgtcagactggacacatggtggcggcagaggcagctggaccccaggacagtgcagctgttctggaagccagtgcccctggaggaagacagcggacggatccaaggttatgtggtttcttggagaccctcaggccaggctggggccatcctgcccctctgcaacaccacagagctcagctgcaccttccacctgccttcagaagcccaggaggtggcccttgtggcctataactcagccgggacctctcgccccaccccggtggtcttctcagaaagcagaggcccagctctgaccagactccatgccatggcccgagaccctcacagcctctgggtaggctgggagccccccaatccatggcctcagggctatgtgattgagtggggcctgggcccccccagcgcgagcaatagcaacaagacctggaggatggaacagaatgggagagccacggggtttctgctgaaggagaacatcaggccctttcagctctatgagatcatcgtgactcccttgtaccaggacaccatgggaccctcccagcatgtctatgcctactctcaagaaatggctccctcccatgccccagagctgcatctaaagcacattggcaagacctgggcacagctggagtgggtgcctgagccccctgagctggggaagagcccccttacccactacaccatcttctggaccaacgctcagaaccagtccttctccgccatcctgaatgcctcctcccgtggctttgtcctccatggcctggagcccgccagtctgtatcacatccacctcatggctgccagccaggctggggccaccaacagtacagtcctcaccctgatgaccttgaccccagaggggtcggagctacacatcatcctgggcctgttcggcctcctgctgttgctcacctgcctctgtggaactgcctggctctgttgcagccccaacaggaagaatcccctctggccaagtgtcccagacccagctcacagcagcctgggctcctgggtgcccacaatcatggaggaggatgccttccagctgcccggccttggcacgccacccatcaccaagctcacagtgctggaggaggatgaaaagaagccggtgccctgggagtcccataacagctcagagacctgtggcctccccactctggtccagacctatgtgctccagggggacccaagagcagtttccacccagccccaatcccagtctggcaccagcgatcaggtcctttatgggcagctgctgggcagccccacaagcccagggccagggcactatctccgctgtgactccactcagcccctcttggcgggcctcacccccagccccaagtcctatgagaacctctggttccaggccagccccttggggaccctggtaaccccagccccaagccaggaggacgactgtgtctttgggccactgctcaacttccccctcctgcaggggatccgggtccatgggatggaggcgctggggagcttctag

SEQ ID NO: 708 - DNA, 876 bp, Homo sapiens
atgcagcgggcgcgacccacgctctgggccgctgcgctgactctgctggtgctgctccgcgggccgccggtggcgcgggctggcgcgagctcggggggcttgggtcccgtggtgcgctgcgagccgtgcgacgcgcgtgcactggcccagtgcgcgcctccgcccgccgtgtgcgcggagctggtgcgcgagccgggctgcggctgctgcctgacgtgcgcactgagcgagggccagccgtgcggcatctacaccgagcgctgtggctccggccttcgctgccagccgtcgcccgacgaggcgcgaccgctgcaggcgctgctggacggccgcgggctctgcgtcaacgctagtgccgtcagccgcctgcgcgcctacctgctgccagcgccgccagctccaggaaatgctagtgagtcggaggaagaccgcagcgccggcagtgtggagagcccgtccgtctccagcacgcaccgggtgtctgatcccaagttccaccccctccattcaaagataatcatcatcaagaaagggcatgctaaagacagccagcgctacaaagttgactacgagtctcagagcacagatacccagaacttctcctccgagtccaagcgggagacagaatatggtccctgccgtagagaaatggaagacacactgaatcacctgaagttcctcaatgtgctgagtcccaggggtgtacacattcccaactgtgacaagaagggattttataagaaaaagcagtgtcgcccttccaaaggcaggaagcggggcttctgctggtgtgtggataagtatgggcagcctctcccaggctacaccaccaaggggaaggaggacgtgcactgctacagcatgcagagcaagtag

SEQ ID NO: 709 - DNA, 780 bp, Homo sapiens
atgtcagaggtccccgttgctcgcgtctggctggtactgctcctgctgactgtccaggtcggcgtgacagccggcgctccgtggcagtgcgcgccctgctccgccgagaagctcgcgctctgcccgccggtgtccgcctcgtgctcggaggtcacccggtccgccggctgcggctgttgcccgatgtgcgccctgcctctgggcgccgcgtgcggcgtggcgactgcacgctgcgcccggggactcagttgccgcgcgctgccgggggagcagcaacctctgcacgccctcacccgcggccaaggcgcctgcgtgcaggagtctgacgcctccgctccccatgctgcagaggcagggagccctgaaagcccagagagcacggagataactgaggaggagctcctggataatttccatctgatggccccttctgaagaggatcattccatcctttgggacgccatcagtacctatgatggctcgaaggctctccatgtcaccaacatcaaaaaatggaaggagccctgccgaatagaactctacagagtcgtagagagtttagccaaggcacaggagacatcaggagaagaaatttccaaattttacctgccaaactgcaacaagaatggattttatcacagcagacagtgtgagacatccatggatggagaggcgggactctgctggtgcgtctacccttggaatgggaagaggatccctgggtctccagagatcaggggagaccccaactgccagatatattttaatgtacaaaactga

SEQ ID NO: 710 - DNA, 411 bp, Homo sapiens
atggctcgtacaaagcagactgcccgcaaatcgaccggtggtaaagcacccaggaagcaactggctacaaaagccgctcgcaagagtgcgccctctactggaggggtgaagaaacctcatcgttacaggcctggtactgtggcgctccgtgaaattagacgttatcagaagtccactgaacttctgattcgcaaacttcccttccagcgtctggtgcgagaaattgctcaggactttaaaacagatctgcgcttccagagcgcagctatcggtgctttgcaggaggcaagtgaggcctatctggttggcctttttgaagacaccaacctgtgtgctatccatgccaaacgtgtaacaattatgccaaaagacatccagctagcacgccgcatacgtggagaacgtgcttaa

SEQ ID NO: 711 - DNA, 1077 bp, Homo sapiens
atggtagatggaaccctccttttactctcctcggaggccctggcccttacccagacctgggcgggctcccactccttgaagtatttccacacttccgtgtcccggcccggccgcggggagccccgcttcatctctgtgggctacgtggacgacacccagttcgtgcgcttcgacaacgacgccgcgagtccgaggatggtgccgcgggcgccgtggatggagcaggaggggtcagagtattgggaccgggagacacggagcgccagggacaccgcacagattttccgagtgaacctgcggacgctgcgcggctactacaatcagagcgaggccgggtctcacaccctgcagtggatgcatggctgcgagctggggcccgacaggcgcttcctccgcgggtatgaacagttcgcctacgacggcaaggattatctcaccctgaatgaggacctgcgctcctggaccgcggtggacacggcggctcagatctccgagcaaaagtcaaatgatgcctctgaggcggagcaccagagagcctacctggaagacacatgcgtggagtggctccacaaatacctggagaaggggaaggagacgctgcttcacctggagcccccaaagacacacgtgactcaccaccccatctctgaccatgaggccaccctgaggtgctgggccctgggcttctaccctgcggagatcacactgacctggcagcaggatggggagggccatacccaggacacggagctcgtggagaccaggcctgcaggggatggaaccttccagaagtgggcagctgtggtggtgccttctggagaggagcagagatacacgtgccatgtgcagcatgaggggctacccgagcccgtcaccctgagatggaagccggcttcccagcccaccatccccatcgtgggcatcattgctggcctggttctccttggatctgtggtctctggagctgtggttgctgctgtgatatggaggaagaagagctcaggtggaaaaggagggagctactctaaggctgagtggagcgacagtgcccaggggtctgagtctcacagcttgtaa

SEQ ID NO: 712 - DNA, 1116 bp, Homo sapiens
atggctgcaacctgtgagattagcaacatttttagcaactacttcagtgcgatgtacagctcggaggactccaccctggcctctgttccccctgctgccacctttggggccgatgacttggtactgaccctgagcaacccccagatgtcattggagggtacagagaaggccagctggttgggggaacagccccagttctggtcgaagacgcaggttctggactggatcagctaccaagtggagaagaacaagtacgacgcaagcgccattgacttctcacgatgtgacatggatggcgccaccctctgcaattgtgcccttgaggagctgcgtctggtctttgggcctctgggggaccaactccatgcccagctgcgagacctcacttccagctcttctgatgagctcagttggatcattgagctgctggagaaggatggcatggccttccaggaggccctagacccagggccctttgaccagggcagcccctttgcccaggagctgctggacgacggtcagcaagccagcccctaccaccccggcagctgtggcgcaggagccccctcccctggcagctctgacgtctccaccgcagggactggtgcttctcggagctcccactcctcagactccggtggaagtgacgtggacctggatcccactgatggcaagctcttccccagcgatggttttcgtgactgcaagaagggggatcccaagcacgggaagcggaaacgaggccggccccgaaagctgagcaaagagtactgggactgtctcgagggcaagaagagcaagcacgcgcccagaggcacccacctgtgggagttcatccgggacatcctcatccacccggagctcaacgagggcctcatgaagtgggagaatcggcatgaaggcgtcttcaagttcctgcgctccgaggctgtggcccaactatggggccaaaagaaaaagaacagcaacatgacctacgagaagctgagccgggccatgaggtactactacaaacgggagatcctggaacgggtggatggccggcgactcgtctacaagtttggcaaaaactcaagcggctggaaggaggaagaggttctccagagtcggaactga

SEQ ID NO: 713 - DNA, 1017 bp, Homo sapiens
atggtggtcatggcgccccgaaccctcttcctgctgctctcgggggccctgaccctgaccgagacctgggcgggctcccactccatgaggtatttcagcgccgccgtgtcccggcccggccgcggggagccccgcttcatcgccatgggctacgtggacgacacgcagttcgtgcggttcgacagcgactcggcgtgtccgaggatggagccgcgggcgccgtgggtggagcaggaggggccggagtattgggaagaggagacacggaacaccaaggcccacgcacagactgacagaatgaacctgcagaccctgcgcggctactacaaccagagcgaggccagttctcacaccctccagtggatgattggctgcgacctggggtccgacggacgcctcctccgcgggtatgaacagtatgcctacgatggcaaggattacctcgccctgaacgaggacctgcgctcctggaccgcagcggacactgcggctcagatctccaagcgcaagtgtgaggcggccaatgtggctgaacaaaggagagcctacctggagggcacgtgcgtggagtggctccacagatacctggagaacgggaaggagatgctgcagcgcgcggacccccccaagacacacgtgacccaccaccctgtctttgactatgaggccaccctgaggtgctgggccctgggcttctaccctgcggagatcatactgacctggcagcgggatggggaggaccagacccaggacgtggagctcgtggagaccaggcctgcaggggatggaaccttccagaagtgggcagctgtggtggtgccttctggagaggagcagagatacacgtgccatgtgcagcatgaggggctgccggagcccctcatgctgagatggaagcagtcttccctgcccaccatccccatcatgggtatcgttgctggcctggttgtccttgcagctgtagtcactggagctgcggtcgctgctgtgctgtggagaaagaagagctcagattga

SEQ ID NO: 714 - DNA, 498 bp, Homo sapiens
atgggctgggacctgacggtgaagatgctggcgggcaacgaattccaggtgtccctgagcagctccatgtcggtgtcagagctgaaggcgcagatcacccagaagattggcgtgcacgccttccagcagcgtctggctgtccacccgagcggtgtggcgctgcaggacagggtcccccttgccagccagggcctgggccctggcagcacggtcctgctggtggtggacaaatgcgacgaacctctgagcatcctggtgaggaataacaagggccgcagcagcacctacgaggtccggctgacgcagaccgtggcccacctgaagcagcaagtgagcgggctggagggtgtgcaggacgacctgttctggctgaccttcgaggggaagcccctggaggaccagctcccgctgggggagtacggcctcaagcccctgagcaccgtgttcatgaatctgcgcctgcggggaggcggcacagagcctggcgggcggagctaa

SEQ ID NO: 715 - DNA, 2710 bp, Homo sapiens
gggattgtgaatgaagaaagtgaagttttcctcccacacaggttcattggttttgtatcgaatcttgctctcctgggccttgtgcccaactgacatctggacaacaggatttgggttgctgcttattttcttccctgactttaaagctctctgaactgcagtcttcttcaagacatcggggttaaattctaatgggttactcggaaggttccttgctgaatccaagtacaagatcagcaatgcagaggaaagaccatcgttggcttggtctttgtcagctttgatgtctgttagcaccttgtcgaggtttgacgcatttggcattaacgtgagccactccagtctcaagtgtagcttccccttgggaacctcgtccagagtgaaccattcatctaaaaggcgctccttttcaacttcaatgaggtcaatcataagacttcctaaaaagtcatccttgtctgggtcttcatcaaagagctcaatctctaattcttgtccaggatgttcatacactaaagcctcatagacttcattccactttggactgaggttctccttgatgactctgctttggaagatttggttgccaactctaatgattccataggggtctgactttcccttgacaagtcccttaaggtaagtgtctttcccctgaagatcctgagcttcaataaaatgtatccttagaacaccctttggtacaggaaaccgcaactgagctatttgaacttcactgacaagtggaacggtgattcgattgggaagcaccagatagtttgatattatatccaaaatgatagtatctgataaaccattcaatccagggacatccagaagattcgtcagtcctgtccagttaatttctaaaagtggtttcctaaggaagaagatagacaaagctccaactaagggcatatctccaatcaacggttccaggatcacccgcatggtaccatgaatctggatacttttcacaccagctctacaaaaatatcgtttgatctccaaatcaatctcacaatttcctacaaaactaatctgaaggtccaaaataatttgccttttgtctacattttcagtgtataccttaacaccattgatcctgaggggctgctggcccacgtcgaccttcgtgaaactaaaggtgctaaggtgggtgtttgctccccgcacggctggttctatagtttctcgaaacaacttctctataaattggcaaatgaaaggccacatgtgttttacagtcttatttagccattctgctctttcagtgtctggaaaatgaacccaggcgggcaggtcgcaggcgcgcacccccaggcgcacgacgcgctcctcgtcttccagcagcgccagcgcgcggcacaggcgcagggccttgaggccgcggctgcggcgacaccaggcgagcagcgcgagcgcgaggagaacccagctgaagctgagccccaggtagcccagcgcgtacacgggcagcagcagcgcgaagctccgcgccagctgcgccagcagcccgggcagctccacgctcagcacgcccccggggttctcaggcgccgcgcggcccccagccccgccggcgcccgcctccgggccctcgccccgggcgccgctcatcgccccgcagtgccgcgctgccctcccggccgaggcgggctgggtgctcgcgctttcacagaattattccagggtttatgtgtcagggtggtgacttcacacgccataatggcactggtggcaagtccatctatggggagaaatttgaagatgagaacttcatcctaaagcatacgggtcctggcatcttgtccatggcaaatgctggacccaacacaaatggttcccagtttttcatctgcactgccaagactgagtggttggatggcaagcatgtggtgtttggcaaagtgaaagaaggcatgaatattgtggaggccatggagcgctttgggtccaggaatggcaagaccagcaagaagatcaccattgctgactgtggacaactcgaataagtttgacttgtgttttatcttaaccaccagatcattccttctgtagctcaggagagcacccctccaccccatttgctcgcagtatcctagaatctttgtgctctcgctgcagttccctttgggttccatgttttccttgttccctcccatgcctagctggattgcagagttaagtttatgattatgaaataaaaactaaataacaaaaaaaaaaaacccgggctctttcgggggggaaaagttttaaggcagtccaagttcggaccttttacggcagagaaggccagcgcgaaataaacgcgagagccaaccaacgtgggcagatatagactctgcgcgcgcgagcctcccaattcgacgcgacgaatcgagccaataacaagcgacacggtacgatgccaaactaaagattcagcagtagcacccattcgtcctccccagtaacggcaggcctaagcccagaaagcagcaagcaaaccggacataagaacacaacgaagccagagacggcaccaggaccagcacagaaagacgcaagcaaacgggagcagacaggcgaaagagatacgagagagggacagtccgagataacttagagacgcagacaagaagacaaaagagcgatcagagacaggaacacgctgaggaacaccgcagcacagaacagcgaaacccaacgacgcaactaccagacc

SEQ ID NO: 716 - DNA, 654 bp, Homo sapiens
atgggcagcactgtcccgcgctccgcctccgtgctgcttctgctgctgctcctgcgccgggccgagcagccctgcggggccgagctcaccttcgagctgccggacaacgccaagcagtgcttccacgaggaggtggagcagggcgtgaagttctccctggattaccaggtcatcactggaggccactacgatgttgactgctatgtagaggacccccaggggaacaccatctacagagaaacgaagaagcagtacgacagcttcacgtaccgggctgaagtcaagggcgtttatcagttttgcttcagtaatgagttttccaccttctctcacaagaccgtctactttgactttcaagtgggcgatgagcctcccattctcccagacatggggaacagggtcacagctctcacccagatggagtccgcctgcgtgaccatccatgaggctctgaaaacggtgattgactcccagacgcattaccggctgcgggaggcccaggaccgggcccgagcggaagaccttaatagccgagtctcttactggtctgttggcgagacgattgccctgttcgtggtcagcttcagtcaggtgctactgttgaaaagcttcttcacagaaaaacgacccatcagcagggcagtccactcctag

SEQ ID NO: 717 - DNA, 1104 bp, Homo sapiens
atggtcatggaagtgggcaccctggacgctggaggcctgcgggcgctgctgggggagcgagcggcgcaatgcctgctgctggactgccgctccttcttcgctttcaacgccggccacatcgccggctctgtcaacgtgcgcttcagcaccatcgtgcggcgccgggccaagggcgccatgggcctggagcacatcgtgcccaacgccgagctccgcggccgcctgctggccggcgcctaccacgccgtggtgttgctggacgagcgcagcgccgccctggacggcgccaagcgcgacggcaccctggccctggcggccggcgcgctctgccgcgaggcgcgcgccgcgcaagtcttcttcctcaaaggaggatacgaagcgttttcggcttcctgcccggagctgtgcagcaaacagtcgacccccatggggctcagccttcccctgagtactagcgtccctgacagcgcggaatctgggtgcagttcctgcagtaccccactctacgatcagggtggcccggtggaaatcctgccctttctgtacctgggcagtgcgtatcacgcttcccgcaaggacatgctggatgccttgggcataactgccttgatcaacgtctcagccaattgtcccaaccattttgagggtcactaccagtacaagagcatccctgtggaggacaaccacaaggcagacatcagctcctggttcaacgaggccattgacttcatagactccatcaagaatgctggaggaagggtgtttgtccactgccaggcaggcatttcccggtcagccaccatctgccttgcttaccttatgaggactaatcgagtcaagctggacgaggcctttgagtttgtgaagcagaggcgaagcatcatctctcccaacttcagcttcatgggccagctgctgcagtttgagtcccaggtgctggctccgcactgttcggcagaggctgggagccccgccatggctgtgctcgaccgaggcacctccaccaccaccgtgttcaacttccccgtctccatccctgtccactccacgaacagtgcgctgagctaccttcagagccccattacgacctctcccagctgctga

SEQ ID NO: 718 - DNA, 408 bp, Homo sapiens
atgggccgcgttcgcaccaaaaccgtgaagaaggcggcccgggtcatcatagaaaagtactacacgcgcctgggcaacgacttccacacgaacaagcgcgtgtgcgaggagatcgccattatccccagcaaaaagctccgcaacaagatagcaggttatgtcacgcatctgatgaagcgaattcagagaggcccagtaagaggtatctccatcaagctgcaggaggaggagagagaaaggagagacaattatgttcctgaggtctcagccttggatcaggagattattgaagtagatcctgacactaaggaaatgctgaagcttttggacttcggcagtctgtccaaccttcaggtcactcagcctacagttgggatgaatttcaaaacgcctcggggacctgtttga

SEQ ID NO: 719 - DNA, 792 bp, Homo sapiens
atgtttcgaaatcagtatgacaatgatgtcactgtttggagcccccagggcaggattcatcaaattgaatatgcaatggaagctgttaaacaaggttcagccacagttggtctgaaatcaaaaactcatgcagttttggttgcattgaaaagggcgcaatcagagcttgcagctcatcagaaaaaaattctccatgttgacaaccatattggtatctcaattgcggggcttactgctgatgctagactgttatgtaattttatgcgtcaggagtgtttggattccagatttgtattcgatagaccactgcctgtgtctcgtcttgtatctctaattggaagcaagacccagataccaacacaacgatatggccggagaccatatggtgttggtctccttattgctggttatgatgatatgggccctcacattttccaaacctgtccatctgctaactattttgactgcagagccatgtccattggagcccgttcccaatcagctcgtacttacttggagagacatatgtctgaatttatggagtgtaatttaaatgaactagttaaacatggtctgcgtgccttaagagagacgcttcctgcagaacaggacctgactacaaagaatgtttccattggaattgttggtaaagacttggagtttacaatctatgatgatgatgatgtgtctccattcctggaaggtcttgaagaaagaccacagagaaaggcacagcctgctcaacctgctgatgaacctgcagaaaaggctgatgaaccaatggaacattaa

SEQ ID NO: 720 - DNA, 417 bp, Homo sapiens
atggtcagtaggacagaaggtaacattgatgactcgctcattggtggaaatgcctccgctgaaggccccgagggcgaaggtaccgaaagcacagtaatcactggtgtcgatattgtcatgaaccatcacctgcaggaaacaagtttcacaaaagaagcctacaagaagtacatcaaagattacatgaaatcaatcaaagggaaacttgaagaacagagaccagaaagagtaaaaccttttatgacaggggctgcagaacaaatcaagcacatccttgctaatttcaaaaactaccagttctttattggtgaaaacatgaatccagatggcatggttgctctattggactaccgtgaggatggtgtgaccccatatatgattttctttaaggatggtttagaaatggaaaaatgttaa

SEQ ID NO: 721 - DNA, 1908 bp, Homo sapiens
atgaccaaggctgacttgatcaataaccttggtactatcgccaagtctgggaccaaagcgttcatggaagctttgcaggctggtgcagatatctctatgattggccagttcggtgttggtttttattctgcttatttggttgctgagaaagtaactgtgatcaccaaacataacgatgatgagcagtacgcttgggagtcctcagcagggggatcattcacagtgaggacagacacaggtgaacctatgggtcgtggaacaaaagttatcctacacctgaaagaagaccaaactgagtacttggaggaacgaagaataaaggagattgtgaagaaacattctcagtttattggatatcccattactctttttgtggagaaggaacgtgataaagaagtaagcgatgatgaggctgaagaaaaggaagacaaagaagaagaaaaagaaaaagaagagaaagagtcggaagacaaacctgaaattgaagatgttggttctgatgaggaagaagaaaagaaggatggtgacaagaagaagaagaagaagattaaggaaaagtacatcgatcaagaagagctcaacaaaacaaagcccatctggaccagaaatcccgacgatattactaatgaggagtacggagaattctataagagcttgaccaatgactgggaagatcacttggcagtgaagcatttttcagttgaaggacagttggaattcagagcccttctatttgtcccacgacgtgctccttttgatctgtttgaaaacagaaagaaaaagaacaatatcaaattgtatgtacgcagagttttcatcatggataactgtgaggagctaatccctgaatatctgaacttcattagaggggtggtagactcggaggatctccctctaaacatatcccgtgagatgttgcaacaaagcaaaattttgaaagttatcaggaagaatttggtcaaaaaatgcttagaactctttactgaactggcggaagataaagagaactacaagaaattctatgagcagttctctaaaaacataaagcttggaatacacgaagactctcaaaatcggaagaagctttcagagctgttaaggtactacacatctgcctctggtgatgagatggtttctctcaaggactactgcaccagaatgaaggagaaccagaaacatatctattatatcacaggtgagaccaaggaccaggtagctaactcagcctttgtggaacgtcttcggaaacatggcttagaagtgatctatatgattgagcccattgatgagtactgtgtccaacagctgaaggaatttgaggggaagactttagtgtcagtcaccaaagaaggcctggaacttccagaggatgaagaagagaaaaagaagcaggaagagaaaaaaacaaagtttgagaacctctgcaaaatcatgaaagacatattggagaaaaaagttgaaaaggtggttgtgtcaaaccgattggtgacatctccatgctgtattgtcacaagcacatatggctggacagcaaacatggagagaatcatgaaagctcaagccctaagagacaactcaacaatgggttacatggcagcaaagaaacacctggagataaaccctgaccattccattattgagaccttaaggcaaaaggcagaggctgataagaacgacaagtctgtgaaggatctggtcatcttgctttatgaaactgcgctcctgtcttctggcttcagtctggaagatccccagacacatgctaacaggatctacaggatgatcaaacttggtctgggtattgatgaagatgaccctactgctgatgataccagtgctgctgtaactgaagaaatgccaccccttgaaggagatgacgacacatcacgcatggaagaagtagactaa

SEQ ID NO: 722 - DNA, 1584 bp, Homo sapiens
atggagaatcaagagaaggcgagtatcgcgggccacatgttcgacgtagtcgtgatcggaggtggcatttcaggactatctgctgccaaactcttgactgaatatggcgttagtgttttggttttagaagctcgggacagggttggaggaagaacatatactataaggaatgagcatgttgattacgtagatgttggtggagcttatgtgggaccaacccaaaacagaatcttacgcttgtctaaggagctgggcatagagacttacaaagtgaatgtcagtgagcgtctcgttcaatatgtcaaggggaaaacatatccatttcggggcgcctttccaccagtatggaatcccattgcatatttggattacaataatctgtggaggacaatagataacatggggaaggagattccaactgatgcaccctgggaggctcaacatgctgacaaatgggacaaaatgaccatgaaagagctcattgacaaaatctgctggacaaagactgctaggcggtttgcttatctttttgtgaatatcaatgtgacctctgagcctcacgaagtgtctgccctgtggttcttgtggtatgtgaagcagtgcgggggcaccactcggatattctctgtcaccaatggtggccaggaacggaagtttgtaggtggatctggtcaagtgagcgaacggataatggacctcctcggagaccaagtgaagctgaaccatcctgtcactcacgttgaccagtcaagtgacaacatcatcatagagacgctgaaccatgaacattatgagtgcaaatacgtaattaatgcgatccctccgaccttgactgccaagattcacttcagaccagagcttccagcagagagaaaccagttaattcagcgtcttccaatgggagctgtcattaagtgcatgatgtattacaaggaggccttctggaagaagaaggattactgtggctgcatgatcattgaagatgaagatgctccaatttcaataaccttggatgacaccaagccagatgggtcactgcctgccatcatgggcttcattcttgcccggaaagctgatcgacttgctaagctacataaggaaataaggaagaagaaaatctgtgagctctatgccaaagtgctgggatcccaagaagctttacatccagtgcattatgaagagaagaactggtgtgaggagcagtactctgggggctgctacacggcctacttccctcctgggatcatgactcaatatggaagggtgattcgtcaacccgtgggcaggattttctttgcgggcacagagactgccacaaagtggagcggctacatggaaggggcagttgaggctggagaacgagcagctagggaggtcttaaatggtctcgggaaggtgaccgagaaagacatctgggtacaagaacctgaatcaaaggacgttccagcggtagaaatcacccacaccttctgggaaaggaacctgccctctgtttctggcctgctgaagatcattggattttccacatcagtaactgccctggggtttgtgctgtacaaatacaagctcctgccacggtcttga

SEQ ID NO: 723 - DNA, 1098 bp, Homo sapiens
atggccgtcatggcgccccgaaccctcgtcctgctactctcgggggctctggccctgacccagacctgggcgggctctcactccatgaggtatttcttcacatccgtgtcccggcccggccgcggggagccccgcttcatcgcagtgggctacgtggacgacacgcagttcgtgcggttcgacagcgacgccgcgagccagaggatggagccgcgggcgccgtggatagagcaggagggtccggagtattgggacggggagacacggaaagtgaaggcccactcacagactcaccgagtggacctggggaccctgcgcggctactacaaccagagcgaggccggttctcacaccgtccagaggatgtatggctgcgacgtggggtcggactggcgcttcctccgcgggtaccaccagtacgcctacgacggcaaggattacatcgccctgaaagaggacctgcgctcttggaccgcggcggacatggcagctcagaccaccaagcacaagtgggaggcggcccatgtggcggagcagcagagagcctacctggagggcacgtgcgtggagtggctccgcagatacctggagaacgggaaggagacgctgcagcgcacggacgcccccaaaacgcatatgactcaccacgctgtctctgaccatgaagccaccctgaggtgctgggccctgagcttctaccctgcggagatcacactgacctggcagcgggatggggaggaccagacccaggacacggagctcgtggagaccaggcctgcaggggatggaaccttccagaagtgggcggctgtggtggtgccttctggacaggagcagagatacacctgccatgtgcagcatgagggtttgcccaagcccctcaccctgagatgggagccgtcttcccagcccaccatccccatcgtgggcatcattgctggcctggttctctttggagctgtgatcactggagctgtggtcgctgctgtgatgtggaggaggaagagctcagatagaaaaggagggagctactctcaggctgcaagcagtgacagtgcccagggctctgatgtgtctctcacagcttgtaaagtgtga

SEQ ID NO: 724 - DNA, 765 bp, Homo sapiens
atggccataagtggagtccctgtgctaggatttttcatcatagctgtgctgatgagcgctcaggaatcatgggctatcaaagaagaacatgtgatcatccaggccgagttctatctgaatcctgaccaatcaggcgagtttatgtttgactttgatggtgatgagattttccatgtggatatggcaaagaaggagacggtctggcggcttgaagaatttggacgatttgccagctttgaggctcaaggtgcattggccaacatagctgtggacaaagccaacttggaaatcatgacaaagcgctccaactatactccgatcaccaatgtacctccagaggtaactgtgctcacgaacagccctgtggaactgagagagcccaacgtcctcatctgtttcatagacaagttcaccccaccagtggtcaatgtcacgtggcttcgaaatggaaaacctgtcaccacaggagtgtcagagacagtcttcctgcccagggaagaccaccttttccgcaagttccactatctccccttcctgccctcaactgaggacgtttacgactgcagggtggagcactggggcttggatgagcctcttctcaagcactgggagtttgatgctccaagccctctcccagagactacagagaacgtggtgtgtgccctgggcctgactgtgggtctggtgggcatcattattgggaccatcttcatcatcaagggattgcgcaaaagcaatgcagcagaacgcagggggcctctgtaa

SEQ ID NO: 725 - DNA, 459 bp, Homo sapiens
atggccaacctggagcgcaccttcatcgccatcaagccggacggcgtgcagcgcggcctggtgggcgagatcatcaagcgcttcgagcagaagggattccgcctcgtggccatgaagttcctccgggcctctgaagaacacctgaagcagcactacattgacctgaaagaccgaccattcttccctgggctggtgaagtacatgaactcagggccggttgtggccatggtctgggaggggctgaacgtggtgaagacaggccgagtgatgcttggggagaccaatccagcagattcaaagccaggcaccattcgtggggacttctgcattcaggttggcaggaacatcattcatggcagtgattcagtaaaaagtgctgaaaaagaaatcagcctatggtttaagcctgaagaactggttgactacaagtcttgtgctcatgactgggtctatgaataa

SEQ ID NO: 726 - DNA, 2262 bp, Homo sapiens
agcgcgcggcgggacaggggcgcagcgcggggcggccggggggcgcggtgccggcgcgccgaagagagcgaagaagggcgcgccacgggacgagcgacggcgtcgtgaggcgccacgcggcgtagaagggcggggtgggcccccgagagcaggcggccggcagcacgtagcgcggagaccggaccgacgcaggccacgaggcccgaggagcgcgcatggaaggcgggaggaggagcatcgcgactgtcgggacacgcgcggagcaggacggggggccgcaggtgcacggccaccgcaggccatggggaggccatagctcactcgtggaggtcaggacgacagggcaggctggagagccgcagcacggcggggccagctgcggcgggcgcgcaaacagatgatgtgcccatcatcctcgtggcaacaagcggcgacctggtgcgctctcgtgaggtctcggtggatgagggccgggcctgcgcggtggtctttgactgcaagttcattgagacatcagcggcattgcaccacaatgtccaggcgctgtttgaaggtgtcgtgcgccagatacgcctgcgcagggacagcaaagaagccaacgcacgacggcaagcaggcaccccggaggcgagagagccgggcaaaaaggcgaagcgctgcgtgggccagcatcgtagctcgtaacagcgcgcaagatggccggtcgcgccaaagccgagtccgtgcgcacgacctactcgggtcatccttaggtcccacccgctcccactatggtgggagacgaacggaagggctggtgggctggcccagccctcactggcccctgagagccacttcgcagcgcagcactgtctatctgtccatgaccatgaggttgggggtgcccggctggcagctccgagggacccagagtctgagcctgctctgaggcacccggcggctgcgctgcggctgcttgggacgcatatgagcctgcgcatgcatctctgtgggcccagccctcactggcccctgagagccacttcgcagggcagcactgtctatctgtccatgaccatgaggttgggggtgcccggctggcagctccgagggacccagagtctgagcctgctctgaggcacccggggcagttggctgggccagcccaccaacccttccgttcgtctcccaccatagtgggagcgggtgggacctagagaaccgagaggtcgtggcaggacttggatttggcgcgaaaggccatcttgcggctgttacgagctacgatgcggcccaagaagcgcttcgcctttttgccaaggctctctcgcctccgggtgcctgcttgccgtcgtgcgttggcttctttgctgtccctgcgcaggcgtatctggcgcacgacaccttcaaacagcgcctggacattgtggtgcaatgccgctgatgtctcaatgaacttgcagtcaaagaccaccgcgcaggcccggccctcatccaccgagacctcacgagagcgcaccaggtcgctcttgttgcccacgaggatgatgggcacatcatctgtttgccgtgcacgccgcagctggacccgcagttctgaggccttctcgaagctgcccttgtccgtcactgagtacacaatgacataggcatcccccatggccatgcagtggccgggcaaccagcggcccccgtcctgctcccaaatgtcgtagaccatgagtgatgcctcttctccgtccactacaatggagcgatcataggtgtgccctgctgcctctgcttcaggcccgtcctccacaccgccgaagatgcgcgccagggcgctcttgcccacgccgggcgcccccagcagcagcaccttgtaaacgctctcgtctgagtcgctgccccctgagctgagcgagtcctcggagtcctcgggccagtccagcctgggaccctgggtccccgtcccggccgcggccgccgtcagggcacccggggtcagcgccgcctgcaggtcgcgctcgtccaccggcatgctgcggcggtgcagcggcggggcggggccccagggtgtgctgccccgacggcgctcgcgctcctggcccccaccgcggctcccgcccgctccgctgccgccgccgttcagggtcatcgcgtccgggaccgtccactcgcacacagacacgctcaggactaggatccggattaggaggccacgcactcgtagtccggactcggactttagggtttccgccgccgctgctgctgcagccaccgccttctcagcctcgtgcc

SEQ ID NO: 727 - DNA, 645 bp, Homo sapiens
atgggccgccgccccgcccgttgttaccggtattgtaagaacaagccgtacccaaagtctcgcttctgccgaggtgtccctgatgccaagattcgcatttttgacctggggcggaaaaaggcaaaagtggatgagtttccgctttgtggccacatggtgtcagatgaatatgagcagctgtcctctgaagccctggaggctgcccgaatttgtgccaataagtacatggtaaaaagttgtggcaaagatggcttccatatccgggtgcggctccaccccttccacgtcatccgcatcaacaagatgttgtcctgtgctggggctgacaggctccaaacaggcatgcgaggtgcctttggaaagccccagggcactgtggccagggttcacattggccaagttatcatgtccatccgcaccaagctgcagaacaaggagcatgtgattgaggccctgcgcagggccaagttcaagtttcctggccgccagaagatccacatctcaaagaagtggggcttcaccaagttcaatgctgatgaatttgaagacatggtggctgaaaagcggctcatcccagatggctgtggggtcaagtacatccccagtcgtggccctctggacaagtggcgggccctgcactcatga

SEQ ID NO: 728 - DNA, 1656 bp, Homo sapiens
atggacgaactgttccccctcatcttcccggcagagccagcccaggcctctggcccctatgtggagatcattgagcagcccaagcagcggggcatgcgcttccgctacaagtgcgaggggcgctccgcgggcagcatcccaggcgagaggagcacagataccaccaagacccaccccaccatcaagatcaatggctacacaggaccagggacagtgcgcatctccctggtcaccaaggaccctcctcaccggcctcacccccacgagcttgtaggaaaggactgccgggatggcttctatgaggctgagctctgcccggaccgctgcatccacagtttccagaacctgggaatccagtgtgtgaagaagcgggacctggagcaggctatcagtcagcgcatccagaccaacaacaaccccttccaagttcctatagaagagcagcgtggggactacgacctgaatgctgtgcggctctgcttccaggtgacagtgcgggacccatcaggcaggcccctccgcctgccgcctgtccttcctcatcccatctttgacaatcgtgcccccaacactgccgagctcaagatctgccgagtgaaccgaaactctggcagctgcctcggtggggatgagatcttcctactgtgtgacaaggtgcagaaagaggacattgaggtgtatttcacgggaccaggctgggaggcccgaggctccttttcgcaagctgatgtgcaccgacaagtggccattgtgttccggacccctccctacgcagaccccagcctgcaggctcctgtgcgtgtctccatgcagctgcggcggccttccgaccgggagctcagtgagcccatggaattccagtacctgccagatacagacgatcgtcaccggattgaggagaaacgtaaaaggacatatgagaccttcaagagcatcatgaagaagagtcctttcagcggacccaccgacccccggcctccacctcgacgcattgctgtgccttcccgcagctcagcttctgtccccaagccagcaccccagccctatccctttacgtcatccctgagcaccatcaactatgatgagtttcccaccatggtgtttccttctgggcagatcagccaggcctcggccttggccccggcccctccccaagtcctgccccaggctccagcccctgcccctgctccagccatggtatcagctctggcccaggccccagcccctgtcccagtcctagccccaggccctcctcaggctgtggccccacctgcccccaagcccacccaggctggggaaggaacgctgtcagaggccctgctgcagctgcagtttgatgatgaagacctgggggccttgcttggcaacagcacagacccagctgtgttcacagacctggcatccgtcgacaactccgagtttcagcagctgctgaaccagggcatacctgtggccccccacacaactgagcccatgctgatggagtaccctgaggctataactcgcctagtgacaggggcccagaggccccccgacccagctcctgctccactgggggccccggggctccccaatggcctcctttcaggagatgaagacttctcctccattgcggacatggacttctcagccctgctgagtcagatcagctcctaa

SEQ ID NO: 729 - DNA, 1209 bp, Homo sapiens
atgcagatgtctccagccctcacctgcctagtcctgggcctggcccttgtctttggtgaagggtctgctgtgcaccatcccccatcctacgtggcccacctggcctcagacttcggggtgagggtgtttcagcaggtggcgcaggcctccaaggaccgcaacgtggttttctcaccctatggggtggcctcggtgttggccatgctccagctgacaacaggaggagaaacccagcagcagattcaagcagctatgggattcaagattgatgacaagggcatggcccccgccctccggcatctgtacaaggagctcatggggccatggaacaaggatgagatcagcaccacagacgcgatcttcgtccagcgggatctgaagctggtccagggcttcatgccccacttcttcaggctgttccggagcacggtcaagcaagtggacttttcagaggtggagagagccagattcatcatcaatgactgggtgaagacacacacaaaaggtatgatcagcaacttgcttgggaaaggagccgtggaccagctgacacggctggtgctggtgaatgccctctacttcaacggccagtggaagactcccttccccgactccagcacccaccgccgcctcttccacaaatcagacggcagcactgtctctgtgcccatgatggctcagaccaacaagttcaactatactgagttcaccacgcccgatggccattactacgacatcctggaactgccctaccacggggacaccctcagcatgttcattgctgccccttatgaaaaagaggtgcctctctctgccctcaccaacattctgagtgcccagctcatcagccactggaaaggcaacatgaccaggctgccccgcctcctggttctgcccaagttctccctggagactgaagtcgacctcaggaagcccctagagaacctgggaatgaccgacatgttcagacagtttcaggctgacttcacgagtctttcagaccaagagcctctccacgtcgcgcaggcgctgcagaaagtgaagatcgaggtgaacgagagtggcacggtggcctcctcatccacagctgtcatagtctcagcccgcatggcccccgaggagatcatcatggacagacccttcctctttgtggtccggcacaaccccacaggaacagtccttttcatgggccaagtgatggaaccctga

SEQ ID NO: 730 - DNA, 786 bp, Homo sapiens
atgttcgaggcgcgcctggtccagggctccatcctcaagaaggtgttggaggcactcaaggacctcatcaacgaggcctgctgggatattagctccagcggtgtaaacctgcagagcatggactcgtcccacgtctctttggtgcagctcaccctgcggtctgagggcttcgacacctaccgctgcgaccgcaacctggccatgggcgtgaacctcaccagtatgtccaaaatactaaaatgcgccggcaatgaagatatcattacactaagggccgaagataacgcggataccttggcgctagtatttgaagcaccaaaccaggagaaagtttcagactatgaaatgaagttgatggatttagatgttgaacaacttggaattccagaacaggagtacagctgtgtagtaaagatgccttctggtgaatttgcacgtatatgccgagatctcagccatattggagatgctgttgtaatttcctgtgcaaaagacggagtgaaattttctgcaagtggagaacttggaaatggaaacattaaattgtcacagacaagtaatgtcgataaagaggaggaagctgttaccatagagatgaatgaaccagttcaactaacttttgcactgaggtacctgaacttctttacaaaagccactccactctcttcaacggtgacactcagtatgtctgcagatgtaccccttgttgtagagtataaaattgcggatatgggacacttaaaatactacttggctcccaagatcgaggatgaagaaggatcttag

SEQ ID NO: 731 - DNA, 1197 bp, Homo sapiens
atgttgcgcttgtacgtgttggtaatgggagtttctgccttcacccttcagcctgcggcacacacaggggctgccagaagctgccggtttcgtgggaggcattacaagcgggagttcaggctggaaggggagcctgtagccctgaggtgcccccaggtgccctactggttgtgggcctctgtcagcccccgcatcaacctgacatggcataaaaatgactctgctaggacggtcccaggagaagaagagacacggatgtgggcccaggacggtgctctgtggcttctgccagccttgcaggaggactctggcacctacgtctgcactactagaaatgcttcttactgtgacaaaatgtccattgagctcagagtttttgagaatacagatgctttcctgccgttcatctcatacccgcaaattttaaccttgtcaacctctggggtattagtatgccctgacctgagtgaattcacccgtgacaaaactgacgtgaagattcaatggtacaaggattctcttcttttggataaagacaatgagaaatttctaagtgtgagggggaccactcacttactcgtacacgatgtggccctggaagatgctggctattaccgctgtgtcctgacatttgcccatgaaggccagcaatacaacatcactaggagtattgagctacgcatcaagaaaaaaaaagaagagaccattcctgtgatcatttcccccctcaagaccatatcagcttctctggggtcaagactgacaatcccgtgtaaggtgtttctgggaaccggcacacccttaaccaccatgctgtggtggacggccaatgacacccacatagagagcgcctacccgggaggccgcgtgaccgaggggccacgccaggaatattcagaaaataatgagaactacattgaagtgccattgatttttgatcctgtcacaagagaggatttgcacatggattttaaatgtgttgtccataataccctgagttttcagacactacgcaccacagtcaaggaagcctcctccacgttctcctggggcattgtgctggccccactttcactggccttcttggttttggggggaatatggatgcacagacggtgcaaacacagaactggaaaagcagatggtctgactgtgctatggcctcatcatcaagactttcaatcctatcccaagtga

SEQ ID NO: 732 - DNA, 1344 bp, Homo sapiens
atggcaggagctggaggagggaatgatattcagtggtgtttttctcaggtgaaaggagcagtagatgatgatgtagcagaagcagatataatttctacagtagaatttaatcattctggagaattactagcaacaggagataaaggtggtagagttgtcatctttcaacaggagcaggagaacaaaatccagtctcatagcagaggagaatataatgtttacagcaccttccagagccatgaaccagagtttgactacttgaaaagtttagaaatagaagaaaagatcaataaaattaggtggttaccccagaaaaatgctgctcagtttttattgtctaccaatgataaaacaataaaattatggaaaatcagtgaaagggacaaaagaccagaagggtataacttgaaagaggaggatggaaggtatagagatcctactacagttactacactacgagtgccagtctttaggcctatggatctaatggttgaggccagtccacgaagaatatttgccaatgctcatacatatcacatcaactcaatttctattaatagtgattatgaaacatatttatctgcagatgatttgcggattaatctttggcatctggaaattacagacaggagttttaacattgtggatatcaagcctgccaatatggaagagctaacagaggtgattacagcagcagaatttcatccaaacagctgtaacacatttgtatacagcagcagtaaaggaactattcggctatgtgacatgagggcatctgccctctgtgatagacattctaaattgtttgaagaacctgaagatcccagtaacaggtcatttttttccgaaatcatctcctctatttcggatgtaaaattcagccatagtggtcgatatatgatgactagagactatttgtcagtcaaaatttgggacttaaatatggaaaacaggcctgtggaaacataccaggtgcatgaatacctcagaagtaaactctgttcactgtatgaaaatgactgcatatttgacaaatttgaatgttgttggaatggatctgacagtgttgtcatgactggatcttacaataatttcttcagaatgtttgacagaaacacaaagcgagacataaccctagaagcatcgcgggaaaacaataagcctcgcacagttctgaagcctcgcaaagtctgtgcaagtggcaagcgaaagaaagatgaaataagtgttgacagcctagacttcaataagaaaatccttcacacagcctggcaccccaaggaaaatatcattgccgtagctactacaaacaatctgtatatatttcaagacaaagtgaattag

SEQ ID NO: 733 - DNA, 1281 bp, Homo sapiens
atggggcccttcccagccccttcctgcacacagcgcatcacctggaaggggctcctgctcacagcatcacttttaaacttctggaacccgcccaccactgccgaagtcacgattgaagcccagccacccaaagtttctgaggggaaggatgttcttctacttgtccacaatttgccccagaatcttcctggctacttctggtacaaaggggaaatgacggacctctaccattacattatatcgtatatagttgatggtaaaataattatatatgggcctgcatacagtggaagagaaacagtatattccaacgcatccctgctgatccagaatgtcacccggaaggatgcaggaacctacaccttacacatcataaagcgaggtgatgagactagagaagaaattcgacatttcaccttcaccttatacttggagactcccaagccctacatctccagcagcaacttaaaccccagggaggccatggaggctgtgcgcttaatctgtgatcctgagactctggacgcaagctacctatggtggatgaatggtcagagcctccctgtgactcacaggttgcagctgtccaaaaccaacaggaccctctatctatttggtgtcacaaagtatattgcaggaccctatgaatgtgaaatacggaacccagtgagtgccattcgcagtgacccagtcaccctgaatctcctcccgaagctgcccatcccctacatcaccatcaacaacttaaaccccagggagaataaggatgtcttagccttcacctgtgaacctaagagtgagaactacacctacatttggtggctaaacggtcagagcctccccgtcagtcccggggtaaagcgacccattgaaaacaggatactcattctacccagtgtcacgagaaatgaaacaggaccctatcaatgtgaaatacgggaccgatatggtggcctccgcagtaacccagtcatcctaaatgtcctctatggtccagacctccccagaatttacccttcattcacctattaccgttcaggagaaaacctcgacttgtcctgcttcacggaatctaacccaccggcagagtatttttggacaattaatgggaagtttcagcaatcaggacaaaagctctttatcccccaaattactagaaatcatagcgggctctatgcttgctctgttcataactcagccactggcaaggaaatctccaaatccatgacagtcaaagtctctggtccctgccatggagacctgacagagtctcagtcatga

SEQ ID NO: 734 - DNA, 408 bp, Homo sapiens
atgccagtcgacttcactgggtactggaagatgttggtcaacgagaatttcgaggagtacctgcgcgccctcgacgtcaatgtggccttgcgcaaaatcgccaacttgctgaagccagacaaagagatcgtgcaggacggtgaccatatgatcatccgcacgctgagcacttttaggaactacatcatggacttccaagttgggaaggagtttgaggaggatctgacaggcatagatgaccgcaagtgcatgacaacagtgagctgggacggagacaagctccagtgtgtgcagaagggtgagaaggaggggcgtggctggacccagtggatcgagggtgatgagctgcacctagagatgagagtggaaggtgtggtctgcaagcaagtattcaagaaggtgcagtga

SEQ ID NO: 735 - DNA, 2919 bp, Homo sapiens
atgggcccaggagttctgctgctcctgctggtggccacagcttggcatggtcagggaatcccagtgatagagcccagtgtccccgagctggtcgtgaagccaggagcaacggtgaccttgcgatgtgtgggcaatggcagcgtggaatgggatggccccccatcacctcactggaccctgtactctgatggctccagcagcatcctcagcaccaacaacgctaccttccaaaacacggggacctatcgctgcactgagcctggagaccccctgggaggcagcgccgccatccacctctatgtcaaagaccctgcccggccctggaacgtgctagcacaggaggtggtcgtgttcgaggaccaggacgcactactgccctgtctgctcacagacccggtgctggaagcaggcgtctcgctggtgcgtgtgcgtggccggcccctcatgcgccacaccaactactccttctcgccctggcatggcttcaccatccacagggccaagttcattcagagccaggactatcaatgcagtgccctgatgggtggcaggaaggtgatgtccatcagcatccggctgaaagtgcagaaagtcatcccagggcccccagccttgacactggtgcctgcagagctggtgcggattcgaggggaggctgcccagatcgtgtgctcagccagcagcgttgatgttaactttgatgtcttcctccaacacaacaacaccaagctcgcaatccctcaacaatctgactttcataataaccgttaccaaaaagtcctgaccctcaacctcgatcaagtagatttccaacatgccggcaactactcctgcgtggccagcaacgtgcagggcaagcactccacctccatgttcttccgggtggtagagagtgcctacttgaacttgagctctgagcagaacctcatccaggaggtgaccgtgggggaggggctcaacctcaaagtcatggtggaggcctacccaggcctgcaaggttttaactggacctacctgggacccttttctgaccaccagcctgagcccaagcttgctaatgctaccaccaaggacacatacaggcacaccttcaccctctctctgccccgcctgaagccctctgaggctggccgctactccttcctggccagaaacccaggaggctggagagctctgacgtttgagctcacccttcgataccccccagaggtaagcgtcatatggacattcatcaacggctctggcacccttttgtgtgctgcctctgggtacccccagcccaacgtgacatggctgcagtgcagtggccacactgataggtgtgatgaggcccaagtgctgcaggtctgggatgacccataccctgaggtcctgagccaggagcccttccacaaggtgacggtgcagagcctgctgactgttgagaccttagagcacaaccaaacctacgagtgcagggcccacaacagcgtggggagtggctcctgggccttcatacccatctctgcaggagcccacacgcatcccccggatgagttcctcttcacaccagtggtggtcgcctgcatgtccatcatggccttgctgctgctgctgctcctgctgctattgtacaagtataagcagaagcccaagtaccaggtccgctggaagatcatcgagagctatgagggcaacagttatactttcatcgaccccacgcagctgccttacaacgagaagtgggagttcccccggaacaacctgcagtttggtaagaccctcggagctggagcctttgggaaggtggtggaggccacggcctttggtctgggcaaggaggatgctgtcctgaaggtggctgtgaagatgctgaagtccacggcccatgctgatgagaaggaggccctcatgtccgagctgaagatcatgagccacctgggccagcacgagaacatcgtcaaccttctgggagcctgtacccatggaggccctgtactggtcatcacggagtactgttgctatggcgacctgctcaactttctgcgaaggaaggctgaggccatgctgggacccagcctgagccccggccaggaccccgagggaggcgtcgactataagaacatccacctcgagaagaaatatgtccgcagggacagtggcttctccagccagggtgtggacacctatgtggagatgaggcctgtctccacttcttcaaatgactccttctctgagcaagacctggacaaggaggatggacggcccctggagctccgggacctgcttcacttctccagccaagtagcccagggcatggccttcctcgcttccaagaattgcatccaccgggacgtggcagcgcgtaacgtgctgttgaccaatggtcatgtggccaagattggggacttcgggctggctagggacatcatgaatgactccaactacattgtcaagggcaatgcccgcctgcctgtgaagtggatggccccagagagcatctttgactgtgtctacacggttcagagcgacgtctggtcctatggcatcctcctctgggagatcttctcacttgggctgaatccctaccctggcatcctggtgaacagcaagttctataaactggtgaaggatggataccaaatggcccagcctgcatttgccccaaagaatatatacagcatcatgcaggcctgctgggccttggagcccacccacagacccaccttccagcagatctgctccttccttcaggagcaggcccaagaggacaggagagagcgggactataccaatctgccgagcagcagcagaagcggtggcagcggcagcagcagcagtgagctggaggaggagagctctagtgagcacctgacctgctgcgagcaaggggatatcgcccagcccttgctgcagcccaacaactatcagttctgctga

SEQ ID NO: 736 - DNA, 519 bp, Homo sapiens
atgttctaccatatctccctagagcacgaaatcctgctgcacccgcgctacttcggccccaacttgctcaacacggtgaagcagaagctcttcaccgaggtggaggggacctgcacagggaagtatggctttgtaattgctgtcaccaccattgacaatattggtgctggtgtgatccagccaggccgaggctttgtcctttatccagttaagtacaaggccattgttttccggccatttaaaggggaggtcgtggatgctgttgtcactcaggtcaacaaggttggactcttcacagaaattgggcccatgtcttgcttcatctctcgacattccatcccttcagagatggagtttgatcctaactccaacccaccatgttacaagacaatggatgaggatattgtgattcagcaggacgatgagatccgcttaaagattgtggggacccgtgtggacaagaatgacatttttgctattggctccctgatggacgattacttggggcttgtaagctga

SEQ ID NO: 737 - DNA, 1215 bp, Homo sapiens
ttagggcccatcacaggtccccaagggactcccccccaccagccgagagggggaattccccgggcccgaaggtggaaggcctcccgccccgccactcaagaccccgtcacgccggcccgaaactcatgcccgctccaacactccccggctcgccctctgggcttcaaggaactgacaggaggcgctgggcatccagccccgctctcctcgagcagaggcttggacccttgccgcagcttgggcccccgggctcgggcgagggcagcgccccgccggagtctcccgggctgtgtagtcccggagagccccgggccccgaggggccgaagcgggccgctacgacgggcggcgaatctcgggctcctgaccctggcggacccggtagctgggggcgggagaccggcggggagacaacccgaccagcaggctccgggctgaagattgcttctcttctctcctccaaggtctagtgacggagcccgcgcgcggcgccaccatgcggcagaaggcggtatcgcttttcttgtgctacctgctgctcttcacttgcagtggggtggaggcaggtaagaaaaagtgctcggagagctcggacagcggctccgggttctggaaggccctgaccttcatggccgtcggaggaggactcgcagtcgccgggctgcccgcgctgggcttcaccggcgccggcatcgcggccaactcggtggctgcctcgctgatgagctggtctgcgatcctgaatgggggcggcgtgcccgccggggggctagtggccacgctgcagagcctcggggctggtggcagcagcgtcgtcataggtaatattggtgccctgatgggctacgccacccacaagtatctcgatagtgaggaggatgaggagtagccagcagctcccagaacctcttcttccttcttggcctaactcttccagttaggatctagaactttgccttttttttttttttttttttttttgagatgggttctcactatattgtccaggctagagtgcagtggctattcacagatgcgaacatagtacactgcagcctccaactcctagcctcaagtgatcctcctgtctcaacctcccaagtaggattacaagcatgcgccgacgatgcccagaatccagaactttgtctatcactctccccaacaacctagatgtgaaaacagaataaacttcacccagaaaacaaaaaaaaaa

SEQ ID NO: 738 - DNA, 957 bp, Homo sapiens
atggccagtccgggctgcctgctgtgcgtgctgggcctgctactctgcggggcggcgagcctcgagctgtctagaccccacggcgacaccgccaagaagcccatcatcggaatattaatgcaaaaatgccgtaataaagtcatgaaaaactatggaagatactatattgctgcgtcctatgtaaagtacttggagtctgcaggtgcgagagttgtaccagtaaggctggatcttacagagaaagactatgaaatacttttcaaatctattaatggaatccttttccctggaggaagtgttgacctcagacgctcagattatgctaaagtggccaaaatattttataacttgtccatacagagttttgatgatggagactattttcctgtgtggggcacatgccttggatttgaagagctttcactgctgattagtggagagtgcttattaactgccacagatactgttgacgtggcaatgccgctgaacttcactggaggtcaattgcacagcagaatgttccagaattttcctactgagttgttgctgtcattagcagtagaacctctgactgccaatttccataagtggagcctctccgtgaagaattttacaatgaatgaaaagttaaagaagtttttcaatgtcttaactacaaatacagatggcaagattgagtttatttcaacaatggaaggatataagtatccagtatatggtgtccagtggcatccagagaaagcaccttatgagtggaagaatttggatggcatttcccatgcacctaatgctgtgaaaaccgcattttatttagcagagttttttgttaatgaagctcggaaaaacaaccatcattttaaatctgaatctgaagaggagaaagcattgatttatcagttcagtccaatttatactggaaatatttcttcatttcagcaatgttacatatttgattga

SEQ ID NO: 739 - DNA, 888 bp, Homo sapiens
atgtccggagcccttgatgtcctgcaaatgaaggaggaggatgtccttaagttccttgcagcaggaacccacttaggtggcaccaatcttgacttccagatggaacagtacatctataaaaggaaaagtgatggcatctatatcataaatctcaagaggacctgggagaagcttctgctggcagctcgtgcaattgttgccattgaaaaccctgctgatgtcagtgttatatcctccaggaatactggccagagggctgtgctgaagtttgctgctgccactggagccactccaattgctggccgcttcactcctggaaccttcactaaccagatccaggcagccttccgggagccacggcttcttgtggttactgaccccagggctgaccaccagcctctcacggaggcatcttatgttaacctacctaccattgcgctgtgtaacacagattctcctctgcgctatgtggacattgccatcccatgcaacaacaagggagctcactcagtgggtttaatgtggtggatgctggctcgggaagttctgcgcatgcgtggcaccatttcccgtgaacacccatgggaggtcatgcctgatctgtacttctacagagatcctgaagagattgaaaaagaagagcaggctgctgctgagaaggcagtgaccaaggaggaatttcagggtgaatggactgctcccgctcctgagttcactgctactcagcctgaggttgcagactggtctgaaggtgtacaggtgccctctgtgcctattcagcaattccctactgaagactggagcgctcagcctgccacggaagactggtctgcagctcccactgctcaggccactgaatgggtaggagcaaccactgactggtcttaa

SEQ ID NO: 740 - DNA, 2349 bp, Homo sapiens
atggctccgcaccgccccgcgcccgcgctgctttgcgcgctgtccctggcgctgtgcgcgctgtcgctgcccgtccgcgcggccactgcgtcgcggggggcgtcccaggcgggggcgccccaggggcgggtgcccgaggcgcggcccaacagcatggtggtggaacaccccgagttcctcaaggcagggaaggagcctggcctgcagatctggcgtgtggagaagttcgatctggtgcccgtgcccaccaacctttatggagacttcttcacgggcgacgcctacgtcatcctgaagacagtgcagctgaggaacggaaatctgcagtatgacctccactactggctgggcaatgagtgcagccaggatgagagcggggcggccgccatctttaccgtgcagctggatgactacctgaacggccgggccgtgcagcaccgtgaggtccagggcttcgagtcggccaccttcctaggctacttcaagtctggcctgaagtacaagaaaggaggtgtggcatcaggattcaagcacgtggtacccaacgaggtggtggtgcagagactcttccaggtcaaagggcggcgtgtggtccgtgccaccgaggtacctgtgtcctgggagagcttcaacaatggcgactgcttcatcctggacctgggcaacaacatccaccagtggtgtggttccaacagcaatcggtatgaaagactgaaggccacacaggtgtccaagggcatccgggacaacgagcggagtggccgggcccgagtgcacgtgtctgaggagggcactgagcccgaggcgatgctccaggtgctgggccccaagccggctctgcctgcaggtaccgaggacaccgccaaggaggatgcggccaaccgcaagctggccaagctctacaaggtctccaatggtgcagggaccatgtccgtctccctcgtggctgatgagaaccccttcgcccagggggccctgaagtcagaggactgcttcatcctggaccacggcaaagatgggaaaatctttgtctggaaaggcaagcaggcaaacacggaggagaggaaggctgccctcaaaacagcctctgacttcatcaccaagatggactaccccaagcagactcaggtctcggtccttcctgagggcggtgagaccccactgttcaagcagttcttcaagaactggcgggacccagaccagacagatggcctgggcttgtcctacctttccagccatatcgccaacgtggagcgggtgcccttcgacgccgccaccctgcacacctccactgccatggccgcccagcacggcatggatgacgatggcacaggccagaaacagatctggagaatcgaaggttccaacaaggtgcccgtggaccctgccacatatggacagttctatggaggcgacagctacatcattctgtacaactaccgccatggtggccgccaggggcagataatctataactggcagggtgcccagtctacccaggatgaggtcgctgcatctgccatcctgactgctcagctggatgaggagctgggaggtacccctgtccagagccgtgtggtccaaggcaaggagcccgcccacctcatgagcctgtttggtgggaagcccatgatcatctacaagggcggcacctcccgcgagggcgggcagacagcccctgccagcacccgcctcttccaggtccgcgccaacagcgctggagccacccgggctgttgaggtattgcctaaggctggtgcactgaactccaacgatgcctttgttctgaaaaccccctcagccgcctacctgtgggtgggtacaggagccagcgaggcagagaagacgggggcccaggagctgctcagggtgctgcgggcccaacctgtgcaggtggcagaaggcagcgagccagatggcttctgggaggccctgggcgggaaggctgcctaccgcacatccccacggctgaaggacaagaagatggatgcccatcctcctcgcctctttgcctgctccaacaagattggacgttttgtgatcgaagaggttcctggtgagctcatgcaggaagacctggcaacggatgacgtcatgcttctggacacctgggaccaggtctttgtctgggttggaaaggattctcaagaagaagaaaagacagaagccttgacttctgctaagcggtacatcgagacggacccagccaatcgggatcggcggacgcccatcaccgtggtgaagcaaggctttgagcctccctcctttgtgggctggttccttggctgggatgatgattactggtctgtggaccccttggacagggccatggctgagctggctgcctga

SEQ ID NO: 741 - DNA, 1674 bp, Homo sapiens
atgggtttgtcactgcccaaggagaaagggctaattctctgcctatggagcaagttctgcagatggttccaggactccctgggaaacacagtgttacacatcctcatcctccagcccaacaaaacctttgcctgccagatgtacaacctgttgctgtcctacgacagacatggggaccacctgcagcccctggacctcgtgcccaatcaccagggtctcacccctttcaagctggctggagtggagggtaacactgtgatgtttcagcacctgatgcagaagcggaagcacacccagtggacgtatggaccactgacctcgactctctatgacctcacagagatcgactcctcaggggatgagcagtccctgctggaacttatcatcaccaccaagaagcgggaggctcgccagatcctggaccagacgccggtgaaggagctggtgagcctcaagtggaagcggtacgggcggccgtacttctgcatgctgggtgccatatatctgctgtacatcatctgcttcaccatgtgctgcatctaccgccccctcaagcccaggaccaataaccgcacgagcccccgggacaacaccctcttacagcagaagctacttcaggaagcctacatgacccctaaggacgatatccggctggtcggggagctggtgactgtcattggggctatcatcatcctgctggtagaggttccagacatcttcagaatgggggtcactcgcttctttggacagaccatccttgggggcccattccatgtcctcatcatcacctatgccttcatggtgctggtgaccatggtgatgcggctcatcagtgccagcggggaggtggtacccatgtcctttgcactcgtgctgggctggtgcaacgtcatgtacttcgcccgaggattccagatgctaggccccttcaccatcatgattcagaagatgatttttggcgacctgatgcgattctgctggctgatggctgtggtcatcctgggctttgcttcagccttctatatcatcttccagacagaggaccccgaggagctaggccacttctacgactaccccatggccctgttcagcaccttcgagctgttccttaccatcatcgatggcccagccaactacaacgtggacctgcccttcatgtacagcatcacctatgctgcctttgccatcatcgccacactgctcatgctcaacctcctcattgccatgatgggcgacactcactggcgagtggcccatgagcgggatgagctgtggagggcccagattgtggccaccacggtgatgctggagcggaagctgcctcgctgcctgtggcctcgctccgggatctgcggacgggagtatggcctgggagaccgctggttcctgcgggtggaagacaggcaagatctcaaccggcagcggatccaacgctacgcacaggccttccacacccggggctctgaggatttggacaaagactcagtggaaaaactagagctgggctgtcccttcagcccccacctgtcccttcctatgccctcagtgtctcgaagtacctcccgcagcagtgccaattgggaaaggcttcggcaagggaccctgaggagagacctgcgtgggataatcaacaggggtctggaggacggggagagctgggaatatcagatctga

SEQ ID NO: 742 - DNA, 1329 bp, Homo sapiens
atgctaccgctgctgctgcccctgctgtgggcaggggccctggctcaggagcggagattccagctggaggggccagagtcactgacggtgcaggagggtctgtgcgtcctcgtaccctgcagattgcccactacccttccagcctcgtactatggttatggctactggttcctggaaggggctgatgttccagtggccacaaacgacccagacgaagaagtgcaggaggagacccggggccgattccacctcctctgggatcccagaaggaagaactgctccctgagcatcagagatgcccggaggagggacaatgctgcatacttctttcggttgaagtccaaatggatgaaatacggttatacatcttccaagctctctgtgcgtgtgatggccctgacccacaggcccaacatctccatcccagggaccctggagtctggccatcccagcaatctgacctgctctgtgccctgggtctgtgagcaggggacgccccccatcttctcctggatgtcagctgcccccacctccctgggccccaggaccacccagtcctcggtgctcacaatcaccccacggccccaggaccacagcaccaacctcacctgtcaggtgacgttccctggagccggtgtgaccatggagagaaccatccagctcaatgtctcctatgctccacagaaagtggccatcagcatcttccaaggaaacagcgcagccttcaaaatcctgcaaaacacctcgtccctccctgtcctggagggccaggctctgcggctgctctgtgatgctgacggcaacccccctgcacacctgagctggttccagggcttccccgccctgaacgccacccccatctccaataccggggtcctggagctgcctcaagtagggtctgcagaagaaggagatttcacctgccgtgctcagcatcctctgggctccctgcaaatctctctgagtctctttgtgcattggaaaccagaaggcagggctggtggtgtcctgggagcagtctggggagctagcatcacaaccctggttttcctctgtgtttgcttcatcttcagagtgaagactagaaggaagaaagcagcccagccagtgcaaaacacggatgatgtgaaccccgtcatggtctcaggctccaggggtcatcagcaccagttccagacaggcatagtttcagaccaccctgctgaggctggccccatctcagaagatgagcaggagctccactacgctgtcctacacttccacaaggtgcaacctcaggaaccaaaggtcaccgacactgagtactcagaaatcaagatacacaagtga

SEQ ID NO: 743 - DNA, 657 bp, Homo sapiens
atggggacccgggacgacgagtacgactacctattcaaagtggtgctcatcggggactcaggcgtgggcaagagcaacctgctgtcgcgcttcacccgcaacgagttcaacctggagagcaagagcaccatcggcgtggagttcgccacccgcagcatccaggtggacggcaagaccatcaaggcgcagatctgggacaccgctggccaggagcgctaccgcgccatcacctccgcgtactaccgtggtgcagtgggcgccctgctggtgtacgacatcgccaagcacctgacctatgagaacgtggagcgctggctgaaggagctgcgggaccacgcagacagcaacatcgtcatcatgctggtgggcaacaagagtgacctgcgccacctgcgggctgtgcccactgacgaggcccgcgccttcgcagaaaagaacaacttgtccttcatcgagacctcagccttggattccactaacgtagaggaagcattcaagaacatcctcacagagatctaccgcatcgtgtcacagaaacagatcgcagaccgcgctgcccacgacgagtccccggggaacaacgtggtggacatcagcgtgccgcccaccacggacggacagaagcccaacaagctgcagtgctgccagaacctgtga

SEQ ID NO: 744 - DNA, 750 bp, Homo sapiens
atgaagctgaacatctccttcccagccactggctgccagaaactcattgaagtggacgatgaacgcaaacttcgtactttctatgagaagcgtatggccacagaagttgctgctgacgctctgggtgaagaatggaagggttatgtggtccgaatcagtggtgggaacgacaaacaaggtttccccatgaagcagggtgtcttgacccatggccgtgtccgcctgctactgagtaaggggcattcctgttacagaccaaggagaactggagaaagaaagagaaaatcagttcgtggttgcattgtggatgcaaatctgagcgttctcaacttggttattgtaaaaaaaggagagaaggatattcctggactgactgatactacagtgcctcgccgcctgggccccaaaagagctagcagaatccgcaaacttttcaatctctctaaagaagatgatgtccgccagtatgttgtaagaaagcccttaaataaagaaggtaagaaacctaggaccaaagcacccaagattcagcgtcttgttactccacgtgtcctgcagcacaaacggcggcgtattgctctgaagaagcagcgtaccaagaaaaataaagaagaggctgcagaatatgctaaacttttggccaagagaatgaaggaggctagggagaagcgccaggaacaaattgcgaagagacgcagactttcctctctgcgagcttctacttctaagtctgaatccagtcagaaataa

SEQ ID NO: 745 - DNA, 405 bp, Homo sapiens
atggctcagtcactggctctgagcctccttatcctggttctggcctttggcatccccaggacccaaggcagtgatggaggggctcaggactgttgcctcaagtacagccaaaggaagattcccgccaaggttgtccgcagctaccggaagcaggaaccaagcttaggctgctccatcccagctatcctgttcttgccccgcaagcgctctcaggcagagctatgtgcagacccaaaggagctctgggtgcagcagctgatgcagcatctggacaagacaccatccccacagaaaccagcccagggctgcaggaaggacaggggggcctccaagactggcaagaaaggaaagggctccaaaggctgcaagaggactgagcggtcacagacccctaaagggccatag

SEQ ID NO: 746 - DNA, 3828 bp, Homo sapiens
atgacaggatcaaattcacacataacaatattaactttaaatataaatggactaaattctgcaattaaaagacacagactggcaaattggataaagagtcaagacccatcagtgtgctgtattcaggaaacccatctcacgtgcagagacacacataggctcaaaataaaaggatggaggaagatctaccaagccaatggaaaacaaaaaaaggcaggggttgcaatcctagtctctgataaaacagactttaaaccaacaaagatcaaaagagacaaagaaggccattacataatggtaaagggatcaattcaacaagaggagctaactatcctaaatatttatgcacccaatacaggagcacccagattcataaagcaagtcctcagtgacctacaaagagacttagactcccacacattaataatgggagactttaacaccccactgtcaacattagacagatcaacgagacagaaagtcaacaaggatacccaggaattgaactcagctctgcaccaagcagacctaatagacatctacagaactctccaccccaaatcaacagaatatacctttttttcagcaccacaccacacctattccaaaattgaccacatagttggaagtaaagctctcctcagcaaatgtaaaagaacagaaattataacaaattatctctcagaccacagtgcaatcaaactagaactcaggattaaaaatctcactcaaagccgctcaactacatggaaactgaacaacctgctcctgaatgactgctgggtacataacgaaatgaaggcagaaataaagatgttctttgaaaccaacgagaacaaagacaccacataccagaatctctgggacgcattcaaagcagtgtgtagagggaaattgatagcactaaatgcctacaagagaaagcaggaaagatccaaaattgacaccctaacatcacaattaaaagaactagaaaagcaagagcaaacacattcaaaagctagcagaaggcaagaaataactaaaatcagagcagaactgaaggaaatagagacacaaaaaacccttcaaaaaatcaatgaatccaggagctggttttttgaaaggatcaacaaaattgatagaccgctagcaagactaataaagaaaaaaagagagaagaatcaaatagacacaataaaaaatgataaaggggatatcaccactgatccctcagaaatacaaactaccatcagagaatactacaaacacctctacgcaaataaactagaaaatctagaagaaatggatacattcctcgacacatacactctcccaagactaaaccaggaagaagttgaatctctgaatagaccaataacaggctctgaaattgtggcaataatcaatagtttaccaaccaaaaagagtctaggaccagatagattcacagccgaattctaccagaggtacaaggaggaactggtaccattccttctgaaactattccaatcaatagaaaaagagggaatcctccctaactcattttatgaggccagcatcattctgataccaaagccgggcagagacacaaccaaaaaagagaattttagaccaatatccttgatgaacattgatgcaaaaatcctcaataaaatactggcaaaccgaatccagcagcccatcaaaaagcttatccaccatgatcaagtgggcttcatccctgggatgcaaggctggttcaatatacgcaaatcaataaatgtaatccagcatataaacagagccaaagacaaaaaccacatgattatctcaatagatgcagaaaaagcctttgacaaaattcaacaacccttcatgctaaaaactctcaataaattaggtattgatgggacgtatttcaaaataataagagctatctatgacaaacccacagccaatatcatactgaatgggcaaaaactggaagcattccctttgaaaactggcacaagacagggatgccctctctcaccgctcctattcaacatagtgttggaagttctggccagggcaatcaggcaggagaaggaaataaagggtattcaattaggaaaagaggaagtcaaattgtccctgtttgcagacgacatgattgtttatctagaaaaccccatcgtctcagcccaaaatctccttaagctgataagcaacttcagcaaagtctcaggatacaaaatcaatgtacaaaaatcacaagcattcttatacactaacaacagacaaacagagagccaaatcatgggtgaactcccattcacaattgcttcaaagagaataaaatacctaggaatccaacttacaagggatgtgaaggacctcttcaaggagaactacaaaccactgctgaaggaaataaaagaggacacaaacaaatggaagaacattccatgctcatgggtaggaagaatcaatatcatgaaaatggccatactgcccaaggtaatttacagattcaatgccatccccatcaagctaccaatgactttcttcacagaattggaaaaaactactttaaagttcatatggaaccaaaaaagagcccgcattgccaagtcaatcctaagccaaaagaacaaagctggaggcatcacactacctgacttcaaactatactacaaggctacagtaaccaaaacagcatggtactggtaccaaaacagagatatagatcaatggaacagaacagagccctcagaaatcatgccacatatctacaactatctgatctttgacaaacctgagaaaaacaagcaatggggaaaggattccctatttaataaatggtgctgggaaaactggctagccatatgtagaaagctgaaactggatcccttccttacaccttatacaaaaatcaattcaagatggattaaagatttaaacgttagacctaaaaccataaaaaccctagaagaaaaccgaggcattaccattcaggacataggcgtgggcaaggacttcatgtccaaaacaccaaaagcaatggcaacaaaagccaaaattgacaaatgggatctaattaaactaaagagcttctgcacagcaaaagaaactaccatcagagtgaacaggcaacctacaacatgggagaaaattttcgcaacctactcatctgacaaagggctaatatccagaatctacaatgaactcaaacaaatttacaagaaaaaaacaaacaaccccatcaaaaagtgggcgaaggacatgaacagacacttctcaaaagaagacatttatgcagccaaaaaacacatgaagaaatgctcatcatcactggccatcagagaaatgcaaatcaaaaccactatgagatatcatctcacaccagttagaatggcaatcattaaaaagtcaggaaacaacaggtgctggagaggatgtggagaaataggaacacttttacactgttggtgggactgtaaactagttcaaccattgtggaagtcagtgtggcgattcctcagggatctagaattagaaataccattttacccagccatcccattactgggtatatacccaaaggactataaatcatgctgctataaagacacatgcacacgtatgtttattgaggcactattcacaatagcaaagacttggaaccaacccaaatgtccaacaatgatagactggattaagaaaatgtggcacatatacaccatggaatactatgcagccataaaaaatgatgagttcatatcctttgtagggacatggatgaaattggaaaccatcattctcagtaaactatcgcaagaacaaaaaaccaaacaccgcatattctcactcataggtgggaattga

SEQ ID NO: 747 - DNA, 933 bp, Homo sapiens
atggacagacttcttagacttggaggaggtatgcctggactgggccaggggccacctacagatgctcctgcagtggacacagcagaacaagtctatatctcttccctggcactgttaaaaatgttaaaacatggccgtgctggagttccaatggaagttatgggtttgatgcttggagaatttgttgatgattataccgtcagagtgattgatgtgtttgctatgccacagtcaggaacaggtgtcagtgtggaggcagttgatccagtgttccaagctaaaatgttggatatgttgaagcagacaggaaggccggagatggttgttggttggtatcacagtcaccctggctttggttgttggctttctggtgtggatatcaacactcagcagagctttgaagccttgtcggagagagctgtggcagtggttgtggatcccattcagagtgtaaaaggaaaggttgttattgatgccttcagattgatcaatgctaatatgatggtcttaggacatgaaccaagacaaacaacttcgaatctgggtcacttaaacaagccatctatccaggcattaattcatggactaaacagacattattactccattactattaactatcggaaaaatgaactggaacagaagatgttgctaaatttgcataagaagagttggatggaaggtttgacacttcaggactacagtgaacattgtaaacacaatgaatcagtggtaaaagagatgttggaattagccaagaattacaataaggctgtagaagaagaagataagatgacacctgaacagctggcaataaagaatgttggcaagcaggaccccaaacgtcatttggaggaacatgtggatgtacttatgacctcaaatattgtccagtgtttagcagctatgttggatactgtcgtatttaaataa

SEQ ID NO: 748 - DNA, 1759 bp, Homo sapiens
aaggatccttaattaaattaatccccccccccccccccccccgagcgcagagcggtttggtcgttcgttgggcggtgctggtttttcgctcgtcgactgcggctcttcctcgggcagcggaagcggcgcggcggtcggagaagtggcctaaaacttcggcgttgggtgaaagaaaatggcccgaaccaagcagactgctcgtaagtccaccggtgggaaagccccccgcaaacagctggccacgaaagccgccaggaaaagcgctccctctaccggcggggtgaagaagcctcatcgctacaggcccgggaccgtggcgcttcgagagattcgtcgttatcagaagtcgaccgagctgctcatccggaagctgcccttccagaggttggtgagggagatcgcgcaggatttcaaaaccgacctgaggtttcagagcgcagccatcggtgcgctgcaggaggctagcgaagcgtacctggtgggtctgttcgaagataccaacctgtgtgccatccacgctaagagagtcaccatcatgcccaaagacatccagttggctcgccggatacggggagagagagcttaagtgaaggcagtttttatggcgttttgtagtaaattctgtaaaatactttggtttaatttgtgactttttttgtaagaaattgtttataatatgttgcatttgtacttaagtcattccatctttcactcaggatgaatgcgaaaagtgactgtttcacagacctcagtgatgtgaggcactgttgcctccaggagtgacaagttggctaatatgccagaagggatgggtgataacttcttgcttctcatgatgcatgtttctgtatgttaatgacttgttgggtagctattaaggtactagagttgaatacacatgtgtacagggtccttttgcaataaaactggttatgacttgatccaagtgtttaacaattggggctgttaagtctgaccatacatcactgtgatagaatgtgggctttttcaagggtgaagatacaagtcttaaccacagtgtaacttacagtttcctttaaaaaaaaaaaaagtaaacctggcagctatagaatacactatgtgcatttataatagctattttatatattgtagtatcaacatttttaaattaaatgttttacattcacaagtggtggggagtcttgtcattaaggtgtgtgtaatttagagtccagttggttttcttctgactgcacttgttctcatagtagtaaaatgctatgcgcatttataccttgcataagtcctcattctaccacatgttaaccctctagctgataatgcaaacactaactgggggattttatttataagggctctagaaaaaacgagttattcacaccagcatcatcttaactaacattctgaactagttagtgcagcttttcattgtgttgtgtggttggtctcataactaggttgagtttttctcctctgctgaggaaacagtaccgaagttctttttcttgtggcatttgtattataaaaacttggtgtgggggaggagcacaaaactccagcccactgaacctctgccaattaagatggtgttgggttaggttacatctggttactgtcctgggaaaatcatttttatagagatggccttccaagtggttttaaaatttactgaagtttttaggtcaattatgtatgttgactaaatttacaaataaacttgtttatccaactaagtgtccaaaacctaaaaaaaaaa

SEQ ID NO: 749 - DNA, 2543 bp, Homo sapiens
ggcggggatggcggcgcagggcgtagggcctgggccggggtcggcggcgcccccggggctggaggcggcccggcagaagctggcgctgcggcggaagaaggtgctgagcaccgaggagatggagctgtacgagctggcgcaggcggcgggcggcgctatcgaccccgacgtgttcaagatcctggtggacctgctgaagctgaacgtggcccccctcgccgtcttccagatgctcaagtccatgtgtgccgggcagaggctagcgagcgagccccaggaccctgcggccgtgtctctgcccacgtcgagcgtgcccgagacccgagggagaaacaaaggcagcgctgccctcgggggagcattggccctggcggaacgcagcagccgcgaaggatccagccagaggatgccacgccagcccagcgctgccctcgggggagcattggccctggcggaacgcagcagccgcgaaggatccagccagaggatgccacgccagcccagcgctaccaggctgcccaaggggggcgggcctgggaagagccctacacggggcagcacctaggatggggcagagacttgttgcatctttgtccccagcaaaggctacatgttacctccttcaattgataataaacctttctgagatgcaaactcgagaatactgcccagttactctagcgcgccaggccgaaccgcagcttcttggcttaggtacttctactcacagcggccgattccgaggccaactccagcaatggcttttgcaaatctgcggaaagtgctcatcagtgacagcctggacccttgctgccggaagatcttgcaagagggagggctgcaggtggtggaaaagcagaaccttagcaaagaggagctgatagcggagctgcaggactgtgaaggccttattgttcgctctgccaccaaggtgaccgctgatgtcatcaacgcagctgagaaactccaggtggtgggcagggctggcacaggtgtggacaatgtggatctggaggccgcaacaaggaagggcatcttggttatgaacacccccaatgggaacagcctcagtgccgcagaactcacttgtggaatgatcatgtgcctggccaggcagattccccaggcgacggcttcgatgaaggacggcaaatgggagcggaagaagttcatgggaacagagctgaatggaaagaccctgggaattcttggcctgggcaggattgggagagaggtagctacccggatgcagtcctttgggatgaagactatagggtatgaccccatcatttccccagaggtctcggcctcctttggtgttcagcagctgcccctggaggagatctggcctctctgtgatttcatcactgtgcacactcctctcctgccctccacgacaggcttgctgaatgacaacacctttgcccagtgcaagaagggggtgcgtgtggtgaactgtgcccgtggagggatcgtggacgaaggcgccctgctccgggccctgcagtctggccagtgtgccggggctgcactggacgtgtttacggaagagccgccacgggaccgggccttggtggaccatgagaatgtcatcagctgtccccacctgggtgccagcaccaaggaggctcagagccgctgtggggaggaaattgctgttcagttcgtggacatggtgaaggggaaatctctcacgggggttgtgaatgcccaggcccttaccagtgccttctctccacacaccaagccttggattggtctggcagaagctctggggacactgatgcgagcctgggctgggtcccccaaagggaccatccaggtgataacacagggaacatccctgaagaatgctgggaactgcctaagccccgcagtcattgtcggcctcctgaaagaggcttccaagcaggcggatgtgaacttggtgaacgctaagctgctggtgaaagaggctggcctcaatgtcaccacctcccacagccctgctgcaccaggggagcaaggcttcggggaatgcctcctggccgtggccctggcaggcgccccttaccaggctgtgggcttggtccaaggcactacacctgtactgcaggggctcaatggagctgtcttcaggccagaagtgcctctccgcagggacctgcccctgctcctattccggactcagacctctgaccctgcaatgctgcctaccatgattggcctcctggcagaggcaggcgtgcggctgctgtcctaccagacttcactggtgtcagatggggagacctggcacgtcatgggcatctcctccttgctgcccagcctggaagcgtggaagcagcatgtgactgaagccttccagttccacttctaaccttggagctcactggtccctgcctctggggcttttctgaagaaacccacccactgtgatcaatagggagagaaaatccacattcttgggctgaacgcgggcctctgacactgcttacactgcactctgaccctgtagtacagcaataaccgtctaataaagagcctacccccaaaaaaaaaaa

SEQ ID NO: 750 - DNA, 726 bp, Homo sapiens
atggctgaagaacaaccgcaggtcgaattgttcgtgaaggctggcagtgatggggccaagattgggaactgcccattctcccagagactgttcatggtactgtggctcaagggagtcaccttcaatgttaccaccgttgacaccaaaaggcggaccgagacagtgcagaagctgtgcccagggggggagctcccattcctgctgtatggcactgaagtgcacacagacaccaacaagattgaggaatttctggaggcagtgctgtgccctcccaggtaccccaagctggcagctctgaaccctgagtccaacacagctgggctggacatatttgccaaattttctgcctacatcaagaattcaaacccagcactcaatgacaatctggagaagggactcctgaaagccctgaaggttttagacaattacttaacatcccccctcccagaagaagtggatgaaaccagtgctgaagatgaaggtgtctctcagaggaagtttttggatggcaacgagctcaccctggctgactgcaacctgttgccaaagttacacatagtacaggtggtgtgtaagaagtaccggggattcaccatccccgaggccttccggggagtgcatcggtacttgagcaatgcctacgcccgggaagaattcgcttccacctgtccagatgatgaggagatcgagctcgcctatgagcaagtggcaaaggccctcaaataa

SEQ ID NO: 751 - DNA, 768 bp, Homo sapiens
atgagctcaatcggcactgggtatgacctgtcagcctctacattctctcctgacggaagagtttttcaagttgaatatgctatgaaggctgtggaaaatagtagtacagctattggaatcagatgcaaagatggtgttgtctttggggtagaaaaattagtcctttctaaactttatgaagaaggttccaacaaaagactttttaatgttgatcggcatgttggaatggcagtagcaggtttgttggcagatgctcgttctttagcggacatggcaagagaagaagcttccaacttcagatctaactttggctacaacattccactaaaacatcttgcagacagagtggccatgtatgtgcatgcatatacactctacagtgctgttagaccttttggctgcagtttcatgttagggtcttacagtgtgaatgacggtgcgcaactctacatgattgacccatcaggtgtttcatacggttattggggctgtgccatcggcaaagccagacaagctgcaaagacggaaatagagaagcttcagatgaaagaaatgacctgccgtgatatcgttaaagaagttgcaaaaataatttacatagtacatgacgaagttaaggataaagcttttgaactagaactcagctgggttggtgaattaactaatggaagacatgaaattgttccaaaagatataagagaagaagcagagaaatatgctaaggaatctctgaaggaagaagatgaatcagatgatgataatatgtaa

SEQ ID NO: 752 - DNA, 393 bp, Homo sapiens
atggtgcgcatgaatgtcctggcagatgctctcaagagtatcaacaatgccgaaaagagaggcaaacgccaggtgcttattaggccgtgctccaaagtcatcgtccggtttctcactgtgatgatgaagcatggttacattggcgaatttgaaatcattgatgaccacagagctgggaaaattgttgtgaacctcacaggcaggctaaacaagtgtggggtgatcagccccagatttgacgtgcaactcaaagacctggaaaaatggcagaataatctgcttccatcccgccagtttggtttcattgtactgacaacctcagctggcatcatggaccatgaagaagcaagacgaaaacacacaggagggaaaatcctgggattctttttctag

SEQ ID NO: 753 - DNA, 1065 bp, Homo sapiens
atgcggcgcctcatgagctcccgggactggccgcgcactcgcacaggcacagggatcctgtcctcacagccggaggagaacccctactggtggaacgcaaacatggtcttcatcccctactgctccagtgatgtttggagcggggcttcatccaagtctgagaagaacgagtacgccttcatgggcgccctcatcatccaggaggtggtgcgggagcttctgggcagagggctgagcggggccaaggtgctgctgctggccgggagcagcgcggggggcaccggggtgctcctgaatgtggaccgtgtggctgagcagctggagaagctgggctacccagccatccaggtgcgaggcctggctgactccggctggttcctggacaacaagcagtatcgccacacagactgcgtcgacacgatcacgtgcgcgcccacggaggccatccgccgtggcatcaggtactggaacggggtggtcccggagcgctgccgacgccagttccaggagggcgaggagtggaactgcttctttggctacaaggtctacccgaccctgcgctgccctgtgttcgtggtgcagtggctgtttgacgaggcacagctgacggtggacaacgtgcacctgacggggcagccggtgcaggagggcctgcggctgtacatccagaacctcggccgcgagctgcgccacacactcaaggacgtgccggccagctttgcccccgcctgcctctcccatgagatcatcatccggagccactggacggatgtccaggtgaaggggacgtcgctgccccgagcactgcactgctgggacaggagcctccatgacagccacaaggccagcaagacccccctcaagggctgccccgtccacctggtggacagctgcccctggccccactgcaacccctcatgccccaccgtccgagaccagttcacggggcaagagatgaacgtggcccagttcctcatgcacatgggcttcgacatgcagacggtggcccagccgcagggactggagcccagtgagctgctggggatgctgagcaacggaagctag

SEQ ID NO: 754 - DNA, 1338 bp, Homo sapiens
atggcggagtacgacttgactactcgcatcgcgcactttttggatcggcatctagtctttccgcttcttgaatttctctctgtaaaggagatatataatgaaaaggaattattacaaggtaaattggaccttcttagtgataccaacatggtagactttgctatggatgtatacaaaaacctttattctgatgatattcctcatgctttgagagagaaaagaaccacagtggttgcacaactgaaacagcttcaggcagaaacagaaccaattgtgaagatgtttgaagatccagaaactacaaggcaaatgcagtcaaccagggatggtaggatgctctttgactacctggcggacaagcatggttttaggcaggaatatttagatacactctacagatatgcaaaattccagtacgaatgtgggaattactcaggagcagcagaatatctttatttttttagagtgctggttccagcaacagatagaaatgctttaagttcactctggggaaagctggcctctgaaatcttaatgcagaattgggatgcagccatggaagaccttacacggttaaaagagaccatagataataattctgtgagttctccacttcagtctcttcagcagagaacatggctcattcactggtctctgtttgttttcttcaatcaccccaaaggtcgcgataatattattgacctcttcctttatcagccacaatatcttaatgcaattcagacaatgtgtccacacattcttcgctatttgactacagcagtcataacaaacaaggatgttcgaaaacgtcggcaggttctaaaagatctagttaaagttattcaacaggagtcttacacatataaagacccaattacagaatttgttgaatgtttatatgttaactttgactttgatggggctcagaaaaagctgagggaatgtgaatcagtgcttgtgaatgacttcttcttggtggcttgtcttgaggatttcattgaaaatgcccgtctcttcatatttgagactttctgtcgcatccaccagtgtatcagcattaacatgttggcagataaattgaacatgactccagaagaagctgaaaggtggattgtaaatttgattagaaatgcaagactggatgccaagattgattctaaattaggtcatgtggttatgggtaacaatgcagtctcaccctatcagcaagtgattgaaaagaccaaaagcctttcctttagaagccagatgttggccatgaatattgagaagaaacttaatcagaatagcaggtcagaggctcctaactgggcaactcaagattctggcttctactga

SEQ ID NO: 755 - DNA, 867 bp, Homo sapiens
atggcgggtgaaaaagttgagaagccagatactaaagagaagaaacccgaagtcaagaaggttgatgctggtggcaaggtgaaaaagggtaacctcaaagctaaaaagcccaagaaggggaagccccattgcggccgcaaccctgtccttgtcagaggaattggcaggtattcccgatctgccatgtattccagaaaggccatgtacaagaggaagtactcagccgctaaatccaaggttgaaaagaaaaagaaggagaaggttctcgcaactgttacaaaaccagttggtggtgacaagaacggcggtacccgggtggttaaacttcgcaaaatgcctagatattatcctactgaagatgtgcctcgaaagctgttgagccacggcaaaaaacccttcagtcagcacgtgagaaaactgcgagccagcattacccccgggaccattctgatcatcctcactggacgccacaggggcaagagggtggttttcctgaagcagctggctagtggcttattacttgtgactggacctctggtcctcaatcgagttcctctacgaagaacacaccagaaatttgtcattgccacttcaaccaaaatcgatatcagcaatgtaaaaatcccaaaacatcttactgatgcttacttcaagaagaagaagctgcggaagcccagacaccaggaaggtgagatcttcgacacagaaaaagagaaatatgagattacggagcagcgcaagattgatcagaaagctgtggactcacaaattttaccaaaaatcaaagctattcctcagctccagggctacctgcgatctgtgtttgctctgacgaatggaatttatcctcacaaattggtgttctaa

SEQ ID NO: 756 - DNA, 1314 bp, Homo sapiens
atggcggctgggaccctgtacacgtatcctgaaaactggagggccttcaaggctctcatcgctgctcagtacagcggggctcaggtccgcgtgctctccgcaccaccccacttccattttggccaaaccaaccgcacccctgaatttctccgcaaatttcctgccggcaaggtcccagcatttgagggtgatgatggattctgtgtgtttgagagcaacgccattgcctactatgtgagcaatgaggagctgcggggaagtactccagaggcagcagcccaggtggtgcagtgggtgagctttgctgattccgatatagtgcccccagccagtacctgggtgttccccaccttgggcatcatgcaccacaacaaacaggccactgagaatgcaaaggaggaagtgaggcgaattctggggctgctggatgcttacttgaagacgaggacttttctggtgggcgaacgagtgacattggctgacatcacagttgtctgcaccctgttgtggctctataagcaggttctagagccttctttccgccaggcctttcccaataccaaccgctggttcctcacctgcattaaccagccccagttccgggctgtcttgggcgaagtgaaactgtgtgagaagatggcccagtttgatgctaaaaagtttgcagagacccaacctaaaaaggacacaccacggaaagagaagggttcacgggaagagaagcagaagccccaggctgagcggaaggaggagaaaaaggcggctgcccctgctcctgaggaggagatggatgaatgtgagcaggcgctggctgctgagcccaaggccaaggaccccttcgctcacctgcccaagagtacctttgtgttggatgaatttaagcgcaagtactccaatgaggacacactctctgtggcactgccatatttctgggagcactttgataaggacggctggtccctgtggtactcagagtatcgcttccctgaagaactcactcagaccttcatgagctgcaatctcatcactggaatgttccagcgactggacaagctgaggaagaatgccttcgccagtgtcatcctttttggaaccaacaatagcagctccatttctggagtctgggtcttccgaggccaggagcttgcctttccgctgagtccagattggcaggtggactacgagtcatacacatggcggaaactggatcctggcagcgaggagacccagacgctggttcgagagtacttttcctgggagggggccttccagcatgtgggcaaagccttcaatcagggcaagatcttcaagtga

SEQ ID NO: 757 - DNA, 606 bp, Homo sapiens
atggccaacaagggtccttcctatggcatgagccgcgaagtgcagtccaaaatcgagaagaagtatgacgaggagctggaggagcggctggtggagtggatcatagtgcagtgtggccctgatgtgggccgcccagaccgtgggcgcttgggcttccaggtctggctgaagaatggcgtgattctgagcaagctggtgaacagcctgtaccctgatggctccaagccggtgaaggtgcccgagaacccaccctccatggtcttcaagcagatggagcaggtggctcagttcctgaaggcggctgaggactatggggtcatcaagactgacatgttccagactgttgacctctttgaaggcaaagacatggcagcagtgcagaggaccctgatggctttgggcagcttggcagtgaccaagaatgatgggcactaccgtggagatcccaactggtttatgaagaaagcgcaggagcataagagggaattcacagagagccagctgcaggagggaaagcatgtcattggccttcagatgggcagcaacagaggggcctcccaggccggcatgacaggctacggacgacctcggcagatcatcagttag

SEQ ID NO: 758 - DNA, 7008 bp, Homo sapiens
atggccggagtgtttccttatcgagggccgggtaacccggtgcctggccctctagccccgctaccggactacatgtcggaggagaagctgcaggagaaagctcgaaaatggcagcaattgcaggccaagcgctatgcagaaaagcggaagtttgggtttgtggatgcccagaaggaagacatgcccccagaacatgtcagggagatcattcgagaccatggagacatgaccaacaggaagttccgccatgacaaaagggtttacttgggtgccctaaagtacatgccccacgcagtcctcaaactcctggagaacatgcctatgccttgggagcagattcgggatgtgcccgtgctgtaccacatcactggagccatttccttcgtcaatgagattccctgggtcattgaacctgtctacatctcccagtgggggtcaatgtggattatgatgcgccgagaaaaaagagataggaggcatttcaagagaatgcgttttcccccttttgatgatgaggagccgcccttggactatgctgacaacatcctaaatgttgagccactggaggccattcagctagagctggaccctgaggaggacgcccctgtgttggactggttctatgaccaccagccgttgagggacagcaggaagtatgtaaatggctccacttaccagcgctggcagttcacactacctatgatgtcaactctctaccgcctggctaatcagctcctgacagacttggtggatgacaactacttctacctgtttgatttgaaggccttctttacgtccaaggcactcaatatggccattcctggaggccccaaatttgaacctcttgttcgagacatcaacctacaggatgaagactggaatgaattcaatgatattaacaagattatcatccggcagcctatccggactgagtacaagattgcttttccttacttgtacaacaatcttccacaccatgtccacctcacctggtaccatactcccaatgttgtattcatcaaaactgaagatcctgacttgccagctttctactttgaccctttgatcaacccaatctcccataggcactcagtcaagagccaggaaccattgccggatgatgatgaggaatttgagctcccggagtttgtggagcccttcctgaaggacacacccctctatacagacaatacagccaatggcattgccctgctctgggccccgcggcccttcaacctacgctctggtcgcacccgtcgggccctggacataccccttgtcaagaactggtatcgggagcattgtcctgccgggcagcctgtgaaagtgagggtctcctaccagaagctgcttaagtactatgtgctgaatgccctgaagcatcggccccctaaggctcaaaagaagaggtatttgttccgctccttcaaagccaccaaattctttcagtccacaaagctggactgggtggagggttggctccaggtttgccgccagggctacaacatgctcaaccttctcattcaccgcaaaaacctcaactacctgcacctggactacaacttcaacctcaagcctgtgaaaacgctcaccaccaaggaaagaaagaaatctcgttttgggaatgctttccacctgtgtcgggaagttctgcgtttgactaagctggtggtggatagtcacgtgcagtatcggctgggcaatgtggatgccttccagctggcagatggattgcagtatatatttgcccatgttgggcagttgacgggcatgtatcgatacaaatacaagctgatgcgacagattcgcgtgtgcaaggacctgaagcatctcatctattatcgtttcaacacaggccctgtagggaagggtcctggctgtggcttctgggctgccggttggcgagtctggctctttttcatgcgtggcattacccctttattagagcgatggcttggcaacctcctggcccggcagtttgaaggtcgacactcaaagggggtggcaaagacagtaacaaagcagcgagtggagtcacattttgaccttgagctgcgggcagctgtgatgcatgatattctggacatgatgcctgaggggatcaagcagaacaaggcccggacaatcctgcagcacctcagtgaagcctggcgctgctggaaagccaacattccctggaaggtccctgggctgccgacgcccatagagaatatgatccttcgatacgtgaaggccaaggctgactggtggaccaacactgcccactacaaccgagaacggatccgccgaggggccactgtggacaagactgtttgtaaaaagaatctgggccgcctcacccggctctatctgaaggcagaacaggagcggcagcacaactacctgaaggacgggccttacatcacagcggaggaaacagtggcagtatataccaccacagtgcattggttggaaagccgcaggttttcacccatcccattccccccactctcctataagcatgacaccaagttgctcatcttggcattggagcggctcaaggaagcttatagtgtgaagtctcggttgaaccagtctcagagggaggagctaggtctgatcgagcaggcctacgataacctccacgaggcgctgtcccgcataaagcgtcacctcctcacacagagagccttcaaagaggtgggcattgagttcatggatctgtatagccacctcgttccagtatatgatgttgagcccctggagaagataactgatgcttacctggaccagtacctgtggtatgaagccgacaagcgccgcctgttcccaccctggattaagcctgcagacacagaaccacctccactgcttgtttacaagtggtgtcaaggcatcaataacctgcaggacgtgtgggagacgagtgaaggcgagtgcaatgtcatgctggaatcccgctttgagaagatgtatgagaagatcgacttgactctgctcaacaggctcgtgcgcctcatcgtggaccacaacatagccgactacatgacagccaagaacaacgtcgtcatcaactataaggacatgaaccatacgaattcatatgggatcatcagaggcctgcagtttgcctcattcatagtgcagtattatggcctggtgatggatttgcttgtattgggattgcaccgggccagtgagatggctgggccccctcagatgccaaatgactttctcagtttccaggacatagccactgaggctgcccaccccatccgtctcttctgcagatacattgatcgcatccatatttttttcaggttcacagcagatgaggctcgggacctgattcaacgttacctgacagagcaccctgaccccaataatgaaaacatcgttggctataataacaagaagtgctggccccgagatgcccgcatgcgcctcatgaaacatgatgttaacttaggccgggcggtattctgggacatcaagaaccgcttgccacggtcagtgactacagttcagtgggagaacagcttcgtgtctgtgtacagtaaggacaaccccaacctgctgttcaacatgtgtggcttcgagtgccgcatcctgcctaagtgccgcaccagctatgaggagttcacccacaaggacggggtctggaacctgcagaatgaggttactaaggagcgcacagctcagtgtttcctgcgtgtggacgatgagtcaatgcagcgcttccacaaccgcgtgcgtcagattctcatggcctctgggtccaccaccttcaccaagattgtgaataagtggaatacagctctcattggccttatgacatactttcgggaggctgtggtgaacacccaagagctcttggacttactggtgaagtgtgagcacaaaatccagacacgtatcaagattggactcaactccaagatgccaagtcggttccccccggttgtgttctacacccctaaggagttgggtggactcggcatgctctcaatgggccatgtgctcatcccccaatccgacctcaggtggtccaaacagacagatgtaggtatcacacactttcgttcaggaatgagccatgaagaagaccagctcattcccaacttgtaccgctacatacagccatgggagagcgagttcattgattctcagcgggtctgggctgagtactcactcaagagacaagaggccattgctcagaacagacgcctgactttagaagacctagaagattcatgggatcgtggcattcctcgaatcaataccctcttccagaaggaccggcacacactggcttatgataagggctggcgtgtcagaactgactttaagcagtatcaggttttgaagcagaatccgttctggtggacacaccagcggcatgatgggaagctctggaacctgaacaactaccgtacagacatgatccaggccctgggcggtgtggaaggcattctggaacacacactctttaagggcacttacttccctacctgggaggggcttttctgggagaaggccagtggctttgaggaatctatgaagtggaagaagctaactaatgctcagcgatcaggactgaaccagattcccaatcgtagattcaccctctggtggtccccgaccattaatcgagccaatgtatatgtaggctttcaggtgcagctagacctgacgggtatcttcatgcacggcaagatccccacgctgaagatctctctcatccagatcttccgagctcacttgtggcagaagatccatgagagcattgttatggacttatgtcaggtgtttgaccaggaacttgatgcactggaaattgagacagtacaaaaggagacaatccatccccgaaagtcatataagatgaactcttcctgtgcagatatcctgctctttgcctcctataagtggaatgtctcccggccctcattgctggctgactccaaggatgtgatggacagcaccaccacccagaaatactggattgacatccagttgcgctggggggactatgattcccacgacattgagcgctacgcccgggccaagttcctggactacaccaccgacaacatgagtatctacccttcgcccacaggtgtactcatcgccattgacctggcctataacttgcacagtgcctatggaaactggttcccaggcagcaagcctctcatacaacaggccatggccaagatcatgaaggcaaaccctgccctgtatgtgttacgtgaacggatccgcaaggggctacagctctattcatctgaacccactgagccttatttgtcttctcagaactatggtgagctcttctccaaccagattatctggtttgtggatgacaccaacgtctacagagtgactattcacaagacctttgaagggaacttgacaaccaagcccatcaacggagccatcttcatcttcaacccacgcacagggcagctgttcctcaagataatccacacgtccgtgtgggcgggacagaagcgtttggggcagttggctaagtggaagacagctgaggaggtggccgccctgatccgatctctgcctgtggaggagcagcccaagcagatcattgtcaccaggaaggacatgctggacccactggaggtgcacttactggacttccccaatattgtcatcaaaggatcggagctccaactccctttccaggcgtgtctcaaggtggaaaaattcggggatctcatccttaaagccactgagccccagatggttctcttcaacctctatgacgactggctcaagactatttcatcttacacggccttctcccgtctcatcctgattctgcgtgccctacatgtgaacaacgatcgggcaaaagtgatcctgaagccagacaagactactattacagaaccacaccacatctggcccactctgactgacgaagaatggatcaaggtcgaggtgcagctcaaggatctgatcttggctgactacggcaagaaaaacaatgtgaacgtggcatcactgacacaatcagaaattcgagacatcatcctgggtatggagatctcggcaccgtcacagcagcggcagcagatcgctgagatcgagaagcagaccaaggaacaatcgcagctgacggcaacacagactcgcactgtcaacaagcatggcgatgagatcatcacctccaccaccagcaactatgagacccagactttctcatccaagactgagtggagggtcagggccatctctgctgccaacctgcacctaaggaccaatcacatctatgtttcatctgacgacatcaaggagactggctacacctacatccttcccaagaatgtgcttaagaagttcatctgcatatctgaccttcgggcccaaattgcaggatacctatatggggtgagcccaccagataacccccaggtgaaggagatccgctgcattgtgatggtgccgcagtggggcactcaccagaccgtgcacctgcctggccagctgccccagcatgagtacctcaaggagatggaacccttaggttggatccacactcagcccaatgagtccccgcagttatcaccccaggatgtcaccacccatgccaagatcatggctgacaacccatcttgggatggcgagaagaccattatcatcacatgcagcttcacgccaggctcctgtacactgacggcctacaagctgacccctagtggctacgaatggggccgccagaacacagacaagggcaacaaccccaagggctacctgccttcacactatgagagggtgcagatgctgctgtcggaccgtttccttggcttcttcatggtccctgcccagtcctcgtggaactacaacttcatgggtgttcggcatgaccccaacatgaaatatgagctacagctggcgaaccccaaagagttctaccacgaggtgcacaggccctctcacttcctcaactttgctctcctgcaggagggggaggtttactctgcggatcgggaggacctgtatgcctga

SEQ ID NO: 759 - DNA, 1830 bp, Homo sapiens
atgtcagggtgggagtcatattacaaaaccgagggcgatgaagaagcagaggaagaacaagaagagaaccttgaagcaagtggagactataaatattcaggaagagatagtttgatttttttggttgatgcctccaaggctatgtttgaatctcagagtgaagatgagttgacaccttttgacatgagcatccagtgtatccaaagtgtgtacatcagtaagatcataagcagtgatcgagatctcttggctgtggtgttctatggtaccgagaaagacaaaaattcagtgaattttaaaaatatttacgtcttacaggagctggataatccaggtgcaaaacgaattctagagcttgaccagtttaaggggcagcagggacaaaaacgtttccaagacatgatgggccacggatctgactactcactcagtgaagtgctgtgggtctgtgccaacctctttagtgatgtccaattcaagatgagtcataagaggatcatgctgttcaccaatgaagacaacccccatggcaatgacagtgccaaagccagccgggccaggaccaaagccggtgatctccgagatacaggcatcttccttgacttgatgcacctgaagaaacctgggggctttgacatatccttgttctacagagatatcatcagcatagcagaggatgaggacctcagggttcactttgaggaatccagcaagctagaagacctgttgcggaaggttcgcgccaaggagaccaggaagcgagcactcagcaggttaaagctgaagctcaacaaagatatagtgatctctgtgggcatttataatctggtccagaaggctctcaagcctcctccaataaagctctatcgggaaacaaatgaaccagtgaaaaccaagacccggacctttaatacaagtacaggcggtttgcttctgcctagcgataccaagaggtctcagatctatgggagtcgtcagattatactggagaaagaggaaacagaagagctaaaacggtttgatgatccaggtttgatgctcatgggtttcaagccgttggtactgctgaagaaacaccattacctgaggccctccctgttcgtgtacccagaggagtcgctggtgattgggagctcaaccctgttcagtgctctgctcatcaagtgtctggagaaggaggttgcagcattgtgcagatacacaccccgcaggaacatccctccttattttgtggctttggtgccacaggaagaagagttggatgaccagaaaattcaggtgactcctccaggcttccagctggtctttttaccctttgctgatgataaaaggaagatgccctttactgaaaaaatcatggcaactccagagcaggtgggcaagatgaaggctatcgttgagaagcttcgcttcacatacagaagtgacagctttgagaaccccgtgctgcagcagcacttcaggaacctggaggccttggccttggatttgatggagccggaacaagcagtggacctgacattgcccaaggttgaagcaatgaataaaagactgggctccttggtggatgagtttaaggagcttgtttacccaccagattacaatcctgaagggaaagttaccaagagaaaacacgataatgaaggttctggaagcaaaaggcccaaggtggagtattcagaagaggagctgaagacccacatcagcaagggtacgctgggcaagttcactgtgcccatgctgaaagaggcctgccgggcttacgggctgaagagtggtctgaagaagcaggagctgctggaagccctcaccaagcacttccaggactga

SEQ ID NO: 760 - DNA, 2327 bp, Homo sapiens
gcacgaggcgaatccctgcttaaaggccttgctttcttgtctaacgccgcaaccagtcctctgagttgccaacgtctttcttcttgtctcgacgccccgtcgtccggccacagcgattctctgcttagcaggatcggtccacagcgggacgtgagtccctttcctcctcgcggcttaccgcctctctccgcctagtgccaggtgctaataaagttgttgtttcaaatgcggccaggaacatcgcgagcggggaccaatcagagagtagctttgcctctataacggcgcgagagtgagacgtcatcggtgagcgactaacgctagaaacagtggtgcgcggagaggagaggcctcgggatgtctctggcagatgagctcttagctgatctcgaagaggcagcagaagaggaggaaggaggaagctatggggaggaagaagaggagccagcgatcgaggatgtgcaggaggagacacagctggatctttccggggattcagtcaagaccatcgccaagctatgggatagtaagatgtttgctgagattatgatgaagattgaggagtatatcagcaagcaagccaaagcttcagaagtgatgggaccagtggaggccgcgcctgaataccgcgtcatcgtggatgccaacaacctgaccgtggagatcgaaaacgagctgaacatcatccataagttcatccgggataagtactcaaagagattccctgaactggagtccttggtccccaatgcactggattacatccgcacggtcaaggagctgggcaacagcctggacaagtgcaagaacaatgagaacctgcagcagatcctcaccaatgccaccatcatggtcgtcagcgtcaccgcctccaccacccaggggcagcagctgtcggaggaggagctggagcggctggatgaggcctgcgacatggcgctggagctgaacgcctccaagcaccgcatctacgagtatgtggagtcccggatgtccttcatcgcacccaacctgtccatcattatcggggcatccacggccgccaagatcatgggtgtggccggcggcctgaccaacctctccaagatgcccgcctgcaacatcatgctgctcggggcccagcgcaagacgctgtcgggcttctcgtctacctcagtgctgccccacaccggctacatctaccacagtgacatcgtgcagtccctgccaccggatctgcggcggaaagcggcccggctggtggccgccaagtgcacactggcagcccgtgtggacagtttccacgagagcacagaagggaaggtgggctacgaactgaaggatgagatcgagcgcaaattcgacaagtggcaggagccgccgcctgtgaagcaggtgaagccgctgcctgcgcccctggatggacagcggaagaagcgaggcggccgcaggtaccgcaagatgaaggagcggctggggctgacggagatccggaagcaggccaaccgtatgagcttcggagagatcgaggaggacgcctaccaggaggacctgggattcagcctgggccacctgggcaagtcgggcagtgggcgtgtgcggcagacacaggtaaacgaggccaccaaggccaggatctccaagacgctgcagcggaccctgcagaagcagagcgtcgtatatggcgggaagtccaccatccgcgaccgctcctcgggcacggcctccagcgtggccttcaccccactccagggcctggagattgtgaacccacaggcggcagagaagaaggtggctgaggccaaccagaagtatttctccagcatggctgagttcctcaaggtcaagggcgagaagagtggccttatgtccacctgaatgactgcgtgtgtccaaggtggcttcccactgaagggacacagaggtccagtccttctgaagggctaggatcgggttctggcagggagaacctgccctgccactggccccattgctgggactgcccagggaggaggccttggaagagtccggcctggcctcccccaggaccgagatcaccgcccagtatgggctagagcaggtcttcatcatgccttgtcttttttaactgagaaaggagattttttgaaaagagtacaattaaaaggacatgtcaagacaccccccaccacccaccgccccccgcccccccccccccccccccccgcccccacgcgccacgcccacgcgggaacaggcaccagcagcgccaccgcggcccacccccccgcgtcgccacccggcgacaacacgcgcgcgccccccaagccaacgcgcaaataccgccaccaccccgaaccccgctcacc

SEQ ID NO: 761 - DNA, 246 bp, Homo sapiens
atggcgtatcacggcctcactgtgcctctcattgtgatgagcgtgttctggggcttcgtcggcttcttggtgccttggttcatccctaagggtcctaaccggggagttatcattaccatgttggtgacctgttcagtttgctgctatctcttttggctgattgcaattctggcccaactcaaccctctctttggaccgcaattgaaaaatgaaaccatctggtatctgaagtatcattggccttga

SEQ ID NO: 762 - DNA, 1047 bp, Homo sapiens
atggcagagaaggtgctggtaacaggtggggctggctacattggcagccacacggtgctggagctgctggaggctggctacttgcctgtggtcatcgataacttccataatgccttccgtggagggggctccctgcctgagagcctgcggcgggtccaggagctgacaggccgctctgtggagtttgaggagatggacattttggaccagggagccctacagcgtctcttcaaaaagtacagctttatggcggtcatccactttgcggggctcaaggccgtgggcgagtcggtgcagaagcctctggattattacagagttaacctgaccgggaccatccagcttctggagatcatgaaggcccacggggtgaagaacctggtgttcagcagctcagccactgtgtacgggaacccccagtacctgccccttgatgaggcccaccccacgggtggttgtaccaacccttacggcaagtccaagttcttcatcgaggaaatgatccgggacctgtgccaggcagacaagacttggaacgtagtgctgctgcgctatttcaaccccacaggtgcccatgcctctggctgcattggtgaggatccccagggcatacccaacaacctcatgccttatgtctcccaggtggcgatcgggcgacgggaggccctgaatgtctttggcaatgactatgacacagaggatggcacaggtgtccgggattacatccatgtcgtggatctggccaagggccacattgcagccttaaggaagctgaaagaacagtgtggctgccggatctacaacctgggcacgggcacaggctattcagtgctgcagatggtccaggctatggagaaggcctctgggaagaagatcccgtacaaggtggtggcacggcgggaaggtgatgtggcagcctgttacgccaaccccagcctggcccaagaggagctggggtggacagcagccttagggctggacaggatgtgtgaggatctctggcgctggcagaagcagaatccttcaggctttggcacgcaagcctga

SEQ ID NO: 763 - DNA, 528 bp, Homo sapiens
atggcggcggtctcaatgtcagtggtactgaggcagacgttgtggcggagaagggcagtggctgtagctgccctttccgtttccagggttccgaccaggtcgttgaggacttccacatggagattggcacaggaccagactcaagacacacaactcataacagttgatgaaaaattggatatcactactttaactggcgttccagaagagcatataaaaactagaaaagtcaggatctttgttcctgctcgcaataacatgcagtctggagtaaacaacacaaagaaatggaagatggagtttgataccagggagcgatgggaaaatcctttgatgggttgggcatcaacggctgatcccttatccaacatggttctaaccttcagtactaaagaagatgcagtttcctttgcagaaaaaaatggatggagctatgacattgaagagaggaaggttccaaaacccaagtccaagtcttatggtgcaaacttttcttggaacaaaagaacaagagtatccacaaaatag

SEQ ID NO: 764 - DNA, 411 bp, Homo sapiens
atgcagaccgccggggcattattcatttctccagctctgatccgctgttgtaccaggggtctaatcaggcctgtgtctgcctccttcttgaatagcccagtgaattcatctaaacagccttcctacagcaacttcccactccaggtggccagacgggagttccagaccagtgttgtctcccgggacattgacacagcagccaagtttattggtgctggggcagccacagttggtgtggctggttcaggggctggcattggaaccgtgtttggcagcttgatcattggctatgccaggaacccgtctctcaagcagcagctcttctcctatgccattcttggctttgccctgtctgaggccatggggcttttctgtttgatggtcgccttcctcatcctcttcgccatgtga

SEQ ID NO: 765 - DNA, 867 bp, Homo sapiens
atgagttccagaaagcagggttctcaacctcgtggacagcaatctgcagaagaagagaacttcaaaaaaccaactagaagcaacatgcagagaagtaaaatgagaggggcctcctcaggaaagaagacagctggtccacagcagaaaaatcttgaaccagctctcccaggaagatggggtggtcgctctgcagagaaccccccttcaggatccgtgaggaagaccagaaagaacaagcagaagactcctggaaacggagatggtggcagtaccagcgaagcacctcagccccctcggaagaaaagggcccgggcagaccccactgttgaaagtgaggaggcgtttaagaatagaatggaggttaaagtgaagattcctgaagaattaaaaccatggcttgttgaggactgggacttagttaccaggcagaagcagctgtttcaactccctgccaagaaaaatgtagatgcaattctggaggagtatgcaaattgcaagaaatcgcagggaaatgttgataataaggaatatgcggttaatgaagttgtggcaggaataaaagaatatttcaatgtgatgttgggcactcagctgctctacaaatttgagaggccccagtatgctgaaatcctcttggctcaccctgatgctccaatgtcccaggtttatggagcaccacacctactgagattatttgtaagaattggagcaatgttggcctatacgccccttgatgagaaaagccttgcattattgttgggctatttgcatgatttcctaaaatatctggcaaagaattctgcatctctctttactgccagtgattacaaagtggcttctgctgagtaccaccgcaaagccctgtga

SEQ ID NO: 766 - DNA, 1065 bp, Homo sapiens
atgaggctggctgtgcttttctcgggggccctgctggggctactggcagcccaggggacagggaatgactgtcctcacaaaaaatcagctactttgctgccatccttcacggtgacacccacggttacagagagcactggaacaaccagccacaggactaccaagagccacaaaaccaccactcacaggacaaccaccacaggcaccaccagccacggacccacgactgccactcacaaccccaccaccaccagccatggaaacgtcacagttcatccaacaagcaatagcactgccaccagccagggaccctcaactgccactcacagtcctgccaccactagtcatggaaatgccacggttcatccaacaagcaacagcactgccaccagcccaggattcaccagttctgcccacccagaaccacctccaccctctccgagtcctagcccaacctccaaggagaccattggagactacacgtggaccaatggttcccagccctgtgtccacctccaagcccagattcagattcgagtcatgtacacaacccagggtggaggagaggcctggggcatctctgtactgaaccccaacaaaaccaaggtccagggaagctgtgagggtgcccatccccacctgcttctctcattcccctatggacacctcagctttggattcatgcaggacctccagcagaaggttgtctacctgagctacatggcggtggagtacaatgtgtccttcccccacgcagcaaagtggacattctcggctcagaatgcatcccttcgagatctccaagcacccctggggcagagcttcagttgcagcaactcgagcatcattctttcaccagctgtccacctcgacctgctctccctgaggctccaggctgctcagctgccccacacaggggtctttgggcaaagtttctcctgccccagtgaccggtccatcttgctgcctctcatcatcggcctgatccttcttggcctcctcgccctggtgcttattgctttctgcatcatccggagacgcccatccgcctaccaggccctctga

SEQ ID NO: 767 - DNA, 2292 bp, Homo sapiens
atggcggccaccgggaccgcggccgccgcagccacgggcaggctcctgcttctgctgctggtggggctcacggcgcctgccttggcgctggccggctacatcgaggctcttgcagccaatgccggaacaggatttgctgttgctgagcctcaaatcgcaatgttttgtgggaagttaaatatgcatgtgaacattcagactgggaaatgggaacctgatccaacaggcaccaagagctgctttgaaacaaaagaagaagttcttcagtactgtcaggagatgtatccagagctacagatcacaaatgtgatggaggcaaaccagcgggttagtattgacaactggtgccggagggacaaaaagcaatgcaagagtcgctttgttacacctttcaagtgtctcgtgggtgaatttgtaagtgatgtcctgctagttccagaaaagtgccagtttttccacaaagagcggatggaggtgtgtgagaatcaccagcactggcacacggtagtcaaagaggcatgtctgactcagggaatgaccttatatagctacggcatgctgctcccatgtggggtagaccagttccatggcactgaatatgtgtgctgccctcagacaaagattattggatctgtgtcaaaagaagaggaagaggaagatgaagaggaagaggaagaggaagatgaagaggaagactatgatgtttataaaagtgaatttcctactgaagcagatctggaagacttcacagaagcagctgtggatgaggatgatgaggatgaggaagaaggggaggaagtggtggaggaccgagattactactatgacaccttcaaaggagatgactacaatgaggagaatcctactgaacccggcagcgacggcaccatgtcagacaaggaaattactcatgatgtcaaagctgtctgctcccaggaggcgatgacggggccctgccgggccgtgatgcctcgttggtacttcgacctctccaagggaaagtgcgtgcgctttatatatggtggctgcggcggcaacaggaacaattttgagtctgaggattattgtatggctgtgtgtaaagcgatgattcctccaactcctctgccaaccaatgatgttgatgtgtatttcgagacctctgcagatgataatgagcatgctcgcttccagaaggctaaggagcagctggagattcggcaccgcaaccgaatggacagggtaaagaaggaatgggaagaggcagagcttcaagctaagaacctccccaaagcagagaggcagactctgattcagcacttccaagccatggttaaagctttagagaaggaagcagccagtgagaagcagcagctggtggagacccacctggcccgagtggaagctatgctgaatgaccgccgtcggatggctctggagaactacctggctgccttgcagtctgacccgccacggcctcatcgcattctccaggccttacggcgttatgtccgtgctgagaacaaagatcgcttacataccatccgtcattaccagcatgtgttggctgttgacccagaaaaggcggcccagatgaaatcccaggtgatgacacatctccacgtgattgaagaaaggaggaaccaaagcctctctctgctctacaaagtaccttatgtagcccaagaaattcaagaggaaattgatgagctccttcaggagcagcgtgcagatatggaccagttcactgcctcaatctcagagacccctgtggacgtccgggtgagctctgaggagagtgaggagatcccaccgttccaccccttccaccccttcccagccctacctgagaacgaagacactcagccggagttgtaccacccaatgaaaaaaggatctggagtgggagagcaggatgggggactgatcggtgccgaagagaaagtgattaacagtaagaataaagtggatgaaaacatggtcattgacgagactctggatgttaaggaaatgattttcaatgccgagagagttggaggcctcgaggaagagcgggaatccgtgggcccactgcgggaggacttcagtctgagtagcagtgctctcattggcctgctggtcatcgcagtggccattgccacggtcatcgtcatcagcctggtgatgctgaggaagaggcagtatggcaccatcagccacgggatcgtggaggttgatccaatgctcaccccagaagagcgtcacctgaacaagatgcagaaccatggctatgagaaccccacctacaaatacctggagcagatgcagatttag

SEQ ID NO: 768 - DNA, 747 bp, Homo sapiens
atggagggtgtagaagagaagaagaaggaggttcctgctgtgccagaaacccttaagaaaaagcgaaggaatttcgcagagctgaagatcaagcgcctgagaaagaagtttgcccaaaagatgcttcgaaaggcaaggaggaagcttatctatgaaaaagcaaagcactatcacaaggaatataggcagatgtacagaactgaaattcgaatggcgaggatggcaagaaaagctggcaacttctatgtacctgcagaacccaaattggcgtttgtcatcagaatcagaggtatcaatggagtgagcccaaaggttcgaaaggtgttgcagcttcttcgccttcgtcaaatcttcaatggaacctttgtgaagctcaacaaggcttcgattaacatgctgaggattgtagagccatatattgcatgggggtaccccaatctgaagtcagtaaatgaactaatctacaagcgtggttatggcaaaatcaataagaagcgaattgctttgacagataactctttgattgctcgatctcttggtaaatacggcatcatctgcatggaggatttgattcatgagatctatactgttggaaaacgcttcaaagaggcaaataacttcctgtggcccttcaaattgtcttctccacgaggtggaatgaagaaaaagaccacccattttgtagaaggtggagatgctggcaacagggaggaccagatcaacaggcttattagaagaatgaactaa

SEQ ID NO: 769 - DNA, 489 bp, Homo sapiens
atggcggagaccgtggctgacacccggcggctgatcaccaagccgcagaacctgaatgacgcctacggaccccccagcaacttcctcgagatcgatgtgagcaacccgcaaacggtgggggtcggccggggccgcttcaccacttacgaaatcagggtcaagacaaatcttcctattttcaagctgaaagaatctactgttagaagaagatacagtgactttgaatggctgcgaagtgaattagaaagagagagcaaggtcgtagttcccccgctccctgggaaagcgtttttgcgtcacttcccttttagaggagatgatggaatatttgatgacaattttattgaggaaagaaaacaagggctggagcagtttataaacaaggtcgctggtcatcctctggcacagaacgaacgttgtcttcacatgtttttacaagatgaaataatagataaaagctatactccatctaaaataagacatgcctga

SEQ ID NO: 770 - DNA, 4017 bp, Homo sapiens
atggtcagctactgggacaccggggtcctgctgtgcgcgctgctcagctgtctgcttctcacaggatctagttcaggttcaaaattaaaagatcctgaactgagtttaaaaggcacccagcacatcatgcaagcaggccagacactgcatctccaatgcaggggggaagcagcccataaatggtctttgcctgaaatggtgagtaaggaaagcgaaaggctgagcataactaaatctgcctgtggaagaaatggcaaacaattctgcagtactttaaccttgaacacagctcaagcaaaccacactggcttctacagctgcaaatatctagctgtacctacttcaaagaagaaggaaacagaatctgcaatctatatatttattagtgatacaggtagacctttcgtagagatgtacagtgaaatccccgaaattatacacatgactgaaggaagggagctcgtcattccctgccgggttacgtcacctaacatcactgttactttaaaaaagtttccacttgacactttgatccctgatggaaaacgcataatctgggacagtagaaagggcttcatcatatcaaatgcaacgtacaaagaaatagggcttctgacctgtgaagcaacagtcaatgggcatttgtataagacaaactatctcacacatcgacaaaccaatacaatcatagatgtccaaataagcacaccacgcccagtcaaattacttagaggccatactcttgtcctcaattgtactgctaccactcccttgaacacgagagttcaaatgacctggagttaccctgatgaaaaaaataagagagcttccgtaaggcgacgaattgaccaaagcaattcccatgccaacatattctacagtgttcttactattgacaaaatgcagaacaaagacaaaggactttatacttgtcgtgtaaggagtggaccatcattcaaatctgttaacacctcagtgcatatatatgataaagcattcatcactgtgaaacatcgaaaacagcaggtgcttgaaaccgtagctggcaagcggtcttaccggctctctatgaaagtgaaggcatttccctcgccggaagttgtatggttaaaagatgggttacctgcgactgagaaatctgctcgctatttgactcgtggctactcgttaattatcaaggacgtaactgaagaggatgcagggaattatacaatcttgctgagcataaaacagtcaaatgtgtttaaaaacctcactgccactctaattgtcaatgtgaaaccccagatttacgaaaaggccgtgtcatcgtttccagacccggctctctacccactgggcagcagacaaatcctgacttgtaccgcatatggtatccctcaacctacaatcaagtggttctggcacccctgtaaccataatcattccgaagcaaggtgtgacttttgttccaataatgaagagtcctttatcctggatgctgacagcaacatgggaaacagaattgagagcatcactcagcgcatggcaataatagaaggaaagaataagatggctagcaccttggttgtggctgactctagaatttctggaatctacatttgcatagcttccaataaagttgggactgtgggaagaaacataagcttttatatcacagatgtgccaaatgggtttcatgttaacttggaaaaaatgccgacggaaggagaggacctgaaactgtcttgcacagttaacaagttcttatacagagacgttacttggattttactgcggacagttaataacagaacaatgcactacagtattagcaagcaaaaaatggccatcactaaggagcactccatcactcttaatcttaccatcatgaatgtttccctgcaagattcaggcacctatgcctgcagagccaggaatgtatacacaggggaagaaatcctccagaagaaagaaattacaatcagagatcaggaagcaccatacctcctgcgaaacctcagtgatcacacagtggccatcagcagttccaccactttagactgtcatgctaatggtgtccccgagcctcagatcacttggtttaaaaacaaccacaaaatacaacaagagcctggaattattttaggaccaggaagcagcacgctgtttattgaaagagtcacagaagaggatgaaggtgtctatcactgcaaagccaccaaccagaagggctctgtggaaagttcagcatacctcactgttcaaggaacctcggacaagtctaatctggagctgatcactctaacatgcacctgtgtggctgcgactctcttctggctcctattaaccctctttatccgaaaaatgaaaaggtcttcttctgaaataaagactgactacctatcaattataatggacccagatgaagttcctttggatgagcagtgtgagcggctcccttatgatgccagcaagtgggagtttgcccgggagagacttaaactgggcaaatcacttggaagaggggcttttggaaaagtggttcaagcatcagcatttggcattaagaaatcacctacgtgccggactgtggctgtgaaaatgctgaaagagggggccacggccagcgagtacaaagctctgatgactgagctaaaaatcttgacccacattggccaccatctgaacgtggttaacctgctgggagcctgcaccaagcaaggagggcctctgatggtgattgttgaatactgcaaatatggaaatctctccaactacctcaagagcaaacgtgacttattttttctcaacaaggatgcagcactacacatggagcctaagaaagaaaaaatggagccaggcctggaacaaggcaagaaaccaagactagatagcgtcaccagcagcgaaagctttgcgagctccggctttcaggaagataaaagtctgagtgatgttgaggaagaggaggattctgacggtttctacaaggagcccatcactatggaagatctgatttcttacagttttcaagtggccagaggcatggagttcctgtcttccagaaagtgcattcatcgggacctggcagcgagaaacattcttttatctgagaacaacgtggtgaagatttgtgattttggccttgcccgggatatttataagaaccccgattatgtgagaaaaggagatactcgacttcctctgaaatggatggctcctgaatctatctttgacaaaatctacagcaccaagagcgacgtgtggtcttacggagtattgctgtgggaaatcttctccttaggtgggtctccatacccaggagtacaaatggatgaggacttttgcagtcgcctgagggaaggcatgaggatgagagctcctgagtactctactcctgaaatctatcagatcatgctggactgctggcacagagacccaaaagaaaggccaagatttgcagaacttgtggaaaaactaggtgatttgcttcaagcaaatgtacaacaggatggtaaagactacatcccaatcaatgccatactgacaggaaatagtgggtttacatactcaactcctgccttctctgaggacttcttcaaggaaagtatttcagctccgaagtttaattcaggaagctctgatgatgtcagatatgtaaatgctttcaagttcatgagcctggaaagaatcaaaacctttgaagaacttttaccgaatgccacctccatgtttgatgactaccagggcgacagcagcactctgttggcctctcccatgctgaagcgcttcacctggactgacagcaaacccaaggcctcgctcaagattgacttgagagtaaccagtaaaagtaaggagtcggggctgtctgatgtcagcaggcccagtttctgccattccagctgtgggcacgtcagcgaaggcaagcgcaggttcacctacgaccacgctgagctggaaaggaaaatcgcgtgctgctccccgcccccagactacaactcggtggtcctgtactccaccccacccatctag

SEQ ID NO: 771 - DNA, 14941 bp, Homo sapiens
ttttttttttttttaaacaaagtctcattctgttgccctggcatgatctcagctcactgcaacctcctcctcctgggttcaagtgatcctcgtgcctcagcctcctgagaagctggtattacagacgtgcaccaccatgcctgactaatttttgtatttttagtagagacaagttttcgctatgctggccaggctgacctcgaactcctagcctcctcatatgatccacccacctcagtctcccaaagtgctgggattacaagcgtgagccaccttgcacagccaaatcaagtcacttttaaaatacaaatttattatatgtctaaggacattatcgataaagtgaaaacacaacccacagaatgggagaaaatatttgcaaaccatgtatctgataagggtctagaatccagaatatataaagaactcttacaactcagtaataaaaagacaaacgcctaattaaaaagtgggccaaggctcagcacagacacttctccagggaacatacacatatggccaacagcaccagcaaaggtgcttgatagcatcactcatcagagaaatgcaaatccaaatgacaccagaggctacttcacactcattagaatgattataaccagaaagtcagataataactagtgttggcaagaatgcgcagaaattggaaccctcttacttactggtgggaatgtgaaatggtgcatggacgtgggaaaatagtttggcagttcctcaaaaatatacagttaccatatgacccagtaattctactcctaggtatataatgagagaattgaaaacatatgttcacacaaaaacttgtacgcaactgttcatagcaccattgttcataatagccaaaaaccagaaataatccaaatgtccaaatgatgtgtgaataaacaaaatggggtctatccatacagtggaatattattcagccagaaaaaggaacgcagtactgttatatgctgcaacatgaatgaaccctgaaaacccgctaagtgaaatcagacagacccaaaaagacaaatactgtatgattacacttatatgaggcccctagaataggcaaattcacacagacagagagcacaacaaagtttaccagtataacaaaggttaccaaagactagggggagagacaggtaggaagttatttttttatgaatacagagcgtctgtttgggatgacgaaaaagttctagaaatggatagtgtcgatggttgcacaacatagcaaatatactaaaagccactgaatagaacatttcaaaagcatgaattttatctcaatatttagaaggaaaaataaatattcttagaagaaacaatattaccatcataaatggaaaaccggtaataataaaatacatacataaatattaagatttacaatgtctattagcaagtcaccctaactcatcttacagaccaccagtaggacaattacccctttgggtgacatgaaaaaggctgccagggggcttatgtccagtgcccagggtccagcatggcaacatattttgtaaaaagttccagcaggctgtggacagcaggaataggctgttgaggggttgggcacagggtcaggtgctggacactagaacaggactccactccgacattccgggtacacagaacttcccagtgggaagagctagccacacagtggcagaagcttggaaaacaacccatcccagccctacgctctctgaatgtgaccttgggtgcaagctgggtttgtatgaacttactggcatttttaacaagacagtgtgtacgggagcatttcaactgcaaagaccactgaactggacactgtcggcgtgacagtatcaagtaaccattaggcagagcaaaacgtaaataaaagtactctgtgatggggtagtcagtcagatggggtggggtcggctagggggcagtgaggacaactagatgccgaggtagacagaccaagaccagctttctgtgtaatgcaaagtcaaattaaatagacgtgagtggatggaaagacgtaccttattcttgcataagaagacaacggcatgaagacatcacagggaaggttaaggtaaacatgcagcctggaatagccaggagaattctggaaaagtagaataatgaggtagggcttcccttcgctattttgaagtgcagattacactatgtaaaaccattaggaactggcacgtgaatagacagatcaatagttaatagctgtattagccagaaaatggtgtaaggacaacaggctaactaaccctgtcacttgttatgctaaaattaagtctagatagagtcctccaaaataaaaataaaaagagttaggagaaaacatggggtttaacaacaacaacaaaatcttcagctggattagccttttcaaactactcacaaaatccaggaaccataaaagaaaattagtatatatatatgtatatatatatgtatatatatatatatatatatatatatatatatatatatatatatatatatatatatatatatatatgtatatatatatatatacatatatatatatatacatatatatataaactaaagagcaaaatattacaataaaacttaaagattagtgagaaataggaatgtatttgaaaagggttaatttccttaatatgtaaagagctcttattattaatcagtaagtatacaacccaatagaaatacaaatccaaactacaattaaatactattttccacttctcacattgacaaataaccaagtttaagggcacagcctgggtgaaggtgtggggaaatgtcaatgggaccaacctccttgaggtggaagctgggggtgtccatcatatttagaaatttacacatgctgtgcccagaattcctcctgaggaaacttttctctcacagatatacttgcccatgtacataaaaacccatgtacacagatatgcggtatagccttatctacagtaaaaattgctgaaacaacttaatggttccccaaaaagggaatgggtaattcaaacacggctaccacacagatgttgaaaagaccaaggcagacatgaatacagatatgcggtgcttacctagatgtactagtaactcaacagtccacagtgcaagacaggctgtgtggtgtacccacgcctgtacagctttacacatacacaggttctctggaaagaaactgcagcaactggccatgacggtggcctctgtgggaagggaggctgggggttagagaaagatgccactgaatcacccacagggtttgaagttcaaacatgtgcaggtatggctttgaacagttttcacacatctattcataggtgaaattaactggaaggaaactagcaaagcatttgcctttggggtcagcacaggagcagaggcccaggcagggccttgctttgacacacagatgatgggtcacacagttgtcaccttgacagaagagtaacagggacagcacaccagtcactctaggagctgaggccagaggaactcaggtatttccttctagaggtagtaagtccaccgaggcagatgccaagccgggtggtgcctcgctgtgtacaatgttctgctccctgtgcccctatgagtgaccctatgaggtaagagccagagccgggctcacacctgagctcctggcatgtggcggccctttagaagacagaaagtgtgtgcttagcccctgaagcagccacgctgtgcccagcggagggcaggcgcagacagcactccttcccagaccaggatgccacttaagatttcaacaaactaaacagacaagtgaataaaagatcattaaataccactttttacaaatgtcacagacgctttcctagaatagtttgtttttggtttatttaatctgtgtaggggaaagaataccaggaattagactctggggcctgcaggacccactactgttttgtgctaagccaggcaccgtgttatactcgattccggtatggacaggcagctgcagccactacgcagttttaccccagttccacggcacatgaggagaggaccaacattattctattttggcagcacgtgctttcaacccatctcacaaaacagtgtcaccaaccagatgtgccaagagccagagcaggtgaagacacctacagatgctgcctcctctggacactgcctctgggtgcctcagctctgcacccagagggatgcaaaagagatccccgcagcacactttgagatggctaggaaactgcaaataacctcaaagccatcactagaaaaatggttaaaatgaccataccaacacgtacaatatgacatgttatagagccataaaaataacagtacaccttgtatgattccattttagggcagagaataataggatacattttagtacatccacagccagaaaatgtctgaaggaatataaatgaagttgtcattagtagttatcttaggggtccgggattatagaggaacttttatcttctacatggcctttttctatagtgtttgaattttaattacaagaccagtgatttataaattcatacactccacagccccatccattacaatagcacataatataataacattagccatggacttacctaaatctgcataattttggtctcttcaggacagttgctgcaatgcaggcataagcagaggacaaagccacagtgtgacctgggtgcagagcactgggttgggcatcaccagcagacacatgacaaaagcaatttaaaaaattataccttgacaaaattatacatgattatatgtcttggaccctgggggccttgtcagcattaagcccatgaatgctaaattcacacacagatgacaagaatctactgtaccaattacagtcttagtaggtcactgcatacatgatagatcaaagatggcaactagcagaaacttaagtttcatatatggagcgtcgtagaggatatgaacaacagatactctcatacttaggtatgcaaagctggacacccactctggagggcaacagggcagaatggagaaaaatgtcggactcacgccctatgacccaggaatttcacttcttggtacctaccctgagaaacactcatgcattgtgcacaaggggttgtgtatgacgatgatcgcacagaactgtttgtaatatcaaaagattagaatactgtaaatttccattaacagcagaatggctaaactcacagacatacagtgcagaagttgaaaacaatgagggcagttctctgtgtactcccaggcatctccctactgttaaatgaaaaaaagtaatcaataatgtacaggacacaatagcattttaccacttctatagaaaagaaaccatgcaacacgtttttcagatacaaatggaagtgaataaggcgaggtgtagcaggaaacacagcaaactggtaacactggttacccctctggagggtgggggattggtagtgccaacgttgttgtcgtcacctttcaactctgtgtaaggagaaaacacccacatatcacttctacaaggacactgagaaacagtgttgttgagaggctgagaggcaacctagtcaccatggatgggagaactgataaactaactgaggtatagtcacatgatgagctctatccagtaaacaaactaaatgaactatcccctgggcaagggctgaatcttaccatggtattaaatgagaatgttccataagattacatgcaaaataataaattttctctaagaacagctaaaatataaatatatactctgaaaaacacatttagatcagattcttttgcaaaattatatgaaaagaaagcaagtgagagataaacccaggattcaggatgattattaccttggcctagggggtggcaggaggcggcaggggaggcgggtggtgtgggaccacataagtggaaggtgtagtaaaatctcagacttcactactgtagaactcatatatatgaccaaaagccatttgtaccccaaaagccattgaaattaaatatatatatatatacacacacacacacacataaagaaaaaaaaagaaaattataagaagttaatattgacagacctggaacaaaaaatcaaagacagtatttagtcattaaaattttgctatttcaatttcatcagtgtaaataattaatttaagtggagaggagtgttcattgtaaccataggagttactgtctgtattgtcctagtttttgtattggataggagattcagaaatgcttaccacattattaaaaaacaattaaagaaagcaagtaaaagagagccatgttgtgtcctgaatcaaagattaagattgagatttacccagttctgtgtatttgagttccaacagagagaatattcttgccttacaggagtgttctagcctccatttaccagattttaaagcataatgaaaagtgatgatcattacattccattgcattttattaacaacaacaacaaaaactggagcctaaaatttccagaaatagatccagagagaaaatgttaagaaccatttgatctagcaatcccactcctgggtatctacccaaaggaaaagaagtcattataccagaaagacacttgatggcagtacaagtcacaattgcaaagatgtggaaccaacccatcaaccagtgagtggataaataaaatgtggtatctctacaccatggaatatgacttagcaataaaaaagaacaaaataatgtttgtggttttttttttttttgcagcaattttggatggagctggaggatattattctaagtgaagcaactcaggaatggaaaaccaaatactgtgtgttctcacttataagtgagagctaacttatgggtacaaaaaggtatacagagtgacataatggacactagagactcaaagtggggagggtaagaggggggcaaggtataaaaaaccacatattgggtacaatgtacactactcaggtgaccggtgcagtaaaatctcagacttcactactgtagaattcatctatatgaccaaaagccatttgtaccccaaaagccattgaaattaaaaaaaaaaaaatacacacacacacacacataaagaaaaaaaagaaaattataagaagttaatattgactgacctggaacgaaaaaaccaagacagtatttagtcattaacattttgctatttcatcaatgtaaataattaatttaaatggagaggagtgttcattgtaatcataggagtacatacatgtttagctactaaagaaaaagtaatcagaagcaaattcaatggacttatcagttattattattagacttatcaaagacttatcagactgatttttaaagtcctggtataataggtgctttttgcaccaacaataacaggaaaaatggaggataaggtttacaatcataagtggcaaatgtggccttcccaatgatactaagagttcatgatcattataaaggtcaatatgagaatttcacatggttagtggtcaaagaggaaaaatgcagagagaaactgtggtaaaatagaaaattataaaaaccattcgatccagcaatcccactactgggtatctacgcaaaggagagtaaatcattatactaaaaagacacctgatcacagcacaattcagaattgcaaagatatggaaccaacctacatgcccatcaactgatgagtggataaagaaaggtgagtacagaaatatagactaagacaactaaaataccttaaaagtaccttataacgttggatttggcaaggatttcttggatatgacaccaaaagcacagaccacaaaagtaaaaacagataaattagactatttcaaaactaaaaacttctatacatcaaagaacacaatcaacaaagtgaaaaagtaaccttatggaataagagaagatatttgcaaatcatatatctgataggggattaatatccagaatatagaaagaaactcctacaagtcaacaacaacgataactctaataacccaatttttaaaatagtcaaaggacttgaatagacatttttccaaagacaacatacaaatgaccagtaagcatatgaaaagatgctcagcatcactcctcattagggaaatgcaaatcaaaaccacaatgaaatgtcacctcacacccactatgatggctgcaatctaaaaaaagcagaaaataacaagtgttggggaggatgtgggaacctcggaacccttgtgcactcttggtgagaacgtaaaatggtgcagttgctatgaaaaactacagtggttcctcaataaattaaaaatagaaatatcgtaagatttagtaataccacttctggctatatactcaaaagaactgaaggtaggatctcaaaaagatgtgtgtacattacagcattatacttgtaaatacaataatatagatatttgtacatagcaccattatttacaatagccaaaagcaacccaagtgtccactaatggatgaatggataaaaaaaagatataaaataagaatattatttggatcttttaaaaaggaaggaaattctgacatatgctacaacatagacgcatctcgaggacactgtgctcagagaaataagccagtcacagacagacaaatacttcatgatttaactgatatgaagtgcttggaatagtcaaactcacagaaacagaaagtagaatggggttgctgaggctggagggaatggaatgtttaatgttatttaatgggtacagagtttgttttgcaagatgaaaaagttctggagattggttgtacaacaatggcgacatacttaacactactgaatgtatacttaaaaatgattcagatagtcaacttctattatatgtatttcaccacaaaaatttcttaaagtagcaagaaataaataaaattgtaaaaacctgatgttagtggctatgtagggaaatggatatcatatactcacaacaggaagtgtagctttctggagtcatttgagtctgtgaagagagttataaaaccataagtgctcactgccgaggcaatgccactccaggggatacatgtgtacactaaatttacagagatgctcacagctgcacgatttaaagtagtcaaaacagtttaacagctcaagagatgggctacatatcctttagtataagcacaatggcataaaatcatgcaatcattcattcatgatcttttttgagcacgaacaagcagatgaaagttatgctttccacagaaaaatacaatttcagagcatttatagacttctagaaacccatccatgggacttcctttgggaaggttaagaatcctgagaaaaagcctcttcaaatgtgtttgtgaactctgccggtacagggaaatactactggaaacaaaattaagtgtagaaacagaccagaccagaatatacatgctgattcccgttacatgaaaggtccagcgccaggcgggcaggcagccagccacagaaaagggagaggggcccaggaggaagtggctagacctgacgctaggcaccaggggaggcggggaaggagggcagaggcaggagagttcactgtgagagctcaacaaggagtagctgctgccaaacatctacattcatttacccgcatttcacagacacaggcttggggaggttaagtaacttgctcccagacataaagttgccaagtagtccagtcaggattcgaaccagctccagtgccctattaggtccaaatccactcagatggggaaatggagagtcagggacaagcaacaaccaggggcccattcaggaaacatcagcctgccctcaaggtcttctgaattgaaccctgccactgtgataaccaccctcacaggacagggctctctggccacaggaggtgggttctgagagcaccatgcccctcctcacacaaacacagattccacaacacacaccacggggaagaaggtttaaatgtaaaaaacgaaaccatacaagttccataagaaagtatggattaatatttatgtactcttggggtggaaaagatctacacataacaagttcagaaaccacagtgataaactaacctaagaaaatcgtttaacttttatctacctgaaacacaaaattaaaaggcaacctataaactggaaaaaaatatttgcatcaaatataacaaaagattatcaatatccttaagatgtaaatggcttttgcaaaacaatcaatagaaaaatgactaggaattagaaaatcatacacacacacacacacacacacacgcacacacacacacaccacaaatggccaattgacacatggtagagatgttcagtcaccagcagacaaagcaatgctcacatccacagggaaagcagactcgatccgtcggaggagcaaaggttttcaatgtgataaagccggttctgaggaagaggggaaggcatcaggtttgcctcaccagtgagaacactaattgaaaaaatccctccctgctgggcagtttagcaatatgaacctgaagtcttaagagtttaacagtcatttccttctcgaaatgtatgtattcagcattcccaaagagataacaacagacgtgaaaaagtctgagctacaaggaaagtcatcgcaagtattattttctaagaggaaaaaaaaactagaaaataccctgtatgcccattgaaacaagattgtttaaattgatacagccatgcaagggaacatcctgtcatcattaaaaaaggtgttcactatatattaaagtcacaaaatagaatttatggcataatcccatttttgtttaaaaatgtacttatcccatgcatacaaaagaaatcttccaaaagcaaatgtgcccataacaattgttactggtaagattactgaggacttttaaaaaaaatttccttatttgcaaactttacagtaaactttttttttttacatattagaactcaatgaagaattatttaaaagagaggaaaggcagtgcagggctggaggtcctggagggtggcggcgggtcgtcctaactagcaggctgaaaggtgctggaggggatgccttcactcagaggaagttcacagccacctgccttggaacatgtacctgttcatcttttcgtaatgttagtattcattttgctatcttcctgttgccatttccaaacagtgtcagtatgtttttgttaaatacgaacatttaaaacatatcgtatctgtaagcctatttgggtgtcttcatttcatgcccgcactgcaccataatgagtaccacacaaagccagaggatgacacttcctccagaggtctcactgcacatggagaggttagccctggcattaagggtccttggaatctctcagcagtcatagtcagtcagatgcaccaagggcagctgagtcaatctcctttttgtaacaacaggccgttcctgcggttctcagtgctgccaacctgggcatactgaagagcctcaaccaatactggctctcagggtactttcctttttaaaagaagttcaacttttgctattcttatgccccataacttttaatttgcacaagatcagccatgcccactcactgaattctattatattacccacacctctggaaattcacaaagtctgaattcagatctatgcataaggatgcaaacggattagcaataattgctggcactgccatcaacacctcctgtcgatctcacctgatctgaggataaatgaaggcaaagaatgtggccccagcccctggattggagtggaggcaaggagggtggcgagctgtcttcagcagtcggcctcacctctctgctcctgtatcaacaagtgccatttcatccccacttccaatccccaacatttataccccgtgaatcaattcttcttcagcatgccagttgctggagacagcaccatttacatacaggcatctatagcagttatcttccagggtggaagcaagagttttgtaatcataaaaaacaggatgagaaacaaggagttctgaaaagaagagaaggcggttatagaggtgctggggtaaaaagcaaagcaaaggggtaagataggaaaggaggcctggattgtttctggggcatccagggaaaggagttgcaagcagaaagaggaccctggattctgcacacagcagtgccccatcttggagatgccatgagcacagacagaaggtttactaggtgggcggcacagtgacttctccccagcactccacccgtttgtcagtagtgtacacgtggaggggtcaccaagatataacggcacaggcaaataagacacagttgcaaggacggcaaccagccctgcagctcatgggaaggaaagaatccttcaggtcatgatcccccaccatttgtgttggtccccctggctagtcccagttcagcccttatctccccttctcaggcaaacaggcccaggtgagtagaacaagcctcccttgctgctccctttgaaacaagcaccttccttctcagcacagaggctggcagtggcttccattctacgcccaaagtttgtctcctgtaagcaaaaccttacaccccaagaggtaacacagaacagcagtgcaaggacagaacagtcccacccaggagacagaggcagtttgcaagccaagatgtatcctccagattccacgtgatcctgctcacacctttgcacagcctctgcttgcttactgtagcacgcacacagggaagcccagacgttttagtcactcaccaaaaggaaaaaaacaaggcaaattctttagtgaggtaagaattacgcatacacttagacccaaatcccaggcacattccagcctcccaaagactatggaatatgcatattatgtgtccatttctgtttttattcaggctttcccctaaccaaacaaaaataagtaccacttagaactctaaccaggtaatgttttaaaatattatggcaaagtactccccacctacacacccaccttcattggcttgagtggtttcatcacatttcaaaccaatgattaccaactctcaacagagagcagatcccatccccactcagcagtctgcagaccacttgggataataccagttctatctgtggttaccatgctctcctacatggccttaattacttggagctagcaaatctagacctaaatctacaatatgaagatacatccaaagtcgttatgaaggcaatgtgataggggtcgagaaatgtaacatagcaatacaacaattctaatgagtttagaactcaaactttatttgtgctgtaaaggggaagaaaagtgattagtaattatgtacatgacgtaacagaattagttcttaccatacagagcaacataccagtactttcaaccatctacttttacagtttcaatttcacaacagcatacccgagactacttccccatacatgcgtgactaatacactctaaatcccaacgacagtaattgtttgcatcatccccaagtcattggttaagaactgaactaccatgtcaacatatttttaaacatttaaaaaatggaacccagaagacagaaagatcccaacgataaaaataaccatgatttttaaaatttcaagtgaaacttaaagggaagaaggaaatgataaaaagccattggtattactttaccaattcaatagacgcagctcagaaccaagcagggttttcagatcacacatgtagtaaaggcacctcgcccactctctccccacaatccccatccccttccctttttaggtcttgttttccaaactgattttaggtgatagtttcccctctagtcttggctcatttaaaaagcacaaacattcaaattaaaaatacaataaattattcattctaaccttagcaaaggtacatggattctgtctaccaaatattaattttacagtgaccacaaaaggttatttggttgttacaaagactacaatttgaagatactagataggcaaaaattttgccattattaatatcgaccaaacacagaaaagacaacagatgtgtttctaaggcacgatttacatactaaattcccttgaaattcaatgcaatttcacttcgctcatgattttcaatcacaagacacctgtgacaaatgaggaacaaatccagaagagcccatctaatctcgtcttaagtggtcccttaaatacgttaaaagcccacaatataggcatttacaaggcttttctaagacttccagctcctgaaaaaatcacaccttcacagtttcaaatcaaccacctaagttgctaaggggcagcgaaggatgctgatctgctgcgtatgcaagtctgacgcccatctttcaagtgactaattcacttgataacacccacaccccaaacaaaacaaccctctgaaacaggctgtcttggccaccaggaggaagctggtaaagacatttcccctgcctgtgagatggcatcacacacccctccctttggttctcggaaaactggtgactctgtgtcacctgttttcagttaacacttcttcagtcttccccaccttgtagcaaagcaaaacaatttttgtttgttagtttgtctgtttgcacttaaagttctaagcactttggaaagtttctaagcaacttctcacttccaagcaacaacttaaccaacactaacaacttactattattaattagtattttcttggctcacccacgcactaaattccccaaagccccagagaattcccttcaacctggatttcctaccacccccaccacccacactgtatctctaaccaaccctctccccttcttcaccctcatccctcccagtaccagtgccaagctgcatacccccatcccccacactgcaacgcccacgggaccggtgccaagctgtccccttctccccgtcccccacaactcccacctcagggtcctcttactagaatgccaagaaactcttatgaaatctaacgaa

SEQ ID NO: 772 - DNA, 1725 bp, Homo sapiens
atgggtaacaacttctccagtatcccctcgctgccccgaggaaacccgagccgcgcgccgcggggccacccccagaacctcaaagactctatcgggggccccttccccgtcacttctcaccgatgccaccacaagcagaagcactgtccggcagtgctgcccagcggggggctcccagccacgccgctgctcttccacccgcacaccaagggctcccagatcctcatggacctcagccacaaggctgtcaagaggcaggccagcttctgcaacgccatcaccttcagcaaccgcccggtcctcatctacgagcaagtcaggctgaagatcaccaagaagcagtgctgctggagcggggccctgcggctgggcttcaccagcaaggacccgtcccgcatccaccctgactcgctgcccaagtacgcctgccccgacctggtgtcccagagtggcttctgggccaaggcgctgcctgaggagtttgccaatgagggcaacatcatcgcattctgggtggacaagaagggccgtgtcttccaccgcatcaacgactcggctgttatgctgttcttcagcggggtccgcacggccgacccgctctgggccctggtggacgtctacggcctcacgcggggcgtccagctgcttgatagcgagctggtgctcccggactgtctgcggccgcgctccttcaccgccctgcggcggccgtcgctgcggcgcgaggcggacgacgcgcgcctctcggtgagcctatgcgacctcaacgtgccgggcgcggacggcgacgaggccgcgccggccgccggctgccccatcccgcagaactcactcaactcgcagcacagccgcgcgctgccggcgcagctcgacggcgacctgcgtttccacgccctgcgcgccggcgcgcacgtccgcatcctcgacgagcagacggtggcgcgcgtggagcacgggcgcgacgagcgcgcgctcgtcttcaccagccggcccgtgcgcgtggccgagaccatcttcgtcaaggtcacgcgctcgggtggcgcgcggcccggcgcgctgtcgttcggcgtcaccacgtgcgaccccggcacgctgcggccggccgacctgcctttcagccctgaggccctggtggaccgcaaggaattctgggccgtgtgccgcgtgcccgggcccctgcacagcggcgacatcctgggcctggtggtcaacgccgacggcgagctgcacctcagccacaatggcgcggccgccggcatgcagctgtgcgtggacgcctcgcagccgctttggatgctcttcggcctgcacgggaccatcacgcagatccgcatcctcggctccactatcctggccgagcggggtatcccgtcactcccctgctcccctgcctccacgccaacctcgcccagtgccctgggcagccgcctgtctgaccccttgctcagcacgtgcagctctggccctctgggtagctctgctggtgggacagcccccaattcgccagtgagcctgcccgagtcgccagtgaccccaggtctgggccagtggagcgatgagtgcaccatttgctatgaacacgcggtggacacggtcatctacacatgtggccacatgtgcctctgctacgcctgtggcctgcgcctcaagaaggctctgcacgcctgctgccccatctgccgccgccccatcaaggacatcatcaagacctaccgcagctcctag

SEQ ID NO: 773 - DNA, 351 bp, Homo sapiens
atggattactacagaaaatatgcagctatctttctggtcacattgtcggtgtttctgcatgttctccattccgctcctgatgtgcaggattgcccagaatgcacgctacaggaaaacccattcttctcccagccgggtgccccaatacttcagtgcatgggctgctgcttctctagagcatatcccactccactaaggtccaagaagacgatgttggtccaaaagaacgtcacctcagagtccacttgctgtgtagctaaatcatataacagggtcacagtaatggggggtttcaaagtggagaaccacacggcgtgccactgcagtacttgttattatcacaaatcttaa

SEQ ID NO: 774 - DNA, 1185 bp, Homo sapiens
atgggctgcctcgggaacagtaagaccgaggaccagcgcaacgaggagaaggcgcagcgtgaggccaacaaaaagatcgagaagcagctgcagaaggacaagcaggtctaccgggccacgcaccgcctgctgctgctgggtgctggagaatctggtaaaagcaccattgtgaagcagatgaggatcctgcatgttaatgggtttaatggagagggcggcgaagaggacccgcaggctgcaaggagcaacagcgatggtgagaaggcaaccaaagtgcaggacatcaaaaacaacctgaaagaggcgattgaaaccattgtggccgccatgagcaacctggtgccccccgtggagctggccaaccccgagaaccagttcagagtggactacatcctgagtgtgatgaacgtgcctgactttgacttccctcccgaattctatgagcatgccaaggctctgtgggaggatgaaggagtgcgtgcctgctacgaacgctccaacgagtaccagctgattgactgtgcccagtacttcctggacaagatcgacgtgatcaagcaggctgactatgtgccgagcgatcaggacctgcttcgctgccgtgtcctgacttctggaatctttgagaccaagttccaggtggacaaagtcaacttccacatgtttgacgtgggtggccagcgcgatgaacgccgcaagtggatccagtgcttcaacgatgtgactgccatcatcttcgtggtggccagcagcagctacaacatggtcatccgggaggacaaccagaccaaccgcctgcaggaggctctgaacctcttcaagagcatctggaacaacagatggctgcgcaccatctctgtgatcctgttcctcaacaagcaagatctgctcgctgagaaagtccttgctgggaaatcgaagattgaggactactttccagaatttgctcgctacactactcctgaggatgctactcccgagcccggagaggacccacgcgtgacccgggccaagtacttcattcgagatgagtttctgaggatcagcactgccagtggagatgggcgtcactactgctaccctcatttcacctgcgctgtggacactgagaacatccgccgtgtgttcaacgactgccgtgacatcattcagcgcatgcaccttcgtcagtacgagctgctctaa

SEQ ID NO: 775 - DNA, 963 bp, Homo sapiens
atgtctaagtcagagtctcctaaagagcccgaacagctgaggaagctcttcattggagggttgagctttgaaacaactgatgagagcctgaggagccattttgagcaatggggaacgctcacggactgtgtggtaatgagagatccaaacaccaagcgctctaggggctttgggtttgtcacatatgccactgtggaggaggtggatgcagctatgaatgcaaggccacacaaggtggatggaagagttgtggaaccaaagagagctgtctccagagaagattctcaaagaccaggtgcccacttaactgtgaaaaagatatttgttggtggcattaaagaagacactgaagaacatcacctaagagattattttgaacagtatggaaaaattgaagtgattgaaatcatgactgaccgaggcagtggcaagaaaaggggctttgcctttgtaacctttgacgaccatgactccgtggataagattgtcattcagaaataccatactgtgaatggccacaactgtgaagttagaaaagccctgtcaaagcaagagatggctagtgcttcatccagccaaagaggtcgaagtggttctggaaactttggtggtggtcgtggaggtggtttcggtgggaatgacaacttcggtcgtggaggaaacttcagtggtcgtggtggctttggtggcagccgtggtggtggtggatatggtggcagtggggatggctataatggatttggcaatgatggaagcaattttggaggtggtggaagctacaatgattttgggaattacaacaatcagtcttcaaattttggacccatgaagggaggaaattttggaggcagaagctctggcccctatggcggtggaggccaatactttgcaaaaccacgaaaccaaggtggctatggcggttccagcagcagcagtagctatggcagtggcagaagattttaa

SEQ ID NO: 776 - DNA, 1026 bp, Homo sapiens
atgctgggcgccgagtggagcaagctgcagccaacggaaaagcagcggtacctggatgaggccgagagagagaagcagcagtacatgaaggagctgcgggcgtaccagcagtctgaagcctataagatgtgcacggagaagatccaggagaagaagatcaagaaagaagactcgagctctgggctcatgaacactctcctgaatggacacaagggtggggactgcgatggcttctccaccttcgatgttcccatcttcactgaagagttcttggaccaaaacaaagcgcgtgaggcggagcttcggcgcttgcggaagatgaatgtggccttcgaggagcagaacgcggtactgcagaggcaaaacgcagagcatgagcagcgcgcgcgagcgtctggagcaggagctggcgctggaggagcggaggacgctggcgctgcagcagcagctccaggccgtgcgccaggcgctcaccgccagcttcgcctcactgccggtgccgggcacgggcgaaacgcccacgctgggcactctggacttctacatggcccggcttcacggagccatcgagcgcgaccccgcccagcacgagaagctcatcgtccgcatcaaggaaatcctggcccaggtcgccagcgagcacctgtgaggagtgggcgggcccacgatgcagaggagaagctgtgggcgcggccctgccacaccccaccccgtggacgagaggctgggggtccaccctttggggcctggtcccatcctgcacctttgggggctccagcccccctaaaattaaatttctgcagcatccctttagctttcaatctccccagccccctgaacccggaaaaagcactcgctgcgcgatacacccagaagaacctcacagccgagggtgcccctcctcggaggacagccacgcgctacactggctctccgggccacccccaggacacagggcagacgaaacccacccccagcacacggcaggaccccccaaattactcactacggggggctgtgccatag

SEQ ID NO: 777 - DNA, 801 bp, Homo sapiens
atgccgaaaggaaagaaggccaagggaaagaaggtggctccggccccagctgtcgtgaagaagcaggaggctaagaaagtggtgaatcccctgtttgagaaaaggcctaagaattttggcattggacaggacatccagcccaaaagagacctcacccgctttgtgaaatggccccgctatatcaggttgcagcggcagagagccatcctctataagcggctgaaagtgcctcctgcgattaaccagttcacccaggccctggaccgccaaacagctactcagctgcttaagctggcccacaagtacagaccagagacaaagcaagagaagaagcagagactgttggcccgggccgagaagaaggctgctggcaaaggggacgtcccaacgaagagaccacctgtccttcgagcaggagttaacaccgtcaccaccttggtggagaacaagaaagctcagctggtggtgattgcacacgacgtggatcccatcgagctggttgtcttcttgcctgccctgtgtcgtaaaatgggggtcccttactgcattatcaagggaaaggcaagactgggacgtctagtccacaggaagacctgcaccactgtcgccttcacacaggtgaactcggaagacaaaggcgctttggctaagctggtggaagctatcaggaccaattacaatgacagatacgatgagatccgccgtcactggggtggcaatgtcctgggtcctaagtctgtggctcgtatcgccaagctcgaaaaggcaaaggctaaagaacttgccactaaactgggttaa

SEQ ID NO: 778 - DNA, 402 bp, Homo sapiens
atgaacgacaccgtaactatccgcactagaaagttcatgaccaaccgactacttcagaggaaacaaatggtcattgatgtccttcaccccgggaaggcgacagtgcctaagacagaaattcgggaaaaactagccaaaatgtacaagaccacaccggatgtcatctttgtatttggattcagaactcattttggtggtggcaagacaactggctttggcatgatttatgattccctggattatgcaaagaaaaatgaacccaaacatagacttgcaagacatggcctgtatgagaagaaaaagacctcaagaaagcaacgaaaggaacgcaagaacagaatgaagaaagtcagggggactgcaaaggccaatgttggtgctggcaaaaagccgaaggagtaa

SEQ ID NO: 779 - DNA, 1575 bp, Homo sapiens
atgtacgccctcttcctcctggccagcctcctgggcgcggctctagccggcccggtccttggactgaaagaatgcaccaggggctcggcagtgtggtgccagaatgtgaagacggcgtccgactgcggggcagtgaagcactgcctgcagaccgtttggaacaagccaacagtgaaatcccttccctgcgacatatgcaaagacgttgtcaccgcagctggtgatatgctgaaggacaatgccactgaggaggagatccttgtttacttggagaagacctgtgactggcttccgaaaccgaacatgtctgcttcatgcaaggagatagtggactcctacctccctgtcatcctggacatcattaaaggagaaatgagccgtcctggggaggtgtgctctgctctcaacctctgcgagtctctccagaagcacctagcagagctgaatcaccagaagcagctggagtccaataagatcccagagctggacatgactgaggtggtggcccccttcatggccaacatccctctcctcctctaccctcaggacggcccccgcagcaagccccagccaaaggataatggggacgtttgccaggactgcattcagatggtgactgacatccagactgctgtacggaccaactccacctttgtccaggccttggtggaacatgtcaaggaggagtgtgaccgcctgggccctggcatggccgacatatgcaagaactatatcagccagtattctgaaattgctatccagatgatgatgcacatgcaacccaaggagatctgtgcgctggttgggttctgtgatgaggtgaaagagatgcccatgcagactctggtccccgccaaagtggcctccaagaatgtcatccctgccctggaactggtggagcccattaagaagcacgaggtcccagcaaagtctgatgtttactgtgaggtgtgtgaattcctggtgaaggaggtgaccaagctgattgacaacaacaagactgagaaagaaatactcgacgcttttgacaaaatgtgctcgaagctgccgaagtccctgtcggaagagtgccaggaggtggtggacacgtacggcagctccatcctgtccatcctgctggaggaggtcagccctgagctggtgtgcagcatgctgcacctctgctctggcacgcggctgcctgcactgaccgttcacgtgactcagccaaaggacggtggcttctgcgaagtgtgcaagaagctggtgggttatttggatcgcaacctggagaaaaacagcaccaagcaggagatcctggctgctcttgagaaaggctgcagcttcctgccagacccttaccagaagcagtgtgatcagtttgtggcagagtacgagcccgtgctgatcgagatcctggtggaggtgatggatccttccttcgtgtgcttgaaaattggagcctgcccctcggcccataagcccttgttgggaactgagaagtgtatatggggcccaagctactggtgccagaacacagagacagcagcccagtgcaatgctgtcgagcattgcaaacgccatgtgtggaactag

SEQ ID NO: 780 - DNA, 855 bp, Homo sapiens
atggacgccatcaagaagaagatgcagatgctgaagctggacaaggagaacgccatcgaccgcgccgagcaggccgaagccgacaagaagcaagctgaggaccgctgcaagcagctggaggaggagcagcaggccctccagaagaagctgaaggggacagaggatgaggtggaaaagtattctgaatccgtgaaggaggcccaggagaaactggagcaggccgagaagaaggccactgatgctgaggcagatgtggcctccctgaaccgccgcattcagctggttgaggaggagctggaccgggcccaggagcgcctggctacagccctgcagaagctggaggaggccgagaaggcggctgatgagagcgagagaggaatgaaggtcatcgaaaaccgggccatgaaggatgaggagaagatggaactgcaggagatgcagctgaaggaggccaagcacatcgctgaggattcagaccgcaaatatgaagaggtggccaggaagctggtgatcctggaaggagagctggagcgctcggaggagagggctgaggtggccgagagccgagccagacagctggaggaggaacttcgaaccatggaccaggccctcaagtccctgatggcctcagaggaggagtattccaccaaagaagataaatatgaagaggagatcaaactgttggaggagaagctgaaggaggctgagacccgagcagagtttgccgagaggtctgtggcaaagttggagaaaaccatcgatgacctagaagagaccttggccagtgccaaggaggagaacgtcgagattcaccagaccttggaccagaccctgctggaactcaacaacctgtga

SEQ ID NO: 781 - DNA, 684 bp, Homo sapiens
atgaacatcaaaggatcgccatggaaagggtccctcctgctgctgctggtgtcaaacctgctgctgtgccagagcgtggcccccttgcccatctgtcccggcggggctgcccgatgccaggtgacccttcgagacctgtttgaccgcgccgtcgtcctgtcccactacatccataacctctcctcagaaatgttcagcgaattcgataaacggtatacccatggccgggggttcattaccaaggccatcaacagctgccacacttcttcccttgccacccccgaagacaaggagcaagcccaacagatgaatcaaaaagactttctgagcctgatagtcagcatattgcgatcctggaatgagcctctgtatcatctggtcacggaagtacgtggtatgcaagaagccccggaggctatcctatccaaagctgtagagattgaggagcaaaccaaacggcttctagagggcatggagctgatagtcagccaggttcatcctgaaaccaaagaaaatgagatctaccctgtctggtcgggacttccatccctgcagatggctgatgaagagtctcgcctttctgcttattataacctgctccactgcctacgcagggattcacataaaatcgacaattatctcaagctcctgaagtgccgaatcatccacaacaacaactgctaa

SEQ ID NO: 782 - DNA, 1881 bp, Homo sapiens
gaggcaagaattcggcacgagggagagcccgcgggcgtgggggagctcggggacctgcggaccgggggagcccgaacgagggggatcccgcggcggcgccagcgaggcggaggagcaggcggtggaggcgaggcaggaagaggagcaggacttggatggtgagaaggggccatcatcggaagggcctgaggaggaggacggagaaggcttctccttcaaatacagccccgggaagctgaggggaaaccagtacaagaagatgatgaccaaagaggagctggaggaggagcagaggattgagctgacctctgacctcacttccctgtagcaagttccttaggtcctgagccacaaatattcttgcaaatccttttgaactgaagaataacgaagttatccttagcgtcctcctaaaggcttttccttttggcatcttaaaagcttgagagataaaacggaaaccccagagaggagtctgggcaggctcccagggtgcatgctgcctccataaatctgctgagctctagaccctcaatcaggacttgtcccttggctagcaggatcctgggaacacctttggccctgccctgtgtagagatgttcatgtctgttcctgtgggtcactttgttaagctgaagagttttaagaggtagagctcagaccctggactgggatttttcttaccactcaaacttgctatccacacaccctgcacaccttagataaaaagaacattttaaaagcagagttcactttcactccagtctcccctcttttgccctcactgaagccaaaccacagaagactttgaggaatgagagacaaatgaggtagagctcacctgtgctcaccagctccgtcagggtggtcagccgacccctttccctgggaaccccacttctctctgtggctggcttggttgtcgggggtgagatgccatattgattacagggcagcaaagaaccagtaccaggaatttacttgaccattccccttatttttcatctagaggaatctcggattcagccctttcattgctaagacaccttttcactgaggttcttaccagctcagccaaatctccactctgctatagcagaagcaataatgtttgctttaaaaagatttcttgacctatgccttttcttagaaagtttgatagattagttagaacttcagatcatcagatcagtctcaaatgggtttcttggaattttatatttgacaatatttatactataccaaactcatttgcagttcttaggtttgttggttaaaacatttttttaaagcagtaagtttatagaaaatgttttcatttaatggaaggctggggaatgtccagcatcaacccctatggcatgcattcccagtggccttctcatctgggcctggaacctttggttcagggcttaggggagaacaggccacatggcaacagccacacagtcattgccttcaacacagagccacgtgtccccaaacagcaatagtcatgcccttgtccaggctgggatctaattgacacaataggtcgttgactccctcctagtagagctatctaggtttgtctggaaagtttccgaccctggcttataggcaccacacctcatgtactcctcatggcttggatctctgtattcagcctttggttccaggtcccatttagacctcttggaggtagattgatcccgagaaaacaacaaaacacataagtagtgacacacctgctgcggcgcaccatagaccccctgagaacagtgtttcgatacccatttgtgttagacacgtggggcccatatgagggaaagagaaacacggtgcacaaggggttccctatgggacacctgggactaaacaataggaacaggattccaaaa

SEQ ID NO: 783 - DNA, 5694 bp, Homo sapiens
atggtgccccttgtgcctgcactggtgatgcttggtttggtggcaggcgcccatggtgacagcaaacctgtcttcattaaagtccctgaggaccagactgggctgtcaggaggggtagcctccttcgtgtgccaagctacaggagaacccaagccgcgcatcacatggatgaagaaggggaagaaagtcagctcccagcgcttcgaggtcattgagtttgatgatggggcagggtcagtgcttcggatccagccattgcgggtgcagcgagatgaagccatctatgagtgtacagctactaacagcctgggtgagatcaacactagtgccaagctctcagtgctcgaagaggaacagctgccccctgggttcccttccatcgacatggggcctcagctgaaggtggtggagaaggcacgcacagccaccatgctatgtgccgcaggcggaaatccagaccctgagatttcttggttcaaggacttccttcctgtagaccctgccacgagcaacggccgcatcaagcagctgcgttcaggtgccttgcagatagagagcagtgaggaatccgaccaaggcaagtacgagtgtgtggcgaccaactcggcaggcacacgttactcagcccctgcgaacctgtatgtgcgagtgcgccgcgtggctcctcgtttctccatccctcccagcagccaggaggtgatgccaggcggcagcgtgaacctgacatgcgtggcagtgggtgcacccatgccctacgtgaagtggatgatgggggccgaggagctcaccaaggaggatgagatgccagttggccgcaacgtcctggagctcagcaatgtcgtacgctctgccaactacacctgtgtggccatctcctcgctgggcatgatcgaggccacagcccaggtcacagtgaaagctcttccaaagcctccgattgatcttgtggtgacagagacaactgccaccagtgtcaccctcacctgggactctgggaactcggagcctgtaacctactatggcatccagtaccgcgcagcgggcacggagggcccctttcaggaggtggatggtgtggccaccacccgctacagcattggcggcctcagccctttctcggaatatgccttccgcgtgctggcggtgaacagcatcgggcgagggccgcccagcgaggcagtgcgggcacgcacgggagaacaggcgccctccagcccaccgcgccgcgtgcaggcacgcatgctgagcgccagcaccatgctggtgcagtgggagcctcccgaggagcccaacggcctggtgcggggataccgcgtctactatactccggactcccgccgccccccgaacgcctggcacaagcacaacaccgacgcggggctcctcacgaccgtgggcagcctgctgcctggcatcacctacagcctgcgcgtgcttgccttcaccgccgtgggcgatggccctcccagccccaccatccaggtcaagacgcagcagggagtgcctgcccagcccgcggacttccaggccgaggtggagtcggacaccaggatccagctctcgtggctgctgccccctcaggagcggatcatcatgtatgaactggtgtactgggcggcagaggacgaagaccaacagcacaaggtcaccttcgacccaacctcctcctacacactagaggacctgaagcctgacacactctaccgcttccagctggctgcacgctcggatatgggggtgggcgtcttcacccccaccattgaggcccgcacagcccagtccaccccctccgcccctccccagaaggtgatgtgtgtgagcatgggctccaccacggtccgggtaagttgggtcccgccgcctgccgacagccgcaacggcgttatcacccagtactccgtggcccacgaggcggtggacggcgaggaccgcgggcggcatgtggtggatggcatcagccgtgagcactccagctgggacctggtgggcctggagaagtggacggagtaccgggtgtgggtgcgggcacacacagacgtgggccccggccccgagagcagcccggtgctggtgcgcaccgatgaggacgtgcccagcgggcctccgcggaaggtggaggtggagccactgaactccactgctgtgcatgtctactggaagctgcctgtccccagcaagcagcatggccagatccgcggctaccaggtcacctacgtgcggctggagaatggcgagccccgtggactccccatcatccaagacgtcatgctagccgaggcccagtggcggccagaggagtccgaggactatgaaaccactatcagcggcctgaccccggagaccacctactccgttactgttgctgcctataccaccaagggggatggtgcccgcagcaagcccaaaattgtcactacaacaggtgcagtcccaggccggcccaccatgatgatcagcaccacggccatgaacactgcgctgctccagtggcacccacccaaggaactgcctggcgagctgctgggctaccggctgcagtactgccgggccgacgaggcgcggcccaacaccatagatttcggcaaggatgaccagcacttcacagtcaccggcctgcacaaggggaccacctacatcttccggcttgctgccaagaaccgggctggcttgggtgaggagttcgagaaggagatcaggacccccgaggacctgcccagcggcttcccccaaaacctgcatgtgacaggactgaccacgtctaccacagaactggcctgggacccgccagtgctggcggagaggaacgggcgcatcatcagctacaccgtggtgttccgagacatcaacagccaacaggagctgcagaacatcacgacagacacccgctttacccttactggcctcaagccagacaccacttacgacatcaaggtccgcgcatggaccagcaaaggctctggcccactcagccccagcatccagtcccggaccatgccggtggagcaagtgtttgccaagaacttccgggtggcggctgcaatgaagacgtctgtgctgctcagctgggaggttcccgactcctataagtcagctgtgccctttaagattctgtacaatgggcagagtgtggaggtggacgggcactcgatgcggaagctgatcgcagacctgcagcccaacacagagtactcgtttgtgctgatgaaccgtggcagcagcgcagggggcctgcagcacctggtgtccatccgcacagcccccgacctcctgcctcacaagccgctgcctgcctctgcctacatagaggacggccgcttcgatctctccatgccccatgtgcaagacccctcgcttgtcaggtggttctacattgttgtggtacccattgaccgtgtgggcgggagcatgctgacgccaaggtggagcacacccgaggaactggagctggacgagcttctagaagccatcgagcaaggcggagaggagcagcggcggcggcggcggcaggcagaacgtctgaagccatatgtggctgctcaactggatgtgctcccggagacctttaccttgggggacaagaagaactaccggggcttctacaaccggcccctgtctccggacttgagctaccagtgctttgtgcttgcctccttgaaggaacccatggaccagaagcgctatgcctccagcccctactcggatgagatcgtggtccaggtgacaccagcccagcagcaggaggagccggagatgctgtgggtgacgggtcccgtgctggcagtcatcctcatcatcctcattgtcatcgccatcctcttgttcaaaaggaaaaggacccactctccgtcctctaaggatgagcagtcgatcggactgaaggactccttgctggcccactcctctgaccctgtggagatgcggaggctcaactaccagaccccaggtatgcgagaccacccacccatccccatcaccgacctggcggacaacatcgagcgcctcaaagccaacgatggcctcaagttctcccaggagtatgagtccatcgaccctggacagcagttcacgtgggagaattcaaacctggaggtgaacaagcccaagaaccgctatgcgaatgtcatcgcctacgaccactctcgagtcatccttacctctatcgatggcgtccccgggagtgactacatcaatgccaactacatcgatggctaccgcaagcagaatgcctacatcgccacgcagggccccctgcccgagaccatgggcgatttctggagaatggtgtgggaacagcgcacggccactgtggtcatgatgacacggctggaggagaagtcccgggtaaaatgtgatcagtactggccagcccgtggcaccgagacctgtggccttattcaggtgaccctgttggacacagtggagctggccacatacactgtgcgcaccttcgcactccacaagagtggctccagtgagaagcgtgagctgcgtcagtttcagttcatggcctggccagaccatggagttcctgagtacccaactcccatcctggccttcctacgacgggtcaaggcctgcaaccccctagacgcagggcccatggtggtgcactgcagcgcgggcgtgggccgcaccggctgcttcatcgtgattgatgccatgttggagcggatgaagcacgagaagacggtggacatctatggccacgtgacctgcatgcgatcacagaggaactacatggtgcagacggaggaccagtacgtgttcatccatgaggcgctgctggaggctgccacgtgcggccacacagaggtgcctgcccgcaacctgtatgcccacatccagaagctgggccaagtgcctccaggggagagtgtgaccgccatggagctcgagttcaagttgctggccagctccaaggcccacacgtcccgcttcatcagcgccaacctgccctgcaacaagttcaagaaccggctggtgaacatcatgccctacgaattgacccgtgtgtgtctgcagcccatccgtggtgtggagggctctgactacatcaatgccagcttcctggatggttatagacagcagaaggcctacatagctacacaggggcctctggcagagagcaccgaggacttctggcgcatgctatgggagcacaattccaccatcatcgtcatgctgaccaagcttcgggagatgggcagggagaaatgccaccagtactggccagcagagcgctctgctcgctaccagtactttgttgttgacccgatggctgagtacaacatgccccagtatatcctgcgtgagttcaaggtcacggatgcccgggatgggcagtcaaggacaatccggcagttccagttcacagactggccagagcagggcgtgcccaagacaggcgagggattcattgacttcatcgggcaggtgcataagaccaaggagcagtttggacaggatgggcctatcacggtgcactgcagtgctggcgtgggccgcaccggggtgttcatcactctgagcatcgtcctggagcgcatgcgctatgagggcgtggtcgacatgtttcagaccgtgaagaccctgcgtacacagcgtcctgccatggtgcagacagaggaccagtatcagctgtgctaccgtgcggccctggagtacctcggcagctttgaccactatgcaacgtaa

SEQ ID NO: 784 - DNA, 1662 bp, Homo sapiens
atgctgtccgtgcgcgttgctgcggccgtggtccgcgcccttcctcggcgggccggactggtctccagaaatgctttgggttcatctttcattgctgcaaggaacttccatgcctctaacactcatcttcaaaagactgggactgctgagatgtcctctattcttgaagagcgtattcttggagctgatacctctgttgatcttgaagaaactgggcgtgtcttaagtattggtgatggtattgcccgcgtacatgggctgaggaatgttcaagcagaagaaatggtagagttttcttcaggcttaaagggtatgtccttgaacttggaacctgacaatgttggtgttgtcgtgtttggaaatgataaactaattaaggaaggagatatagtgaagaggacaggagccattgtggacgttccagttggtgaggagctgttgggtcgtgtagttgatgcccttggtaatgctattgatggaaagggtccaattggttccaagacgcgtaggcgagttggtctgaaagcccccggtatcattcctcgaatttcagtgcgggaaccaatgcagactggcattaaggctgtggatagcttggtgccaattggtcgtggtcagcgtgaactgattattggtgaccgacagactgggaaaacctcaattgctattgacacaatcattaaccagaaacgtttcaatgatggatctgatgaaaagaagaagctgtactgtatttatgttgctattggtcaaaagagatccactgttgcccagttggtgaagagacttacagatgcagatgccatgaagtacaccattgtggtgtcggctacggcctcggatgctgccccacttcagtacctggctccttactctggctgttccatgggagagtattttagagacaatggcaaacatgctttgatcatctatgacgacttatccaaacaggctgttgcttaccgtcagatgtctctgttgctccgccgaccccctggtcgtgaggcctatcctggtgatgtgttctacctacactcccggttgctggagagagcagccaaaatgaacgatgcttttggtggtggctccttgactgctttgccagtcatagaaacacaggctggtgatgtgtctgcttacattccaacaaatgtcatttccatcactgacggacagatcttcttggaaacagaattgttctacaaaggtatccgccctgcaattaacgttggtctgtctgtatctcgtgtcggatccgctgcccaaaccagggctatgaagcaggtagcaggtaccatgaagctggaattggctcagtatcgtgaggttgctgcttttgcccagttcggttctgacctcgatgctgccactcaacaacttttgagtcgtggcgtgcgtctaactgagttgctgaagcaaggacagtattctcccatggctattgaagaacaagtggctgttatctatgcgggtgtaaggggatatcttgataaactggagcccagcaagattacaaagtttgagaatgctttcttgtctcatgtcgtcagccagcaccaagccttgttgggcactatcagggctgatggaaagatctcagaacaatcagatgcaaagctgaaagagattgtaacaaatttcttggctggatttgaagcttaa

SEQ ID NO: 785 - DNA, 345 bp, Homo sapiens
atgacttgcaaaatgtcgcagctggaacgcaacatagagaccatcatcaacaccttccaccaatactctgtgaagctggggcacccagacaccctgaaccagggggaattcaaagagctggtgcgaaaagatctgcaaaattttctcaagaaggagaataagaatgaaaaggtcatagaacacatcatggaggacctggacacaaatgcagacaagcagctgagcttcgaggagttcatcatgctgatggcgaggctaacctgggcctcccacgagaagatgcacgagggtgacgagggccctggccaccaccataagccaggcctcggggagggcaccccctaa

SEQ ID NO: 786 - DNA, 369 bp, Homo sapiens
atggaggcctctgctctcacctcatcagcagtgaccagtgtggccaaagtggtcagggtggcctctggctctgccgtagttttgcccctggccaggattgctacagttgtgattggaggagttgtggccatggcggctgtgcccatggtgctcagtgccatgggcttcactgcggcgggaatcgcctcgtcctccatagcagccaagatgatgtccgcggcggccattgccaatgggggtggagttgcctcgggcagccttgtgggtactctgcagtcactgggagcaactggactctccggattgaccaagttcatcctgggctccattgggtctgccattgcggctgtcattgcgaggttctactag

SEQ ID NO: 787 - DNA, 1254 bp, Homo sapiens
atgtcgctttctaacaagctgacgctggacaagctggacgttaaagggaagcgggtcgttatgagagtcgacttcaatgttcctatgaagaacaaccagataacaaacaaccagaggattaaggctgctgtcccaagcatcaaattctgcttggacaatggagccaagtcggtagtccttatgagccacctaggccggcctgatggtgtgcccatgcctgacaagtactccttagagccagttgctgtagaactcaaatctctgctgggcaaggatgttctgttcttgaaggactgtgtaggcccagaagtggagaaagcctgtgccaacccagctgctgggtctgtcatcctgctggagaacctccgctttcatgtggaggaagaagggaagggaaaagatgcttctgggaacaaggttaaagccgagccagccaaaatagaagctttccgagcttcactttccaagctaggggatgtctatgtcaatgatgcttttggcactgctcacagagcccacagctccatggtaggagtcaatctgccacagaaggctggtgggtttttgatgaagaaggagctgaactactttgcaaaggccttggagagcccagagcgacccttcctggccatcctgggcggagctaaagttgcagacaagatccagctcatcaataatatgctggacaaagtcaatgagatgattattggtggtggaatggcttttaccttccttaaggtgctcaacaacatggagattggcacttctctgtttgatgaagagggagccaagattgtcaaagacctaatgtccaaagctgagaagaatggtgtgaagattaccttgcctgttgactttgtcactgctgacaagtttgatgagaatgccaagactggccaagccactgtggcttctggcatacctgctggctggatgggcttggactgtggtcctgaaagcagcaagaagtatgctgaggctgtcactcgggctaagcagattgtgtggaatggtcctgtgggggtatttgaatgggaagcttttgcccggggaaccaaagctctcatggatgaggtggtgaaagccacttctaggggctgcatcaccatcataggtggtggagacactgccacttgctgtgccaaatggaacacggaggataaagtcagccatgtgagcactgggggtggtgccagtttggagctcctggaaggtaaagtccttcctggggtggatgctctcagcaatatttag

SEQ ID NO: 788 - DNA, 6243 bp, Homo sapiens
atgctgagggtcttcatcctctatgccgagaacgtccacacacccgacaccgacatcagcgatgcctactgctccgcggtgtttgcaggggtgaagaagagaaccaaagtcatcaagaacagcgtgaaccctgtatggaatgagggatttgaatgggacctcaagggcatccccctggaccagggctctgagcttcatgtggtggtcaaagaccatgagacgatggggaggaacaggttcctgggggaagccaaggtcccactccgagaggtcctcgccacccctagtctgtccgccagcttcaatgcccccctgctggacaccaagaagcagcccacaggggcctcgctggtcctgcaggtgtcctacacaccgctgcctggagctgtgcccctgttcccgccccctactcctctggagccctccccgactctgcctgacctggatgtagtggcagacacaggaggagaggaagacacagaggaccagggactcactggagatgaggcggagccattcctggatcaaagcggaggcccgggggctcccaccaccccaaggaaactaccttcacgtcctccgccccactaccccgggatcaaaagaaagcgaagtgcgcctacatctagaaagctgctgtcagacaaaccgcaggatttccagatcagggtccaggtgatcgaggggcgccagctgccgggggtgaacatcaagcctgtggtcaaggttaccgctgcagggcagaccaagcggacgcggatccacaagggaaacagcccactcttcaatgagactcttttcttcaacttgtttgactctcctggggagctgtttgatgagcccatctttatcacggtggtagactctcgttctctcaggacagatgctctcctcggggagttccggatggacgtgggcaccatttacagagagccccggcacgcctatctcaggaagtggctgctgctctcagaccctgatgacttctctgctggggccagaggctacctgaaaacaagcctttgtgtgctggggcctggggacgaagcgcctctggagagaaaagacccctctgaagacaaggaggacattgaaagcaacctgctccggcccacaggcgtagccctgcgaggagcccacttctgcctgaaggtcttccgggccgaggacttgccgcagatggacgatgccgtgatggacaacgtgaaacagatctttggcttcgagagtaacaagaagaacttggtggacccctttgtggaggtcagctttgcggggaaaatgctgtgcagcaagatcttggagaagacggccaaccctcagtggaaccagaacatcacactgcctgccatgtttccctccatgtgcgaaaaaatgaggattcgtatcatagactgggaccgcctgactcacaatgacatcgtggctaccacctacctgagtatgtcgaaaatctctgcccctggaggagaaatagaagaggagcctgcaggtgctgtcaagccttcgaaagcctcagacttggatgactacctgggcttcctccccacttttgggccctgctacatcaacctctatggcagtcccagagagttcacaggcttcccagacccctacacagagctcaacacaggcaagggggaaggtgtggcttatcgtggccggcttctgctctccctggagaccaagctggtggagcacagtgaacagaaggtggaggaccttcctgcggatgacatcctccgggtggagaagtaccttaggaggcgcaagtactccctgtttgcggccttctactcagccaccatgctgcaggatgtggatgatgccatccagtttgaggtcagcatcgggaactacgggaacaagttcgacatgacctgcctgccgctggcctccaccactcagtacagccgtgcagtctttgacgggtgccactactactacctaccctggggtaacgtgaaacctgtggtggtgctgtcatcctactgggaggacatcagccatagaatcgagactcagaaccagctgcttgggattgctgaccggctggaagctggcctggagcaggtccacctggccctgaaggcgcagtgctccacggaggacgtggactcgctggtggctcagctgacggatgagctcatcgcaggctgcagccagcctctgggtgacatccatgagacaccctctgccacccacctggaccagtacctgtaccagctgcgcacccatcacctgagccaaatcactgaggctgccctggccctgaagctcggccacagtgagctccctgcagctctggagcaggcggaggactggctcctgcgtctgcgtgccctggcagaggagccccagaacagcctgccggacatcgtcatctggatgctgcagggagacaagcgtgtggcataccagcgggtgcccgcccaccaagtcctcttctcccggcggggtgccaactactgtggcaagaattgtgggaagctacagacaatctttctgaaatatccgatggagaaggtgcctggcgcccggatgccagtgcagatacgggtcaagctgtggtttgggctctctgtggatgagaaggagttcaaccagtttgctgaggggaagctgtctgtctttgctgaaacctatgagaacgagactaagttggcccttgttgggaactggggcacaacgggcctcacctaccccaagttttctgacgtcacgggcaagatcaagctacccaaggacagcttccgcccctcggccggctggacctgggctggagattggttcgtgtgtccggagaagactctgctccatgacatggacgccggtcacctgagcttcgtggaagaggtgtttgagaaccagacccggcttcccggaggccagtggatctacatgagtgacaactacaccgatgtgaacggggagaaggtgcttcccaaggatgacattgagtgcccactgggctggaagtgggaagatgaggaatggtccacagacctcaaccgggctgtcgatgagcaaggctgggagtatagcatcaccatccccccggagcggaagccgaagcactgggtccctgctgagaagatgtactacacacaccgacggcggcgctgggtgcgcctgcgcaggagggatctcagccaaatggaagcactgaaaaggcacaggcaggcggaggcggagggcgagggctgggagtacgcctctctttttggctggaagttccacctcgagtaccgcaagacagatgccttccgccgccgccgctggcgccgtcgcatggagccactggagaagacggggcctgcagctgtgtttgcccttgagggggccctgggcggcgtgatggatgacaagagtgaagattccatgtccgtctccaccttgagcttcggtgtgaacagacccacgatttcctgcatattcgactatgggaaccgctaccatctacgctgctacatgtaccaggcccgggacctggctgcgatggacaaggactctttttctgatccctatgccatcgtctccttcctgcaccagagccagaagacggtggtggtgaagaacacccttaaccccacctgggaccagacgctcatcttctacgagatcgagatctttggcgagccggccacagttgctgagcaaccgcccagcattgtggtggagctgtacgaccatgacacttatggtgcagacgagtttatgggtcgctgcatctgtcaaccgagtctggaacggatgccacggctggcctggttcccactgacgaggggcagccagccgtcgggggagctgctggcctcttttgagctcatccagagagagaagccggccatccaccatattcctggttttgaggtgcaggagacatcaaggatcctggatgagtctgaggacacagacctgccctacccaccaccccagagggaggccaacatctacatggttcctcagaacatcaagccagcgctccagcgtaccgccatcgagatcctggcatggggcctgcggaacatgaagagttaccagctggccaacatctcctcccccagcctcgtggtagagtgtgggggccagacggtgcagtcctgtgtcatcaggaacctccggaagaaccccaactttgacatctgcaccctcttcatggaagtgatgctgcccagggaggagctctactgcccccccatcaccgtcaaggtcatcgataaccgccagtttggccgccggcctgtggtgggccagtgtaccatccgctccctggagagcttcctgtgtgacccctactcggcggagagtccatccccacagggtggcccagacgatgtgagcctactcagtcctggggaagacgtgctcatcgacattgatgacaaggagcccctcatccccatccaggaggaagagttcatcgattggtggagcaaattctttgcctccataggggagagggaaaagtgcggctcctacctggagaaggattttgacaccctgaaggtctatgacacacagctggagaatgtggaggcctttgagggcctgtctgacttttgtaacaccttcaagctgtaccggggcaagacgcaggaggagacagaagatccatctgtgattggtgaatttaagggcctcttcaaaatttatcccctcccagaagacccagccatccccatgcccccaagacagttccaccagctggccgcccagggaccccaggagtgcttggtccgtatctacattgtccgagcatttggcctgcagcccaaggaccccaatggaaagtgtgatccttacatcaagatctccatagggaagaaatcagtgagtgaccaggataactacatcccctgcacgctggagcccgtatttggaaagatgttcgagctgacctgcactctgcctctggagaaggacctaaagatcactctctatgactatgacctcctctccaaggacgaaaagatcggtgagacggtcgtcgacctggagaacaggctgctgtccaagtttggggctcgctgtggactcccacagacctactgtgtctctggaccgaaccagtggcgggaccagctccgcccctcccagctcctccacctcttctgccagcagcatagagtcaaggcacctgtgtaccggacagaccgtgtaatgtttcaggataaagaatattccattgaagagatagaggctggcaggatcccaaacccacacctgggcccagtggaggagcgtctggctctgcatgtgcttcagcagcagggcctggtcccggagcacgtggagtcacggcccctctacagccccctgcagccagacatcgagcaggggaagctgcagatgtgggtcgacctatttccgaaggccctggggcggcctggacctcccttcaacatcaccccacggagagccagaaggtttttcctgcgttgtattatctggaataccagagatgtgatcctggatgacctgagcctcacgggggagaagatgagcgacatttatgtgaaaggttggatgattggctttgaagaacacaagcaaaagacagacgtgcattatcgttccctgggaggtgaaggcaacttcaactggaggttcattttccccttcgactacctgccagctgagcaagtctgtaccattgccaagaaggatgccttctggaggctggacaagactgagagcaaaatcccagcacgagtggtgttccagatctgggacaatgacaagttctcctttgatgattttctgggctccctgcagctcgatctcaaccgcatgcccaagccagccaagacagccaagaagtgctccttggaccagctggatgatgctttccacccagaatggtttgtgtccctttttgagcagaaaacagtgaagggctggtggccctgtgtagcagaagagggtgagaagaaaatactggcgggcaagctggaaatgaccttggagattgtagcagagagtgagcatgaggagcggcctgctggccagggccgggatgagcccaacatgaaccctaagcttgaggacccaaggcgccccgacacctccttcctgtggtttacctccccatacaagaccatgaagttcatcctgtggcggcgtttccggtgggccatcatcctcttcatcatcctcttcatcctgctgctgttcctggccatcttcatctacgccttcccgaactatgctgccatgaagctggtgaagcccttcagctga

SEQ ID NO: 789 - DNA, 5913 bp, Homo sapiens
atgcacgggggtggccccccctcgggggacagcgcatgcccgctgcgcaccatcaagagagtccagttcggagtcctgagtccggatgaactgaagcgaatgtctgtgacggagggtggcatcaaatacccagagacgactgagggaggccgccccaagcttggggggctgatggacccgaggcagggggtgattgagcggactggccgctgccaaacatgtgcaggaaacatgacagagtgtcctggccactttggccacattgaactggccaagcctgtgtttcacgtgggcttcctggtgaagacaatgaaagttttgcgctgtgtctgcttcttctgctccaaactgcttgtggactctaacaacccaaagatcaaggatatcctggctaagtccaagggacagcccaagaagcggctcacacatgtctacgacctttgcaagggcaaaaacatatgcgagggtggggaggagatggacaacaagttcggtgtggaacaacctgagggtgacgaggatctgaccaaagaaaagggccatggtggctgtgggcggtaccagcccaggatccggcgttctggcctagagctgtatgcggaatggaagcacgttaatgaggactctcaggagaagaagatcctgctgagtccagagcgagtgcatgagatcttcaaacgcatctcagatgaggagtgttttgtgctgggcatggagccccgctatgcacggccagagtggatgattgtcacagtgctgcctgtgcccccgctctccgtgcggcctgctgttgtgatgcagggctctgcccgtaaccaggatgacctgactcacaaactggctgacatcgtgaagatcaacaatcagctgcggcgcaatgagcagaacggcgcagcggcccatgtcattgcagaggatgtgaagctcctccagttccatgtggccaccatggtggacaatgagctgcctggcttgccccgtgccatgcagaagtctgggcgtcccctcaagtccctgaagcagcggttgaagggcaaggaaggccgggtgcgagggaacctgatgggcaaaagagtggacttctcggcccgtactgtcatcacccccgaccccaacctctccattgaccaggttggcgtgccccgctccattgctgccaacatgacctttgcggagattgtcacccccttcaacattgacagacttcaagaactagtgcgcagggggaacagtcagtacccaggcgccaagtacatcatccgagacaatggtgatcgcattgacttgcgtttccaccccaagcccagtgaccttcacctgcagaccggctataaggtggaacggcacatgtgtgatggggacattgttatcttcaaccggcagccaactctgcacaaaatgtccatgatggggcatcgggtccgcattctcccatggtctacctttcgcttgaatcttagcgtgacaactccgtacaatgcagactttgacggggatgagatgaacttgcacctgccacagtctctggagacgcgagcagagatccaggagctggccatggttcctcgcatgattgtcaccccccagagcaatcggcctgtcatgggtattgtgcaggacacactcacagcagtgcgcaaattcaccaagagagacgtcttcctggagcggggtgaagtgatgaacctcctgatgttcctgtcgacgtgggatgggaaggtcccacagccggccatcctaaagccccggcccctgtggacaggcaagcaaatcttctccctcatcatacctggtcacatcaattgtatccgtacccacagcacccatcccgatgatgaagacagtggcccttacaagcacatctctcctggggacaccaaggtggtggtggagaatggggagctgatcatgggcatcctgtgtaagaagtctctgggcacgtcagctggctccctggtccacatctcctacctagagatgggtcatgacatcactcgcctcttctactccaacattcagactgtcattaacaactggctcctcatcgagggtcatactattggcattggggactccattgctgattctaagacttaccaggacattcagaacactattaagaaggccaagcaggacgtaatagaggtcatcgagaaggcacacaacaatgagctggagcccaccccagggaacactctgcggcagacgtttgagaatcaggtgaaccgcattcttaacgatgcccgagacaagactggctcctctgctcagaaatccctgtctgaatacaacaacttcaagtctatggtcgtgtccggagctaaaggttccaagattaacatctcccaggtcattgctgtcgttggacagcagaacgtcgagggcaagcggattccatttggcttcaagcaccggactctgcctcacttcatcaaggatgactacgggcctgagagccgtggctttgtggagaactcctacctagccggcctcacacccactgagttctttttccacgccatggggggtcgtgaggggctcattgacacggctgtcaagactgctgagactggatacatccagcggcggctgatcaagtccatggagtcagtgatggtgaagtacgacgcgactgtgcggaactccatcaaccaggtggtgcagctgcgctacggcgaagacggcctggcaggcgagagcgttgagttccagaacctggctacgcttaagccttccaacaaggcttttgagaagaagttccgctttgattataccaatgagagggccctgcggcgcactctgcaggaggacctggtgaaggacgtgctgagcaacgcacacatccagaacgagttggagcgggaatttgagcggatgcgggaggatcgggaggtgctcagggtcatcttcccaactggagacagcaaggtcgtcctcccctgtaacctgctgcggatgatctggaatgctcagaaaatcttccacatcaacccacgccttccctccgacctgcaccccatcaaagtggtggagggagtcaaggaattgagcaagaagctggtgattgtgaatggggatgacccactaagtcgacaggcccaggaaaatgccacgctgctcttcaacatccacctgcggtccacgttgtgttcccgccgcatggcagaggagtttcggctcagtggggaggccttcgactggctgcttggggagattgagtccaagttcaaccaagccattgcgcatcccggggaaatggtgggggctctggctgcgcagtcccttggagaacctgccacccagatgaccttgaataccttccactatgctggtgtgtctgccaagaatgtgacgctgggtgtgccccgacttaaggagctcatcaacatttccaagaagccaaagactccttcgcttactgtcttcctgttgggccagtccgctcgagatgctgagagagccaaggatattctgtgccgtctggagcatacaacgttgaggaaggtgactgccaacacagccatctactatgaccccaacccccagagcacggtggtggcagaggatcaggaatgggtgaatgtctactatgaaatgcctgactttgatgtggcccgaatctccccctggctgttgcgggtggagctggatcggaagcacatgactgaccggaagctcaccatggagcagattgctgaaaagatcaatgctggttttggtgacgacttgaactgcatctttaatgatgacaatgcagagaagctggtgctccgtattcgcatcatgaacagcgatgagaacaagatgcaagaggaggaagaggtggtggacaagatggatgatgatgtcttcctgcgctgcatcgagtccaacatgctgacagatatgaccctgcagggcatcgagcagatcagcaaggtgtacatgcacttgccacagacagacaacaagaagaagatcatcatcacggaggatggggaattcaaggccctgcaggagtggatcctggagacggacggcgtgagcttgatgcgggtgctgagtgagaaggacgtggaccccgtacgcaccacgtccaatgacattgtggagatcttcacggtgctgggcattgaagccgtgcggaaggccctggagcgggagctgtaccacgtcatctcctttgatggctcctatgtcaattaccgacacttggctctcttgtgtgataccatgacctgtcgtggccacttgatggccatcacccgacacggagtcaaccgccaggacacaggaccactcatgaagtgttcctttgaggaaacggtggacgtgcttatggaagcagccgcacacggtgagagtgaccccatgaagggggtctctgagaatatcatgctgggccagctggctccggccggcactggctgctttgacctcctgcttgatgcagagaagtgcaagtatggcatggagatccccaccaatatccccggcctgggggctgctggacccaccggcatgttctttggttcagcacccagtcccatgggtggaatctctcctgccatgacaccttggaaccagggtgcaacccctgcctatggcgcctggtcccccagtgttgggagtggaatgaccccaggggcagccggtttctctcccagtgctgcgtcagatgccagcggcttcagcccaggttactcccctgcctggtctcccacaccgggctccccggggtccccaggtccctcaagcccctacatcccttcaccaggtggcgccatgtctcccagctactcgccaacgtcacctgcctacgagccccgctctcctgggggctacacaccccagagtccctcttattcccccacttcaccctcctactcccctacctctccatcctattctccaaccagtcccaactatagtcccacatcacccagctattcgccaacgtcacccagctactcaccgacctctcccagctactcacccacctctcccagctactcgcccacctctcccagctattcgcccacctctcccagctactcacccacttcccctagctattcgcccacttcccctagctactcgccaacgtctcccagctactcgccgacatctcccagctactcgccaacttcacccagctattctcccacttctcccagctactcacctacctctccaagctattcacccacctcccccagctactcacccacttccccaagttactcacccaccagcccgaactattctccaaccagtcccaattacaccccaacatcacccagctacagcccgacatcacccagctattcccctactagtcccaactacacacctaccagccctaactacagcccaacctctccaagctactctccaacatcacccagctattccccgacctcaccaagttactccccttccagcccacgatacacaccacagtctccaacctataccccaagctcacccagctacagccccagttcgcccagctacagcccaacctcacccaagtacaccccaaccagtccttcttatagtcccagctccccagagtataccccaacctctcccaagtactcacctaccagtcccaaatattcacccacctctcccaagtactcgcctaccagtcccacctattcacccaccaccccaaaatactccccaacatctcctacttattccccaacctctccagtctacaccccaacctctcccaagtactcacctactagccccacttactcgcccacttcccccaagtactcgcccaccagccccacctactcgcccacctcccccaaaggctcaacctactctcccacttcccctggttactcgcccaccagccccacctacagtctcacaagcccggctatcagcccggatgacagtgacgaggagaactga

SEQ ID NO: 790 - DNA, 486 bp, Homo sapiens
atggctgggcgaaaacttgctctaaaaaccattgactgggtagcttttgcagagatcataccccagaaccaaaaggccattgctagttccctgaaatcctggaatgagaccctcacctccaggttggctgctttacctgagaatccaccagctatcgactgggcttactacaaggccaatgtggccaaggctggcttggtggatgactttgagaagaagtttaatgcgctgaaggttcccgtgccagaggataaatatactgcccaggtggatgccgaagaaaaagaagatgtgaaatcttgtgctgagtgggtgtctctctcaaaggccaggattgtagaatatgagaaagagatggagaagatgaagaacttaattccatttgatcagatgaccattgaggacttgaatgaagctttcccagaaaccaaattagacaagaaaaagtatccctattggcctcaccaaccaattgagaatttataa

SEQ ID NO: 791 - DNA, 2412 bp, Homo sapiens
atgagggccctgtgggtgctgggcctctgctgcgtcctgctgaccttcgggtcggtcagagctgacgatgaagttgatgtggatggtacagtagaagaggatctgggtaaaagtagagaaggatcaaggacggatgatgaagtagtacagagagaggaagaagctattcagttggatggattaaatgcatcacaaataagagaacttagagagaagtcggaaaagtttgccttccaagccgaagttaacagaatgatgaaacttatcatcaattcattgtataaaaataaagagattttcctgagagaactgatttcaaatgcttctgatgctttagataagataaggctaatatcactgactgatgaaaatgctctttctggaaatgaggaactaacagtcaaaattaagtgtgataaggagaagaacctgctgcatgtcacagacaccggtgtaggaatgaccagagaagagttggttaaaaaccttggtaccatagccaaatctgggacaagcgagtttttaaacaaaatgactgaagcacaggaagatggccagtcaacttctgaattgattggccagtttggtgtcggtttctattccgccttccttgtagcagataaggttattgtcacttcaaaacacaacaacgatacccagcacatctgggagtctgactccaatgaattttctgtaattgctgacccaagaggaaacactctaggacggggaacgacaattacccttgtcttaaaagaagaagcatctgattaccttgaattggatacaattaaaaatctcgtcaaaaaatattcacagttcataaactttcctatttatgtatggagcagcaagactgaaactgttgaggagcccatggaggaagaagaagcagccaaagaagagaaagaagaatctgatgatgaagctgcagtagaggaagaagaagaagaaaagaaaccaaagactaaaaaagttgaaaaaactgtctgggactgggaacttatgaatgatatcaaaccaatatggcagagaccatcaaaagaagtagaagaagatgaatacaaagctttctacaaatcattttcaaaggaaagtgatgaccccatggcttatattcactttactgctgaaggggaagttaccttcaaatcaattttatttgtacccacatctgctccacgtggtctgtttgacgaatatggatctaaaaagagcgattacattaagctctatgtgcgccgtgtattcatcacagacgacttccatgatatgatgcctaaatacctcaattttgtcaagggtgtggtggactcagatgatctccccttgaatgtttcccgcgagactcttcagcaacataaactgcttaaggtgattaggaagaagcttgttcgtaaaacgctggacatgatcaagaagattgctgatgataaatacaatgatactttttggaaagaatttggtaccaacatcaagcttggtgtgattgaagaccactcgaatcgaacacgtcttgctaaacttcttaggttccagtcttctcatcatccaactgacattactagcctagaccagtatgtggaaagaatgaaggaaaaacaagacaaaatctacttcatggctgggtccagcagaaaagaggctgaatcttctccatttgttgagcgacttctgaaaaagggctatgaagttatttacctcacagaacctgtggatgaatactgtattcaggcccttcccgaatttgatgggaagaggttccagaatgttgccaaggaaggagtgaagttcgatgaaagtgagaaaactaaggagagtcgtgaagcagttgagaaagaatttgagcctctgctgaattggatgaaagataaagcccttaaggacaagattgaaaaggctgtggtgtctcagcgcctgacagaatctccgtgtgctttggtggccagccagtacggatggtctggcaacatggagagaatcatgaaagcacaagcgtaccaaacgggcaaggacatctctacaaattactatgcgagtcagaagaaaacatttgaaattaatcccagacacccgctgatcagagacatgcttcgacgaattaaggaagatgaagatgataaaacagttttggatcttgctgtggttttgtttgaaacagcaacgcttcggtcagggtatcttttaccagacactaaagcatatggagatagaatagaaagaatgcttcgcctcagtttgaacattgaccctgatgcaaaggtggaagaagagcccgaagaagaacctgaagagacagcagaagacacaacagaagacacagagcaagacgaagatgaagaaatggatgtgggaacagatgaagaagaagaaacagcaaaggaatctacagctgaaaaagatgaattgtaa

SEQ ID NO: 792 - DNA, 387 bp, Homo sapiens
atgcagatctttgtgaagaccctcactggcaaaaccatcacccttgaggtcgagcccagtgacaccattgagaatgtcaaagccaaaattcaagacaaggagggtatcccacctgaccagcagcgtctgatatttgccggcaaacagctggaggatggccgcactctctcagactacaacatccagaaagagtccaccctgcacctggtgttgcgcctgcgaggtggcattattgagccttctctccgccagcttgcccagaaatacaactgcgacaagatgatctgccgcaagtgctatgctcgccttcaccctcgtgctgtcaactgccgcaagaagaagtgtggtcacaccaacaacctgcgtcccaagaagaaggtcaaataa

SEQ ID NO: 793 - DNA, 628 bp, Homo sapiens
ctctcgggttgtttccagacacggcgcgggtccccgcggcgtcttttttctttgcggggaaatcccacgcgcccctttttctcgtgccccggttgtcctcttgcgggagcaccacctatgtgtgccaccagtgttcaatctaactcccatgtgggggcccgcgggctccccacacaagggggtgttcgaaagcatgttttcgccgtgggccgcgcaggtcgcgcccacaaaacacgtttgttttcgtttgttggttgttgttttttttttttatcaatactttggttttattttaaaacagtgaaaagaaaaataaatatctgaagaataagaatacagggctgggtgcagtggctcatgcctgcaatcccagcactttgggaggcggaggcaggtggaccgcttgagcccaggagttcgagaccagcctgggcaacacagtgagacccccctctttacaaaaaatacaaaaattagccaggtgtggtggtgcacctgtagtcccagctacttgagaggctgaggtgggagggtcacttgaacccaggagtcggaggttacagtgagccctgatgggccactgcactccaacctgggcaacggagcaagaccctgtctaaaaaaaaaa

SEQ ID NO: 794 - DNA, 459 bp, Homo sapiens
atgtctctagtgatccctgaaaagttccagcatattttgcgagtactcaacaccaacattgatgggcggcggaaaatagcctttgccatcactgccattaagggtgtgggccgaagatatgctcatgtggtgttgaggaaagcagacattgacctcaccaagagggcgggagaactcactgaggatgaggtggaacgtgtgatcaccattatgcagaatccacgccagtacaagatcccagactggttcttgaacagacagaaggatgtaaaggatggaaaatacagccaggtcctagccaatggtctggacaacaagctccgtgaagacctggagcgactgaagaagattcgggcccatagagggctgcgtcacttctggggccttcgtgtccgaggccagcacaccaagaccactggccgccgtggccgcaccgtgggtgtgtccaagaagaaataa

SEQ ID NO: 795 - DNA, 537 bp, Homo sapiens
atggcgcaggatcaaggtgaaaaggagaaccccatgcgggaacttcgcatccgcaaactctgtctcaacatctgtgttggggagagtggagacagactgacgcgagcagccaaggtgttggagcagctcacagggcagacccctgtgttttccaaagctagatacactgtcagatcctttggcatccggagaaatgaaaagattgctgtccactgcacagttcgaggggccaaggcagaagaaatcttggagaagggtctaaaggtgcgggagtatgagttaagaaaaaacaacttctcagatactggaaactttggttttgggatccaggaacacatcgatctgggtatcaaatatgacccaagcattggtatctacggcctggacttctatgtggtgctgggtaggccaggtttcagcatcgcagacaagaagcgcaggacaggctgcattggggccaaacacagaatcagcaaagaggaggccatgcgctggttccagcagaagtatgatgggatcatccttcctggcaaataa

SEQ ID NO: 796 - DNA, 3915 bp, Homo sapiens
atggcgaagatcgccaagactcacgaagatattgaagcacagattcgagaaattcaaggcaagaaggcagctcttgatgaagctcaaggagtgggcctcgattctacaggttattatgaccaggaaatttatggtggaagtgacagcagatttgctggatacgtgacatcaattgctgcaactgaacttgaagatgatgacgatgactattcatcatctacgagtttgcttggtcagaagaagccaggatatcatgcccctgtggcattgcttaatgatataccacagtcaacagaacagtatgatccatttgctgagcacagacctccaaagattgcagaccgggaagatgaatacaaaaagcataggcggaccatgataatttccccagagcgtcttgatccttttgcagatggagggaagacccctgatcctaaaatgaatgttaggacttacatggatgtaatgcgagaacaacacttgactaaagaagaacgagaaattaggcaacagctagcagaaaaagctaaagctggagaactaaaagtcgtcaatggagcagcagcgtcccagcctccatcaaaacgaaaacggcgttgggatcaaacagctgatcagactcctggtgccactcccaaaaaactatcaagttgggatcaggcagagacccctgggcatactccttccttaagatgggatgagacaccaggtcgtgcaaagggaagcgagactcctggagcaaccccaggctcaaaaatatgggatcctacacctagccacacaccagcgggagctgctactcctggacgaggtgatacaccaggccatgcgacaccaggccatggaggcgcaacttccagtgctcgtaaaaacagatgggatgaaacccccaaaacagagagagatactcctgggcatggaagtggatgggctgagactcctcgaacagatcgaggtggagattctattggtgaaacaccgactcctggagccagtaaaagaaaatcacggtgggatgaaacaccagctagtcagatgggtggaagcactccagttctgacccctggaaagacaccaattggcacaccagccatgaacatggctacccctactccaggtcacataatgagtatgactcctgaacagcttcaggcttggcggtgggaaagagaaattgatgagagaaatcgcccactttctgatgaggaattagatgctatgttcccagaaggatataaggtacttcctcctccagctggttatgttcctattcgaactccagctcgaaagctgacagctactccaacacctttgggtggtatgactggtttccacatgcaaactgaagatcgaactatgaaaagtgttaatgaccagccatctggaaatcttccatttttaaaacctgatgatattcaatactttgataaactattggttgatgttgatgaatcaacacttagtccagaagagcaaaaagagagaaaaataatgaagttgcttttaaaaattaagaatggaacaccaccaatgagaaaggctgcattgcgtcagattactgataaagctcgtgaatttggagctggtcctttgtttaatcagattcttcctctgctgatgtctcctacacttgaggatcaagagcgtcatttacttgtgaaagttattgataggatactgtacaaacttgatgacttagttcgtccatatgtgcataagatcctcgtggtcattgaaccgctattgattgatgaagattactatgctagagtggaaggcctagagatcatttctaatttggcaaaggctgctggtctggctactatgatctctaccatgagacctgatatagataacatggatgagtatgtccgtaacacaacagctagagcttttgctgttgtagcctctgccctgggcattccttctttattgcccttcttaaaagctgtgtgcaaaagcaagaagtcctggcaagcgagacacactggtattaagattgtacaacagatagctattcttatgggctgtgccatcttgccacatcttagaagtttagttgaaatcattgaacatggtcttgtggatgagcagcagaaagttcggaccatcagtgctttggccattgctgccttggctgaagcagcaactccttatggtatcgaatcttttgattctgtgttaaagcctttatggaagggtatccgccaacacagaggaaagggtttggctgctttcttgaaggctattgggtatcttattcctcttatggatgcagaatatgccaactactatactagagaagtgatgttaatccttattcgagaattccagtctcctgatgaggaaatgaaaaaaattgtgctgaaggtggtaaaacagtgttgtgggacagatggtgtagaagcaaactacattaaaacagagattcttcctcccttttttaaacacttctggcagcacaggatggctttggatagaagaaattaccgacagttagttgatactactgtggagttggcaaacaaagtaggtgcagcagaaattatatccaggattgtggatgatctgaaagatgaagccgaacagtacagaaaaatggtgatggagacaattgagaaaattatgggcaatttgggagcagcagatattgatcataaacttgaagaacaactgattgatggtattctttatgctttccaagaacagactacagaggactcagtaatgttgaacggctttggcacagtggttaatgctcttggcaaacgagtcaaaccatacttgcctcagatctgtggtacagttttgtggcgtttaaataacaaatctgctaaagttaggcaacaggcagctgacttgatttctcgaactgctgttgtcatgaagacttgtcaagaggaaaaattgatgggacacttgggtgttgtattgtatgagtatttgggtgaagagtaccctgaagtattgggcagcattcttggagcactgaaggccattgtaaatgtcataggtatgcataagatgactccaccaattaaagatctgctgcctagactcacccccatcttaaagaacagacatgaaaaagtacaagagaattgtattgatcttgttggtcgtattgctgacaggggagctgaatatgtatctgcaagagagtggatgaggatttgctttgagcttttagagctcttaaaagcccacaaaaaggctattcgtagagccacagtcaacacatttggttatattgcaaaggccattggccctcatgatgtattggctacacttctgaacaacctcaaagttcaagaaaggcagaacagagtttgtaccactgtagcaatagctattgttgcagaaacatgttcaccctttacagtactccctgccttaatgaatgaatacagagttcctgaactgaatgttcaaaatggagtgttaaaatcgctttccttcttgtttgaatatattggtgaaatgggaaaagactacatttatgccgtaacaccgttacttgaagatgctttaatggatagagaccttgtacacagacagacggctagtgcagtggtacagcacatgtcacttggggtttatggatttggttgtgaagattcgctgaatcacttgttgaactatgtatggcccaatgtatttgagacatctcctcatgtaattcaggcagttatgggagccctagagggcctgagagttgctattggaccatgtagaatgttgcaatattgtttacagggtctgtttcacccagcccggaaagtcagagatgtatattggaaaatttacaactccatctacattggttcccaggacgctctcatagcacattacccaagaatctacaacgatgataagaacacctatattcgttatgaacttgactatatcttataa

SEQ ID NO: 797 - DNA, 360 bp, Homo sapiens
atgtctcgctccgtggccttagctgtgctcgcgctactctctctttctggcctggaggctatccagcgtactccaaagattcaggtttactcacgtcatccagcagagaatggaaagtcaaatttcctgaattgctatgtgtctgggtttcatccatccgacattgaagttgacttactgaagaatggagagagaattgaaaaagtggagcattcagacttgtctttcagcaaggactggtctttctatctcttgtactacactgaattcacccccactgaaaaagatgagtatgcctgccgtgtgaaccatgtgactttgtcacagcccaagatagttaagtgggatcgagacatgtaa

SEQ ID NO: 798 - DNA, 996 bp, Homo sapiens
atgctaaaactgaagacaaagttcgggtcatggcagactctatgcaagagaagcaacgtatggcaggacaaatgcttcttcaaacctttttttaacatagaccaaatatcccccaataaaaaagctcatccgaatatggaggctggaccacctgagtcaggagaatctacagatgccctcaagctttgtcctcatgaagaattcctgagactatgtaaagaaagagctgaagagatctatccaataaaggagagaaacaaccgcacacgcctggctctcatcatatgcaatacagagtttgaccatctgcctccgaggaatggagctgactttgacatcacagggatgaaggagctacttgagggtctggactatagtgtagatgtagaagagaatctgacagccagggatatggagtcagcgctgagggcatttgctaccagaccagagcacaagtcctctgacagcacattcttggtactcatgtctcatggcatcctggagggaatctgcggaactgtgcatgatgagaaaaaaccagatgtgctgctttatgacaccatcttccagatattcaacaaccgcaactgcctcagtctgaaggacaaacccaaggtcatcattgtccaggcctgcagaggtgcaaaccgtggggaactgtgggtcagagactctccagcatccttggaagtggcctcttcacagtcatctgagaacctggaggaagatgctgtttacaagacccacgtggagaaggacttcattgctttctgctcttcaacgccacacaacgtgtcctggagagacagcacaatgggctctatcttcatcacacaactcatcacatgcttccagaaatattcttggtgctgccacctagaggaagtatttcggaaggtacagcaatcatttgaaactccaagggccaaagctcaaatgcccaccatagaacgactgtccatgacaagatatttctacctctttcctggcaattga

SEQ ID NO: 799 - DNA, 579 bp, Homo sapiens
atgaagactattctcagcaatcagactgtcgacattccagaaaatgtcgacattactctgaagggacgcacagttatcgtgaagggccccagaggaaccctgcggagggacttcaatcacatcaatgtagaactcagccttcttggaaagaaaaaaaagaggctccgggttgacaaatggtggggtaacagaaaggaactggctaccgttcggactatttgtagtcatgtacagaacatgatcaagggtgttacactgggcttccgttacaagatgaggtctgtgtatgctcacttccccatcaacgttgttatccaggagaatgggtctcttgttgaaatccgaaatttcttgggtgaaaaatacatccgcagggttcggatgagaccaggtgttgcttgttcagtatctcaagcccagaaagatgaattaatccttgaaggaaatgacattgagcttgtttcaaattcagcggctttgattcagcaagccacaacagttaaaaacaaggatatcaggaaatttttggatggtatctatgtctctgaaaaaggaactgttcagcaggctgatgaataa

SEQ ID NO: 800 - DNA, 432 bp, Homo sapiens
atgggcaagtgtcgtggacttcgtactgctaggaagctccgtagtcaccgacgagaccagaagtggcatgataaacagtataagaaagctcatttgggcacagccctaaaggccaacccttttggaggtgcttctcatgcaaaaggaatcgtgctggaaaaagtaggagttgaagccaaacagccaaattctgccattaggaagtgtgtaagggtccagctgatcaagaatggcaagaaaatcacagcctttgtacccaatgacggttgcttgaactttattgaggaaaatgatgaagttctggttgctggatttggtcgcaaaggtcatgctgttggtgatattcctggagtccgctttaaggttgtcaaagtagccaatgtttctcttttggccctatacaaaggcaagaaggaaagaccaagatcataa

SEQ ID NO: 801 - DNA, 246 bp, Homo sapiens
atgctaattaaagtgaagacgctgaccggaaaggagattgagattgacattgaacctacagacaaggtggagcgaatcaaggagcgtgtggaggagaaagagggaatccccccacaacagcagaggctcatctacagtggcaagcagatgaatgatgagaagacagcagctgattacaagattttaggtggttcagtccttcacctggtgttggctctgagaggaggaggtggtcttaggcagtga

SEQ ID NO: 802 - DNA, 1467 bp, Homo sapiens
atggctccggccgcctggctccgcagcgcggccgcgcgcgccctcctgcccccgatgctgctgctgctgctccagccgccgccgctgctggcccgggctctgccgccggacgtccaccacctccatgccgagaggagggggccacagccctggcatgcagccctgcccagtagcccggcacctgcccctgccacgcaggaagccccccggcctgccagcagcctcaggcctccccgctgtggcgtgcccgacccatctgatgggctgagtgcccgcaaccgacagaagaggttcgtgctttctggcgggcgctgggagaagacggacctcacctacaggatccttcggttcccatggcagttggtgcaggagcaggtgcggcagacgatggcagaggccctaaaggtatggagcgatgtgacgccactcacctttactgaggtgcacgagggccgtgctgacatcatgatcgacttcgccaggtactggcatggggacgacctgccgtttgatgggcctgggggcatcctggcccatgccttcttccccaagactcaccgagaaggggatgtccacttcgactatgatgagacctggactatcggggatgaccagggcacagacctgctgcaggtggcagcccatgaatttggccacgtgctggggctgcagcacacaacagcagccaaggccctgatgtccgccttctacacctttcgctacccactgagtctcagcccagatgactgcaggggcgttcaacacctatatggccagccctggcccactgtcacctccaggaccccagccctgggcccccaggctgggatagacaccaatgagattgcaccgctggagccagacgccccgccagatgcctgtgaggcctcctttgacgcggtctccaccatccgaggcgagctctttttcttcaaagcgggctttgtgtggcgcctccgtgggggccagctgcagcccggctacccagcattggcctctcgccactggcagggactgcccagccctgtggacgctgccttcgaggatgcccagggccacatttggttcttccaaggtgctcagtactgggtgtacgacggtgaaaagccagtcctgggccccgcacccctcaccgagctgggcctggtgaggttcccggtccatgctgccttggtctggggtcccgagaagaacaagatctacttcttccgaggcagggactactggcgtttccaccccagcacccggcgtgtagacagtcccgtgccccgcagggccactgactggagaggggtgccctctgagatcgacgctgccttccaggatgctgatggctatgcctacttcctgcgcggccgcctctactggaagtttgaccctgtgaaggtgaaggctctggaaggcttcccccgtctcgtgggtcctgacttctttggctgtgccgagcctgccaacactttcctctga

SEQ ID NO: 803 - DNA, 291 bp, Homo sapiens
atgcctggtccgacccccagtggcactaacgtgggatcctcagggcgctctcccagcaaagcagtggccgcccgggcggcgggatccactgtccggcagaggaaaaatgccagctgtgggacaaggagtgcaggccgcacaacctcggcaggcaccggggggatgtggcgattctacacagaagattcacctgggctcaaagttggccctgttccagtattggttatgagtcttctgttcatcgcttctgtatttatgttgcacatttggggcaagtacactcgttcgtag

SEQ ID NO: 804 - DNA, 1739 bp, Homo sapiens
ttttttttttttgtaaacaatgctttatgggggtagggtgggtgctggacaggcctccaggtaataaataacaggtactagcaacagcagggccagatggggagttggggacaaatgaccctggtctcaggctttgggagctcttggggtatggttaggggttcagggggacagacgttagccaagacagaggaagcagcagcaggtacgggattcccccttcccccgtggctcagtcttgccccaaagccaggccccaccaggccagggaagggggacaggtggcaacgtagcttctccggggccagggcaggttaggacacggcctctcagagcctgggcctgggccccagcagggctggtcctggagaacaggtgagctggctccacagagctcagcagccacacggctgaggggccacggcctgggcactccgaggctgccgaagctggcggagggacgcatccccgtactgaatgccagagcccatcctctccgggtctagctcgcctgagtcaatcttgttgaggatagtgcgggcacacttgaggaacgcctcctccacgttctcgccagtgagagcgctggtctccaggaacatcagctctgcaggggcacacactctgaggtcagggccccagttagtccccaccctccactgagctctcacctgctgactctcatcctgttcctccaatgttccatccccccttaccctcacctcaggcctctgcgcatgccatttccctgccactaatgtccgcttcccgatatgcccacccagctcttccttcagagctcagctcacacagctcctcctccaagaagtcctccctgacttcctgggctgagtcaggtaccgacttagggctcccacagcttcttgtggccccctatcctggccctgaccccactgcttgtgcttcctcatcctggccccaaccctctgcctgggtccccatcccacccctgacccttctgcctgggcctgccccattcctttcctgacccttctgcctggacctgccccattccacccctgacccttctgcctaggcctgccccattccacccctgagccctctgcccatgctcccccatcccatgcaaccgctctgcctgtgcctcccaaacttggccttgacccctctacctgggccccccatcccaccccaacccctctgcccttgccccccatcccatgtaactcctctgcctgtgtcccctcatcccaactgacccctctgcctctgcctgccctatcccagccctgacccctctgcctgtgttctccatcccaccccgatccctctgcctgcccccccagtactggccctgaccctctggggctctcccctgctggctctgacccctgtctcccggtgcttcaccatcaagccctgaccttcctgaggtgtcactgtctggaagtgggtctgtccttccaccctcacccactgaactgtgagctccatgaaggttgggcctagggctgtctccaacactgtgtctctagcaccatctaggacaggaacaggccaaccagagtctacccatcagcagcatgacaaggccccacagtcagaaaatcagagctgaattcacacccacacctctctgatggcaaaacctcctttaaacctggaggttgcaaaacaggggaacacaggcagatctcaagccaccagatgtgggtggtttggccaacacaatgttttcaaatgagtttatacttgca

SEQ ID NO: 805 - DNA, 3369 bp, Homo sapiens
atgaactctcccaacgagtcggatgggatgtcaggtcgggaaccatccttggaaatcctgccgcggacttctctgcacagcatccctgtgacagtggaggtgaagccggtgctgccaagagccatgcccagttccatggggggtgggggtggaggcagccccagccctgtggagctacggggggctctggtgggctctgtggaccccacactgcgggagcagcaactgcagcaggagctcctggcgctcaagcagcagcagcagctgcagaagcagctcctgttcgctgagttccagaaacagcatgaccacctgacaaggcagcatgaggtccagctgcagaagcacctcaagcagcagcaggagatgctggcagccaagcagcagcaggagatgctggcagccaagcggcagcaggagctggagcagcagcggcagcgggagcagcagcggcaggaagagctggagaagcagcggctggagcagcagctgctcatcctgcggaacaaggagaagagcaaagagagtgccattgccagcactgaggtaaagctgaggctccaggaattcctcttgtcgaagtcaaaggagcccacaccaggcggcctcaaccattccctcccacagcaccccaaatgctggggagcccaccatgcttctttggaccagagttcccctccccagagcggcccccctgggacgcctccctcctacaaactgcctttgcctgggccctacgacagtcgagacgacttccccctccgcaaaacagcctctgaacccaacttgaaagtgcgttcaaggctaaaacagaaggtggctgagcggagaagcagtcccctcctgcgtcgcaaggatgggactgttattagcacctttaagaagagagctgttgagatcacaggtgccgggcctggggcgtcgtccgtgtgtaacagcgcacccggctccggccccagctctcccaacagctcccacagcaccatcgctgagaatggctttactggctcagtccccaacatccccactgagatgctccctcagcaccgagccctccctctggacagctcccccaaccagttcagcctctacacgtctccttctctgcccaacatctccctagggctgcaggccacggtcactgtcaccaactcacacctcactgcctccccgaagctgtcgacacagcaggaggccgagaggcaggccctccagtccctgcggcagggtggcacgctgaccggcaagttcatgagcacatcctctattcctggctgcctgctgggcgtggcactggagggcgacgggagcccccacgggcatgcctccctgctgcagcatgtgctgttgctggagcaggcccggcagcagagcaccctcattgctgtgccactccacgggcagtccccactagtgacgggtgaacgtgtggccaccagcatgcggacggtaggcaagctcccgcggcatcggcccctgagccgcactcagtcctcaccgctgccgcagagtccccaggccctgcagcagctggtcatgcaacaacagcaccagcagttcctggagaagcagaagcagcagcagctacagctgggcaagatcctcaccaagacaggggagctgcccaggcagcccaccacccaccctgaggagacagaggaggagctgacggagcagcaggaggtcttgctgggggagggagccctgaccatgccccgggagggctccacagagagtgagagcacacaggaagacctggaggaggaggacgaggaagaggatggggaggaggaggaggattgcatccaggttaaggacgaggagggcgagagtggtgctgaggaggggcccgacttggaggagcctggtgctggatacaaaaaactgttctcagatgcccagccgctgcagcctttgcaggtgtaccaggcgcccctcagcctggccactgtgccccaccaggccctgggccgtacccagtcctcccctgctgcccctgggggcatgaagagccccccagaccagcccgtcaagcacctcttcaccacaggtgtggtctacgacacgttcatgctaaagcaccagtgcatgtgcgggaacacacacgtgcaccctgagcatgctggccggatccagagcatctggtcccggctgcaggagacaggcctgcttagcaagtgcgagcggatccgaggtcgcaaagccacgctagatgagatccagacagtgcactctgaataccacaccctgctctatgggaccagtcccctcaaccggcagaagctagacagcaagaagttgctcggccccatcagccagaagatgtatgctgtgctgccttgtgggggcatcggggtggacagtgacaccgtgtggaatgagatgcactcctccagtgctgtgcgcatggcagtgggctgcctgctggagctggccttcaaggtggctgcaggagagctcaagaatggatttgccatcatccggcccccaggacaccacgccgaggaatccacagccatgggattctgcttcttcaactctgtagccatcaccgcaaaactcctacagcagaagttgaacgtgggcaaggtcctcatcgtggactgggacattcaccatggcaatggcacccagcaggcgttctataatgacccctctgtgctctacatctctctgcatcgctatgacaacgggaacttctttccaggctctggggctcctgaagaggttggtggaggaccaggcgtggggtacaatgtgaacgtggcatggacaggaggtgtggacccccccattggagacgtggagtaccttacagccttcaggacagtggtgatgcccattgcccacgagttctcacctgatgtggtcctagtctccgccgggtttgatgctgttgaaggacatctgtctcctctgggtggctactctgtcaccgccagatgttttggccacttgaccaggcagctgatgaccctggcagggggccgggtggtgctggccctggagggaggccatgacttgaccgccatctgtgatgcctctgaggcttgtgtctcggctctgctcagtgtagagctgcagcccttggatgaggcagtcttgcagcaaaagcccaacatcaacgcagtggccacgctagagaaagtcatcgagatccagagcaaacactggagctgtgtgcagaagttcgccgctggtctgggccggtccctgcgagaggcccaagcaggtgagaccgaggaggccgagactgtgagcgccatggccttgctgtcggtgggggccgagcaggcccaggctgcggcagcccgggaacacagccccaggccggcagaggagcccatggagcaggagcctgccctgtga

SEQ ID NO: 806 - DNA, 2334 bp, Homo sapiens
atgctcccgcggcccctgcggctgcttttggacacgagcccccccgggggagtcgtactgagcagcttccgaagccgggaccccgaagagggtgggggcccaggtggcctggtcgtgggcggggggcaggaggaagaggaggaggaagaagaagaggcccctgtgtccgtctgggatgaggaggaggatggtgccgtgtttaccgtcacaagccgccaatatcgacctcttgatcccttggtccctatgcctcccccacgttcctcccgacggctccgagctggcactctggaggccctggtcagacacctactggatacccggacatcagggactgatgtgagcttcatgtcagccttcctggctacccaccgggccttcacctccacgcctgccttgctagggcttatggctgacaggctggaagcccttgaatctcatcctaccgacgaactagagaggacaacagaggtagccatctctgtactgtcaacctggctggcctctcaccctgaggattttggctctgaggccaagggtcagcttgaccggcttgagagcttcttacttcagacagggtatgcagcagggaagggtgttggggggggcagcgctgacctcatccgcaatctccggtcccgggtggacccccaggcccccgaccttcctaagcccctggccctccccggcgatccccctgctgaccccacggatgtcctggtgttcctcgctgaccacttggccgaacagctgaccctgctagatgcggaactttttctcaatttgatcccctctcagtgcctgggaggcctgtggggtcacagagaccggccaggacattctcacctctgcccatctgtccgagctactgtcacacagtttaacaaggtggcaggggcagtggttagttctgtcctgggggctacttccactggagagggacctggggaggtgaccatacggccactccgtcccccacagagggcccggctcctggagaagtggatccgcgtggcagaggagtgccggctgctccgaaacttctcttcagtttatgccgtggtgtcagccctgcagtccagccccatccacaggcttcgggcagcctggggggaagcaaccagggacagcctcagagtcttttccagcctctgccagattttctccgaggaggataattattcccagagtcgggagctgctcgtgcaggaggtgaagctgcagtctcctctggagccacactccaagaaggccccgaggtctggctcccggggtgggggtgtggtcccataccttggcaccttcctgaaggaccttgtgatgctggatgcagcctccaaggatgagttggagaatggatacatcaattttgacaagcggaggaaggagtttgcagtcctttctgagttgcgacggctccagaatgaatgtcgtggctataacctccaacctgaccatgatatccagaggtggctacaggggctccggccactgacagaggctcagagccatcgtgtatcctgtgaggtggagccacctggttccagtgaccctcctgccccacgggtgcttcggccaacattggtcatctcgcagtggacagaggttttgggctctgttggggtccctaccccgcttgtgtcctgtgaccggcccagtactgggggagatgaggcgcctacaactcctgctcctctgctgactcggctggcccagcacatgaagtggccatctgtctcgtcactagactctgccttggaaagcagtccatccctgcacagtccagctgaccccagccacctctccccaccagcctcctcccctaggccttctcgaggtcaccgccgctcagcctcctgtggctccccgctgagtgggggtgcagaagaggcctccggggggactggatatgggggagagggatctgggccaggggcctctgattgccgtatcatccgagtccagatggagttgggggaagatggcagtgtctataagagcattttggtgacaagccaggacaaggctccaagtgtcatcagtcgtgtccttaagaaaaacaatcgtgactctgcagtggcttcagagtatgagctggtacagctgctaccaggggagcgagagctgactatcccagcctcggctaatgtattctacgccatggatggagcttcacacgatttcctcctgcggcagcggcgaaggtcctctactgctacacctggcgtcaccagtggcccgtctgcctcaggaactcctccgagtgagggaggagggggctcctttcccaggatcaaggccacagggaggaagattgcacgggcactgttctga

SEQ ID NO: 807 - DNA, 753 bp, Homo sapiens
atgtcgatcttcacccccaccaaccagatccgcctaaccaatgtggccgtggtacggatgaagcgtgccgggaagcgcttcgaaatcgcctgctacaaaaacaaggtcgtcggctggcggagggcgtgggaaaaagacctcgatgaagttctgcagacccactcagtgtttgtaaatgtttctaaaggtcaggttgccaaaaaggaagatctcatcagtgcgtttggaacagatgaccaaactgaaatctgtaagcagattttggctaaaggagaagttcaagtttcagataaagaaagacacacacaactggggcagatgtttagggacattgcaacttttgtggcagacaaatgtgtgaatcctgaaacaaagggaccatacaccgtgatccttattgagagagccatgaaggacatccactatttggtgaaaccaaacaagagtacaaaacagcaggctttggaagtgataaagcagttaaaagagaaaatgaagatagaacgtgctcacatgaggcttcggttcatccttccagtcaatgaaggcaagaagctgaaagaaaagctcaagccactgatcaaggtcatagaaagtgaagattatggccaacagttagaaatcgtatgtctgattgacccgggctgcttccgagaaattgatgagctaataaaaaaggaaactaaaggcaaaggttctttggaagtactcaatctgaaagatgtagaagaaggagatgagaaatttgaatga

SEQ ID NO: 808 - DNA, 795 bp, Homo sapiens
atggaatcaggcttcacctccaaggacacctatctaagccattttaaccctcgggattacctagaaaaatattacaagtttggttctaggcactctgcagaaagccagattcttaagcaccttctgaaaaatcttttcaagatattctgcctagacggtgtgaagggagacctgctgattgacatcggctctggccccactatctatcagctcctctctgcttgtgaatcctttaaggagatcgtcgtcactgactactcagaccagaacctgcaggagctggagaagtggctgaagaaagagccagaggcctttgactggtccccagtggtgacctatgtgtgtgatcttgaagggaacagagtcaagggtccagagaaggaggagaagttgagacaggcggtcaagcaggtgctgaagtgtgatgtgactcagagccagccactgggggccgtccccttacccccggctgactgcgtgctcagcacactgtgtctggatgccgcctgcccagacctccccacctactgcagggcgctcaggaacctcggcagcctactgaagccagggggcttcctggtgatcatggatgcgctcaagagcagctactacatgattggtgagcagaagttctccagcctccccctgggccgggaggcagtagaggctgctgtgaaagaggctggctacacaatcgaatggtttgaggtgatctcgcaaagttattcttccaccatggccaacaacgaaggacttttctccctggtggcgaggaagctgagcagacccctgtga

SEQ ID NO: 809 - DNA, 732 bp, Homo sapiens
atggcagtgcaaatatccaagaagaggaagtttgtcgctgatggcatcttcaaagctgaactgaatgagtttcttactcgggagctggctgaagatggctactctggagttgaggtgcgagttacaccaaccaggacagaaatcattatcttagccaccagaacacagaatgttcttggtgagaagggccggcggattcgggaactgactgctgtagttcagaagaggtttggctttccagagggcagtgtagagctttatgctgaaaaggtggccactagaggtctgtgtgccattgcccaggcagagtctctgcgttacaaactcctaggagggcttgctgtgcggagggcctgctatggtgtgctgcggttcatcatggagagtggggccaaaggctgcgaggttgtggtgtctgggaaactccgaggacagagggctaaatccatgaagtttgttgatggcctgatgatccacagcggagaccctgttaactactacgttgacactgctgtgcgccacgtgttgctcagacagggtgtgctgggcatcaaggtgaagatcatgctgccctgggacccaactggtaagattggccctaagaagcccctgcctgaccacgtgagcattgtggaacccaaagatgagatactgcccaccacccccatctcagaacagaagggtgggaagccagagccgcctgccatgccccagccagtccccacagcataa

SEQ ID NO: 810 - DNA, 2244 bp, Homo sapiens
atgacatcctttcaagaagtcccattgcagacttccaactttgcccatgtcatctttcaaaatgtggccaagagttaccttcctaatgcacacctggaatgtcattacaccttaactccatatattcatccacatccaaaagattgggttggtatattcaaggttggatggagtactgctcgtgattattacacgtttttatggtcccctatgcctgaacattatgtggaaggatcaacagtcaattgtgtactagcattccaaggatattaccttccaaatgatgatggagaattttatcagttctgttacgttacccataagggtgaaattcgtggagcaagtacacctttccagtttcgagcttcttctccagttgaagagctgcttactatggaagatgaaggaaattctgacatgttagtggtgaccacaaaagcaggccttcttgagttgaaaattgagaaaaccatgaaagaaaaagaagaactgttaaagttaattgccgttctggaaaaagaaacagcacaacttcgagaacaagttgggagaatggaaagagaacttaaccatgagaaagaaagatgtgaccaactgcaagcagaacaaaagggtcttactgaagtaacacaaagcttaaaaatggaaaatgaagagtttaagaagaggttcagtgatgctacatccaaagcccatcacgttgaggaagatattgtgtcagtaacacataaagcaattgaaaaagaaaccgaattagacagtttaaaggacaaactcaagaaggcacaacatgaaagagaacaacttgaatgtcagttgaagacagagaaggatgaaaaggaactttataaggtacatttgaagaatacagaaatagaaaataccaagcttatgtcagaggtccagactttaaaaaatttagatgggaacaaagaaagcgtgattactcatttcaaagaagagattggcaggctgcagttatgtttggctgaaaaggaaaatctgcaaagaactttcctgcttacaacctcaagtaaagaagatacttgttttttaaaggagcaacttcgtaaagcagaggaacaggttcaggcaactcggcaagaagttgtctttctggctaaagaactcagtgatgctgtcaacgtacgagacagaacgatggcagacctgcatactgcacgcttggaaaacgagaaagtgaaaaagcagttagctgatgcagtggcagaacttaaactaaatgctatgaaaaaagatcaggacaagactgatacactggaacacgaactaagaagagaagttgaagatctgaaactccgtcttcagatggctgcagaccattataaagaaaaatttaaggaatgccaaaggctccaaaaacaaataaacaaactttcagatcaatcagctaataataataatgtcttcacaaagaaaacggggaatcagcagaaagtgaatgatgcttcagtaaacacagacccagccacttctgcctctactgtagatgtaaagccatcaccttctgcagcagaggcagattttgacatagtaacaaaggggcaagtctgtgaaatgaccaaagaaattgctgacaaaacagaaaagtataataaatgtaaacaactcttgcaggatgagaaagcaaaatgcaataaatatgctgatgaacttgcaaaaatggagctgaaatggaaagaacaagtgaaaattgctgaaaatgtaaaacttgaactagctgaagtacaggataattataaagaacttaaaaggagtctagaaaatccagcagaaaggaaaatggaagatggagcagatggtgctttttacccagatgaaatacaaaggccacctgtcagagtcccctcttggggactggaagacaatgttgtctgcagccagcctgctcgaaactttagtcggcctgatggcttagaggactctgaggatagcaaagaagatgagaatgtgcctactgctcctgatcctccaagtcaacatttacgtgggcatgggacaggcttttgctttgattccagctttgatgttcacaagaagtgtcccctctgtgagttaatgtttcctcctaactatgatcagagcaaatttgaagaacatgttgaaagtcactggaaggtgtgcccgatgtgcagcgagcagttccctcctgactatgaccagcaggtgtttgaaaggcatgtgcagacccattttgatcagaatgttctaaattttgactag

SEQ ID NO: 811 - DNA, 366 bp, Homo sapiens
atgaggatcatgctgctattcacagccatcctggccttcagcctagctcagagctttggggctgtctgtaaggagccacaggaggaggtggttcctggcgggggccgcagcaagagggatccagatctctaccagctgctccagagactcttcaaaagccactcatctctggagggattgctcaaagccctgagccaggctagcacagatcctaaggaatcaacatctcccgagaaacgtgacatgcatgacttctttgtgggacttatgggcaagaggagcgtccagccagactctcctacggatgtgaatcaagagaacgtccccagctttggcatcctcaagtatcccccgagagcagaatag

SEQ ID NO: 812 - DNA, 1260 bp, Homo sapiens
atggggcccctctcagcccctccctgcacacagcatataacctggaaagggctcctgctcacagcatcacttttaaacttctggaacccgcccaccacagcccaagtcacgattgaagcccagccaccaaaagtttctgaggggaaggatgttcttctacttgtccacaatttgccccagaatcttactggctacatctggtacaaaggacaaatcagggacctctaccattatgttacatcatatgtagtagacggtcaaataattaaatatgggcctgcatacagtggacgagaaacagtatattccaatgcatccctgctgatccagaatgtcacccaggaagacacaggatcctacactttacacatcataaagcgaggtgatgggactggaggagtaactggacgtttcaccttcaccttatacctggagactcccaaaccctccatctccagcagcaatttcaaccccagggaggccacggaggctgtgatcttaacctgtgatcctgagactccagatgcaagctacctgtggtggatgaatggtcagagcctccctatgactcacagcttgcagctgtctgaaaccaacaggaccctctacctatttggtgtcacaaactatactgcaggaccctatgaatgtgaaatacggaacccagtgagtgccagccgcagtgacccagtcaccctgaatctcctcccgaagctgcccaagccctacatcaccatcaataacttaaaccccagggagaataaggatgtctcaaccttcacctgtgaacctaagagtgagaactacacctacatttggtggctaaatggtcagagcctcccggtcagtcccagggtaaagcgacgcattgaaaacaggatcctcattctacccagtgtcacgagaaatgaaacaggaccctatcaatgtgaaatacgggaccgatatggtggcatccgcagtgacccagtcaccctgaatgtcctctatggtccagacctccccagaatttacccttcgttcacctattaccattcaggacaaaacctctacttgtcctgctttgcggactctaacccaccggcacagtattcttggacaattaatgggaagtttcagctatcaggacaaaagctttctatcccccagattactacaaagcatagcgggctctatgcttgctctgttcgtaactcagccactggcaaggaaagctccaaatccgtgacagtcagagtctctgactggacattaccctga

SEQ ID NO: 813 - DNA, 606 bp, Homo sapiens
atggcggccgccaaggacactcatgaggaccatgatacttccactgagaatacagacgagtccaaccatgaccctcagtttgagccaatagtttctcttcctgagcaagaaattaaaacactggaagaagatgaagaggaactttttaaaatgcgggcaaaactgttccgatttgcctctgagaacgatctcccagaatggaaggagcgaggcactggtgacgtcaagctcctgaagcacaaggagaaaggggccatccgcctcctcatgcggagggacaagaccctgaagatctgtgccaaccactacatcacgccgatgatggagctgaagcccaacgcaggtagcgaccgtgcctgggtctggaacacccacgctgacttcgccgacgagtgccccaagccagagctgctggccatccgcttcctgaatgctgagaatgcacagaaattcaaaacaaagtttgaagaatgcaggaaagagatcgaagagagagaaaagaaagcaggatcaggcaaaaatgatcatgccgaaaaagtggcggaaaagctagaagctctctcggtgaaggaggagaccaaggaggatgctgaggagaagcaataa

SEQ ID NO: 814 - DNA, 1956 bp, Homo sapiens
atgggcaagaagcacaagaagcacaagtcggacaaacacctctacgaggagtatgtagagaagcccttgaagctggtcctcaaagtaggagggaacgaagtcaccgaactctccacgggcagctcggggcacgactccagcctcttcgaagacaaaaacgatcatgacaaacacaaggacagaaagcggaaaaagagaaagaaaggagagaagcagattccaggggaagaaaaggggagaaaacggagaagagttaaggaggataaaaagaagcgagatcgagaccgggtggagaatgaggcagaaaaagatctccagtgtcacgcccctgtgagattagacttgcctcctgagaagcctctcacaagctctttagccaaacaagaagaagtagaacagacaccccttcaagaagctttgaatcaactgatgagacaattgcagagaaaagatccaagtgctttcttttcatttcctgtgactgattttattgctcctggctactccatgatcattaaacacccaatggattttagtaccatgaaagaaaagatcaagaacaatgactatcagtccatagaagaactaaaggataacttcaaactaatgtgtactaatgccatgatttacaataaaccagagaccatttattataaagctgcaaagaagctgttgcactcaggaatgaaaattcttagccaggaaagaattcagagcctgaagcagagcatagacttcatggctgacttgcagaaaactcgaaagcagaaagatggaacagacacctcacagagtggggaggacggaggctgctggcagagagagagagaggactctggagatgctgaagcacacgccttcaagagtcccagcaaagaaaataaaaagaaagacaaagatatgcttgaagataagtttaaaagcaataatttagagagagagcaggagcagcttgaccgcatcgtgaaggaatctggaggaaagctgaccaggcggcttgtgaacagtcagtgcgaatttgaaagaagaaaaccagatggaacaacgacgttgggacttctccatcctgtggatcccattgtaggagagccaggctactgccctgtgagactgggaatgacaactggaagacttcagtctggagtgaatactttgcaggggttcaaagaggataaaaggaacaaagtcactccagtgttatatttgaattatgggccctacagttcttatgcaccgcattatgactccacatttgcaaatatcagcaaggatgattctgatttaatctattcaacctatggggaagactctgatcttccaagtgatttcagcatccatgagtttttggccacgtgccaagattatccgtatgtcatggcagatagtttactggatgttttaacaaaaggagggcattccaggaccctacaagagatggagatgtcattgcctgaagatgaaggccatactaggacacttgacacagcaaaagaaatggagattacagaagtagagccaccagggcgtttggactccagtactcaagacaggctcatagcgctgaaagcagtaacaaattttggcgttccagttgaagtttttgactctgaagaagctgaaatattccagaagaaacttgatgagaccaccagattgctcagggaactccaggaagcccagaatgaacgtttgagcaccagaccccctccgaacatgatctgtctcttgggtccctcatacagagaaatgcatcttgctgaacaagtgaccaataatcttaaagaacttgcacagcaagtaactccaggtgatatcgtaagcacgtatggagttcgaaaagcaatggggatttccattccttcccccgtcatggaaaacaactttgtggatttgacagaagacactgaagaacctaaaaagacggatgttgctgagtgtggacctggtggaagttga

SEQ ID NO: 815 - DNA, 2356 bp, Homo sapiens
atttacaattgattaaaagtatccatgtcttggatacatacgtatctatagagctggcatgtaattcttcctctataaagaataggtataggaaagactgaataaaaatggagggatatccccttggatttcacttgcattgtgcaataagcaaagaagggttgataaaagttcttgatcaaaaagttcaaagaaaccagaattttagacagcaagctaaataaatattgtaaaattgcactatattaggttaagtattatttaggtattataatatgctttgtaaattttatattccaaatattgctcaatatttttcatctattaaattaatttctagtgtaaataagtagcttctatatctgtcttagtctattataattgtaaggagtaaaattaaatgaatagtctgcaggtataaatttgaacaatgcatagatgatcgaaaattacggaaaatcatagggcagagaggtgtgaagattcatcattatgtgaaatttggatctttctcaaatccttgctgaaatttaggatggttctcactgtttttctgtgctgatagtaccctttccaaggtgaccttcagggggattaaccttcctagctcaagcaatgagctaaaaggagccttatgcatgatcttcccacatatcaaaataactaaaaggcactgagtttggcatttttctgcctgctctgctaagacctttttttttttttactttcattataacatattatacatgacattatacaaaaatgattaaaatatattaaaacaacatcaacaatccaggatatttttctataaaactttttaaaaataattgtatctatatattcaattttacatccttcttcaaaggctttgtttttctaaaggctttgttttcctttttattatttttttcttttttatttttttgagacagtcttgctctgtcgctcaggctggagtgcagtggcacgatctcagctcactgcaacctcctcctcccaggttcaagtgattcttgttcatcagcctcccgagtagctgggactacaggcatgtgccactatgcccagctaatttttgtttttttagtagagacagggtttcaccacattggtcaggctggtcttgaaatgctggcgtcaagtgatctgcctgcctccgcctcacaaagcactgggattacaggcatgaatctggccttacgtaatatattttcttaatggctgcataatatcacatcaaataggcatttttcaaacctctttccttattaaacatgtagactatatccattttttactaaaataaataacatttcagataatatctttgcactgataatgttgccaagccatttctaaagtgaccttatcaatttaattaccattggatgagggtgttgctttcatcgcaccattgtagattgtcttttttatttcaatttgcgtttatttataactggttgcaaaggtacacagaacacacgctccttcaacttatctttgataaacccaagcaaggatacaaaaagttggacgacattgagtagagtcatggtatacggtgctgaccctacagtatcagtggaaaagataaggaaaatgtcactactcacctatgttatgcaaaacagttaggtgtgctggggctggatactgctcttttacttgagcattggttgattaaagtttaggtaccatccaggctggtctagagaagtctttggagttaaccatgctctttttgttaaagaagagagtaatgtgtttatcctggctcatagtccgtcaccgaaaatagaaaatgccatccataggtaaaatgctgacctatagaaaaaaatgaactctacttttatagcctagtaaaaatgctctacctgagtagttaaaagcaattcatgaagcctgaagctaaagagcactctggtggttttggcataatagctgcatttccagacctgacctttggccccaaccacaagtgctccaagccccaccagctgaccaaagaaagcccaagttctccttctgtccttcccacaacctccctgctcccaaaactatgaaattaatttgaccatattaacacagctgactcctccagtttacttaaggtagaaagaatgagtttacaacagatgaaaataagtgctttgggcgaactgtattccttttaacagatccaaactattttacatttaaaaaaaaagttaaactaaacttctttactgctgatatgtttcctgtattctagaaaaatttttacactttcacattatttttgtacactttccccatgttaagggatgatggcttttataaatgtgtattcattaaatgttactttaaaaat

SEQ ID NO: 816 - DNA, 1326 bp, Homo sapiens
atggacgctcccccgggcggggttgagtcggcgctcagctgcttctctttcaaccaggactgcacatccctagcaactggaactaaagccgggtataagctgttttctctgagttctgtggagcagctggatcaagtccacggaagcaatgaaatcccggacgtctacatcgtggagcgcctcttctccagcagcctggtggtggtagtcagtcacacaaaaccacggcagatgaacgtgtatcacttcaagaaaggcacagagatctgtaattacagctactccagcaacatcttgtccataaggctgaaccggcaaaggctgctggtttgcctagaagagtccatttatattcacaacattaaagacatgaagctgttgaagaccctcctggatattcctgcaaacccaacaggtctatgtgctctctctatcaaccattccaattcttacctggcctatcctggaagcctgacttcaggggagattgtgctttatgatggaaactccctgaaaacagtctgcactattgctgcccatgagggaacactagctgccatcaccttcaatgcctcaggctccaaactagcaagtgcgtctgaaaaaggcacagtcatccgggtgttctctgtccctgatgggcaaaagctctatgagttccggagagggatgaaaaggtatgtgacaatcagctctctagtgttcagtatggattcacaattcctctgcgcctccagtaacaccgagacggtacacatcttcaagctggaacaggtcaccaacagtcgaccagaagagccttcgacctggagtggctacatgggaaagatgtttatggctgctaccaactacctccctacccaggtgtcagacatgatgcatcaggacagggcttttgccactgcacgcttgaacttctccggacagaggaacatctgtaccctctcaacgatccagaagttgccacggctgctagttgcgtcatccagtggacacctttatatgtacaatttggatcctcaggatggaggagagtgtgtcttaatcaaaacccaccgcttgcttggctcaggaacaacagaagagaataaagaaaatgacctcagaccttccttacctcagtcttatgcagcgaccgtagccagaccaagtgcatcttcagcctccacggtgccaggttattctgaggacggcggggcgctgcgaggagaagttattcctgaacatgagtttgcgacgggaccagtgtgtcttgatgatgagaatgagtttcctcctataatcttgtgccgtggaaatcagaagggcaaaacgaagcagtcatga

SEQ ID NO: 817 - DNA, 600 bp, Homo sapiens
atgcttgcctactcctctgtccactgctttcgtgaagacaagatgaagttcacaattgtctttgctggacttcttggagtctttctagctcctgcccttgctaactataatatcaacgtcaatgatgacaacaacaatgctggaagtgggcagcagtcagtgagtgtcaacaatgaacacaatgtggccaatgttgacaataacaacggatgggactcctggaattccatctgggattatggaaatggctttgctgcaaccagactctttcaaaagaagacatgcattgtgcacaaaatgaacaaggaagtcatgccctccattcaatcccttgatgcactggtcaaggaaaagaagcttcagggtaagggaccaggaggaccacctcccaagggcctgatgtactcagtcaacccaaacaaagtcgatgacctgagcaagttcggaaaaaacattgcaaacatgtgtcgtgggattccaacatacatggctgaggagatgcaagaggcaagcctgtttttttactcaggaacgtgctacacgaccagtgtactatggattgtggacatttccttctgtggagacacggtggagaactaa

SEQ ID NO: 818 - DNA, 1995 bp, Homo sapiens
atgaagactgggctttttttcctatgtctcttgggaactgcagctgcaatcccgacaaatgcaagattattatctgatcattccaaaccaactgctgaaacggtagcacccgacaacactgcaatccccagtttaagggctgaagatgaagaaaatgaaaaagaaacagcagtatccacagaagacgattcccaccataaggctgaaaaatcatcagtactaaagtcaaaagaggaaagccatgaacagtcagcagaacagggcaagagttctagccaagagctgggattgaaggatcaagaggacagtgatggtgacttaagtgtgaatttggagtatgcaccatctgaaggtacattggacataaaagaagatatgagtgagcctcaggagaaaaaactctcagagaacactgattttttggctcctggtgttagttccttcacagattctaaccaacaagaaagtatcacaaagagagaggaaaaccaagaacaacctagaaattattcacatcatcagttgaacaggagcagtaaacatagccaaggcctaagggatcaaggaaaccaagagcaggatccaaatatttccaatggagaagaggaagaagaaaaagagccaggtgaagttggtacccacaatgataaccaagaaagaaagacagaattgcccagggagcatgctaacagcaagcaggaggaagacaatacccaatctgatgatattttggaagagtctgatcaaccaactcaagtaagcaagatgcaggaggatgaatttgatcagggtaaccaagaacaagaagataactccaatgcagaaatggaagaggaaaatgcatcgaacgtcaataagcacattcaagaaactgaatggcagagtcaagagggtaaaactggcctagaagctatcagcaaccacaaagagacagaagaaaagactgtttctgaggctctgctcatggaacctactgatgatggtaataccacgcccagaaatcatggagttgatgatgatggcgatgatgatggcgatgatggcggcactgatggccccaggcacagtgcaagtgatgactacttcatcccaagccaggcctttctggaggccgagagagctcaatccattgcctatcacctcaaaattgaggagcaaagagaaaaagtacatgaaaatgaaaatataggtaccactgagcctggagagcaccaagaggccaagaaagcagagaactcatcaaatgaggaggaaacgtcaagtgaaggcaacatgagggtgcatgctgtggattcttgcatgagcttccagtgtaaaagaggccacatctgtaaggcagaccaacagggaaaacctcactgtgtctgccaggatccagtgacttgtcctccaacaaaaccccttgatcaagtttgtggcactgacaatcagacctatgctagttcctgtcatctattcgctactaaatgcagactggaggggaccaaaaaggggcatcaactccagctggattattttggagcctgcaaatctattcctacttgtacggactttgaagtgattcagtttcctctacggatgagagactggctcaagaatatcctcatgcagctttatgaagccaactctgaacacgctggttatctaaatgagaagcagagaaataaagtcaagaaaatttacctggatgaaaagaggcttttggctggggaccatcccattgaccttctcttaagggactttaagaaaaactaccacatgtatgtgtatcctgtgcactggcagtttagtgaacttgaccaacaccctatggatagagtcttgacacattctgaacttgctcctctgcgagcatctctggtgcccatggaacactgcataacccgtttctttgaggagtgtgaccccaacaaggataagcacatcaccctgaaggagtggggccactgctttggaattaaagaagaggacatagatgaaaatctcttgttttga

SEQ ID NO: 819 - DNA, 987 bp, Homo sapiens
atggcccgcaccgtggtgctcatcaccggctgttcctcgggcatcggcctgcacttggccgtacgtctggcttcagatccatcccagagcttcaaagtgtatgccacgttgagggacctgaaaacacagggccggctgtgggaggcggcccgggccctggcatgccctccgggatccctggagacgttgcagctggacgtaagggactcaaaatccgtggccgctgcccgggaacgcgtgactgagggccgcgtggacgtgctggtgtgtaacgcaggcctgggcctgctggggccgctggaggcgctgggggaggacgccgtggcctctgtgctggacgtgaatgtagtagggactgtgcggatgctgcaggccttcctgccagacatgaagaggcgcggttcgggacgcgtgttggtgaccgggagcgtgggaggattgatggggctgcctttcaatgacgtttattgcgccagcaagttcgcgctcgaaggcttatgcgagagtctggcggttctgctgctgccctttggggtccacttgagcctgatcgagtgcggcccagtgcacaccgccttcatggagaaggtgttgggcagcccagaggaggtgctggaccgcacggacatccacaccttccaccgcttctaccaatacctcgcccacagcaagcaagtctttcgcgaggcggcgcagaaccctgaggaggtggcggaggtcttcctcaccgctttgcgcgccccgaagccgaccctgcgctacttcaccaccgagcgcttcctgcccctgctgcggatgcgcctggacgaccccagcggctccaactacgtcaccgccatgcaccgggaagtgttcggcgacgttccggcaaaggccgaggctggggccgaggctgggggcggggccgggcctggggcagaggacgaggccgggcgcagtgcggtgggggaccctgagctcggcgatcctccggccgccccgcagtaa

SEQ ID NO: 820 - DNA, 1002 bp, Homo sapiens
atgaatcctacactcatccttgctgccttttgcctgggaattgcctcagctactctaacatttgatcacagtttagaggcacagtggaccaagtggaaggcgatgcacaacagattatacggcatgaatgaagaaggatggaggagagcagtgtgggagaagaacatgaagatgattgaactgcacaatcaggaatacagggaagggaaacacagcttcacaatggccatgaacgcctttggagacatgaccagtgaagaattcaggcaggtgatgaatggctttcaaaaccgtaagcccaggaaggggaaagtgttccaggaacctctgttttatgaggcccccagatctgtggattggagagagaaaggctacgtgactcctgtgaagaatcagggtcagtgtggttcttgttgggcttttagtgctactggtgctcttgaaggacagatgttccggaaaactgggaggcttatctcactgagtgagcagaatctggtagactgctctgggcctcaaggcaatgaaggctgcaatggtggcctaatggattatgctttccagtatgttcaggataatggaggcctggactctgaggaatcctatccatatgaggcaacagaagaatcctgtaagtacaatcccaagtattctgttgctaatgacaccggctttgtggacatccctaagcaggagaaggccctgatgaaggcagttgcaactgtggggcccatttctgttgctattgatgcaggtcatgagtccttcctgttctataaagaaggcatttattttgagccagactgtagcagtgaagacatggatcatggtgtgctggtggttggctacggatttgaaagcacagaatcagataacaataaatattggctggtgaagaacagctggggtgaagaatggggcatgggtggctacgtaaagatggccaaagaccggagaaaccattgtggaattgcctcagcagccagctaccccactgtgtga

SEQ ID NO: 821 - DNA, 1908 bp, Homo sapiens
atggcgaagaagagcgccgagaacggcatctatagcgtgtccggcgacgagaagaagggccccctcatcgcgcccgggcccgacggggccccggccaagggcgacggccccgtgggcctggggacacccggcggccgcctggccgtgccgccgcgcgagacctggacgcgccagatggacttcatcatgtcgtgcgtgggcttcgccgtgggcttgggcaacgtgtggcgcttcccctacctgtgctacaagaacggcggaggtgtgttccttattccctacgtcctgatcgccctggttggaggaatccccattttcttcttagagatctcgctgggccagttcatgaaggccggcagcatcaatgtctggaacatctgtcccctgttcaaaggcctgggctacgcctccatggtgatcgtcttctactgcaacacctactacatcatggtgctggcctggggcttctattacctggtcaagtcctttaccaccacgctgccctgggccacatgtggccacacctggaacactcccgactgcgtggagatcttccgccatgaagactgtgccaatgccagcctggccaacctcacctgtgaccagcttgctgaccgccggtcccctgtcatcgagttctgggagaacaaagtcttgaggctgtctgggggactggaggtgccaggggccctcaactgggaggtgaccctttgtctgctggcctgctgggtgctggtctacttctgtgtctggaagggggtcaaatccacgggaaagatcgtgtacttcactgctacattcccctacgtggtcctggtcgtgctgctggtgcgtggagtgctgctgcctggcgccctggatggcatcatttactatctcaagcctgactggtcaaagctggggtcccctcaggtgtggatagatgcggggacccagattttcttttcttacgccattggcctgggggccctcacagccctgggcagctacaaccgcttcaacaacaactgctacaaggacgccatcatcctggctctcatcaacagtgggaccagcttctttgctggcttcgtggtcttctccatcctgggcttcatggctgcagagcagggcgtgcacatctccaaggtggcagagtcagggccgggcctggccttcatcgcctacccgcgggctgtcacgctgatgccagtggccccactctgggctgccctgttcttcttcatgctgttgctgcttggtctcgacagccagtttgtaggtgtggagggcttcatcaccggcctcctcgacctcctcccggcctcctactacttccgtttccaaagggagatctctgtggccctctgttgtgccctctgctttgtcatcgatctctccatggtgactgatggcgggatgtacgtcttccagctgtttgactactactcggccagcggcaccaccctgctctggcaggccttttgggagtgcgtggtggtggcctgggtgtacggagctgaccgcttcatggacgacattgcctgtatgatcgggtaccgaccttgcccctggatgaaatggtgctggtccttcttcaccccgctggtctgcatgggcatcttcatcttcaacgttgtgtactacgagccgctggtctacaacaacacctacgtgtacccgtggtggggtgaggccatgggctgggccttcgccctgtcctccatgctgtgcgtgccgctgcacctcctgggctgcctcctcagggccaagggcaccatggctgagcgctggcagcacctgacccagcccatctggggcctccaccacttggagtaccgagctcaggacgcagatgtcaggggcctgaccaccctgaccccagtgtccgagagcagcaaggtcgtcgtggtggagagtgtcatgtga

SEQ ID NO: 822 - DNA, 420 bp, Homo sapiens
atgtcatcactacccgtaccatacacactgcctgtttccttgcctgttggttcgtgcgtgataatcacagggacaccgatcctcacttttgtcaaggacccacagctggaggtgaatttctacactgggatggatgaggactcagatattgctttccaattccgactgcactttggtcatcctgcaatcatgaacagttgtgtgtttggcatatggagatatgaggagaaatgctactatttaccctttgaagatggcaaaccatttgagctgtgcatctatgtgcgtcacaaggaatacaaggtaatggtaaatggccaacgcatttacaactttgcccatcgattcccgccagcatctgtgaagatgctgcaagtcttcagagatatctccctgaccagagtgcttatcagcgattga

SEQ ID NO: 823 - DNA, 2388 bp, Homo sapiens
atgtccaagcggcaccggttggacctaggggaggattacccctctggcaagaagcgtgcggggaccgatgggaaggatcgagatcgagaccgggatcgtgaagatcggtctaaagatcgagaccgagaacgtgatagaggagatagagagcgagagagggagaaagaaaaggagaaggagttgcgagcttcaacaaatgctatgcttatcagtgctggattaccacctttgaaagcttcccattcagctcactcaacccactcagcacattcaacgcattctacacattctgctcattcaacgcatgccggacatgcaggtcacacgtcacttccacagtgcattaatccgttcaccaacttaccccatactcctcgatactatgatattctaaagaaacgtcttcagctccctgtttgggaatacaaggataggtttacagatattctggttagacatcagtcctttgtactggttggtgagactgggtctggtaaaacaacacagattccacagtggtgtgtggagtacatgcgatcattaccaggacccaagagaggagttgcctgtacccaacccaggagagtggctgcaatgagtgtggctcagagagttgctgatgagatggatgtgatgttgggccaggaggttggttactccattcgatttgaagactgcagtagtgcaaaaaccattcttaagtatatgactgatgggatgttacttcgtgaagctatgaatgatcccctcctggagcgttatggtgtaataattcttgatgaggctcatgagaggacactggctacagatattctaatgggtgttctgaaggaagttgtaagacagagatcagatttaaaggttatagttatgagcgctactctagatgcaggaaaattccagatttactttgataactgtcctctcctaactattcctgggcgtacacatcctgttgagatcttctatactccagaaccagagagagattatcttgaagcagcaattcgaacagttatccagattcatatgtgtgaagaggaagagggagatcttcttcttttcttaactggtcaagaggaaattgatgaagcctgtaagagaataaagcgtgaagttgatgatttgggccctgaagttggtgacattaaaatcattccattgtattctacacttccacctcagcagcagcaacgcatttttgagcctccacctcccaaaaaacagaatggagcaattggaagaaaggtagttgtgtcaactaacatagcagagacgtctttgacaatagatggtgtggtgtttgtgattgatcctggatttgcgaaacagaaggtctacaatcctcgaatcagagttgagtcccttttggtgacagctattagtaaagcttcagctcagcaaagggctggtcgagctggacgtaccagacctggaaaatgcttcagactttacacagagaaagcttataaaacagaaatgcaggataacacctatcctgagattttgcgttctaatttaggatcagttgtgttacaattgaagaaacttggtattgatgacttggtacattttgattttatggatccaccagctcctgaaactctgatgagagccctggaacttttgaattacctggctgctttaaatgatgatggagatctgactgaattgggatccatgatggcagagtttcctctagatccacagctcgcaaaaatggttattgcaagttgtgactacaactgttctaatgaggtcctatctattactgctatgttgtcagtcccacagtgttttgttcgccccacggaggccaagaaagccgcagatgaggccaagatgagatttgcccacatagatggagatcatctgacactgctgaacgtctaccatgcttttaaacaaaatcatgaatcggttcagtggtgttatgacaacttcattaactacaggtccctgatgtccgcagacaatgtacgccagcagctatctcgaattatggacagatttaatttgcctcgtcgaagtactgactttacaagcagggactattatattaatataagaaaagctttggttactgggtattttatgcaggtggcacatttagaacgaacagggcattacttaactgtgaaagataaccaggtggttcagttgcatccctctactgttcttgaccacaaacctgaatgggtgctttataatgagtttgttctaacaacaaagaattacatccggacatgtacagatatcaagccagaatggttggtgaaaattgcccctcaatattatgacatgagcaatttcccacagtgtgaagcaaagagacagttggaccgcatcattgccaaacttcaatccaaggaatattcacagtactga

SEQ ID NO: 824 - DNA, 399 bp, Homo sapiens
atggccgaggaaggcattgctgctggaggtgtaatggacgttaatactgctttacaagaggttctgaagactgccctcatccacgatggcctagcacgtggaattcgcgaagctgccaaagccttagacaagcgccaagcccatctttgtgtgcttgcatccaactgtgatgagcctatgtatgtcaagttggtggaggccctttgtgctgaacaccaaatcaacctaattaaggttgatgacaacaagaaactaggagaatgggtaggcctttgtaaaattgacagagaggggaaaccccgtaaagtggttggttgcagttgtgtagtagttaaggactatggcaaggagtctcaggccaaggatgtcattgaagagtatttcaaatgcaagaaatga

SEQ ID NO: 825 - DNA, 669 bp, Homo sapiens
atggcagggaagcccaagcttcactacttcaatggacggggcagaatggagcccatccggtggctcttggctgcagctggagtggagtttgaagagaaatttataggatctgcagaagatttgggaaagttaagaaatgatgggagtttgatgttccagcaagtaccaatggttgagattgatgggatgaagttggtacagaccagagccattctcaactacattgccagcaaatacaacctctacgggaaagacataaaggagagagccctaattgatatgtatacagaaggtatggcagatttgaatgaaatgatccttcttctgcccttatgtcgacctgaggaaaaagatgccaagattgccttgatcaaagagaaaacaaaaagtcgctatttccctgccttcgaaaaagtgttacagagccatggacaagactaccttgttggcaacaagctgagccgggctgacattagcctggtggaacttctctactatgtggaagagcttgactccagccttatctccaacttccctctgctgaaggccctgaaaaccagaatcagcaacctgcccacggtgaagaagtttctacagcctggcagcccaaggaagcctcccgcagatgcaaaagctttagaagaagccagaaagattttcaggttttaa

SEQ ID NO: 826 - DNA, 1391 bp, Homo sapiens
gaaggtggcagagcagcctccccaactaagcctgggtcgccgcctcggtgaagggccgcggggccgagcgcgggaagtggcgtccagtcggtttttggcaggcgagagccagagcgtgagaaccctcccacggcgaggccaagccctgagactggactagcaaggtcgtgagtctctctgtcagctctccgcagcgaaggggcgcggggggcggggaccgtgcccgaccgtgccagctcccgctccggaagcggaagtgcaagcactgcggggtcctgtccagtgtgagcccgacccgagctccagtagttccgcccgctggtcatcgcgccctttcccctgccggtgtcctgctcgccgtccccgccatgctgtctctagactttttggacgatgtgcggcggatgaacaagcggcagctctattatcaagtcctaaattttggaatgattgtctcatcggcactaatgatctggaaggggttaatggtaataactggaagtgaaagtccgattgtagtggtgctcagtggcagcatggaacctgcatttcatagaggagatcttctctttctaacaaatcgagttgaagatcccatacgagtgggagaaattgttgtttttaggatagaaggaagagagattcctatagttcaccgagtcttgaagattcatgaaaagcaaaatgggcatatcaagtttttgaccaaaggagataataatgcggttgatgaccgaggcctctataaacaaggacaacattggctagagaaaaaagatgttgtggggagagccaggggatttgttccttatattggaattgtgacgatcctcatgaatgactatcctaaatttaagtatgcagttctctttttgctgggtttattcgtgctggttcatcgtgagtaagaagcctgccttgctgttcctgggaagatgccatagttttcgttactggatgtttggagtagatactggtctgtgattggtggaatggagaacacacgtgttggtgcttctgggtagcactggtttgcattagtttatgtttccatgccagagtttgtgtgggcgggcgcatgtgcaccacagagtgcactcgaggggactttcagtcacaggatttcataattgtcattgtcacactttcaaatttttgtacatcagtgaatttttttatattaaaaggttgagccaaagcccccagtgtttgtattttgaagccaagcttcacttctaaagtgcctacagagacttgtaaatgaaaatgcagctctgcacgagtttgaaaccgtcatacctccttctattaggaatggcatatactgaggtggtcgtaagtcttaacttctaaaattttaaataaaagactttgcacattgaaaaaaaaaa

SEQ ID NO: 827 - DNA, 324 bp, Homo sapiens
atgggccggaagcggctcatcactgattcctacccggttgtgaagaggagggaggggcccgctgggcacagcaagggggagctggcacccgagctaggggaggagccccagccccgcgacgaggaggaagcggagctggagctgctgaggcagtttgacctggcctggcagtacgggccctgcaccgggatcacacggctgcagcgctggtgtcgggccaagcagatgggcttggagcctcccccagaggtgtggcaggtgctgaagacccaccccggagacccccgcttccagtgcagtctctggcatctctatcccctatga

SEQ ID NO: 828 - DNA, 1305 bp, Homo sapiens
atggggcggggcctctgggaggcgtggcctccggccggctcctctgctgttgccaagggaaactgccgcgaggaggcggaaggagcagaggaccggcagccggcgtcgaggcggggcgcgggaacgacggcggccatggcggcctcggggcccgggtgtcgcagctggtgcttgtgtcccgaggtgccatccgccaccttcttcactgcgctgctctcgctgctggtttccgggcctcgcctgttcctgctgcagcagcccctggcgccctcgggcctcacgctgaagtccgaggcccttcgcaactggcaagtttacaggctggtaacctacatctttgtctacgagaatcccatctccctgctctgcggcgctatcatcatctggcgctttgctggcaatttcgagagaaccgtgggcaccgtccgccactgcttcttcaccgtgatcttcgccatcttctccgctatcatcttcctgtcattcgaggctgtgtcatcactgtcaaagctgggggaagtggaggatgccagaggtttcaccccagtggcctttgccatgctgggagtcaccaccgtccgttctcggatgaggcgggccctggtgtttggcatggttgtgccctcagtcctggttccgtggctcctgctgggtgcctcgtggctcattccccagacctctttcctcagtaatgtctgcgggctgtccatcgggctggcctatgctcacctactgctattccatcgacctctcagagcgagtggcgctgaagctcgatcagaccttccccttcagcctgatgaggaggatatccgtgttcaagtacgtctcagggtcttcagccgagaggagggcagcccagagccggaaactgaacccggtgcctggctcctaccccacacagagctgccaccctcacctgtccccaagccaccctgtgtcccagacgcagcacgccagtggtcagaagctggcctcctggcctcctgcacccccgggcacatgcccaccttgcctccgtaccagcctgcctccggcctgtgctatgtgcagaaccactttggtccaaaccccacctcctccagtgtctacccagcttctgcgggcacctccctgggcatccagccccccacgcctgtgaacagccctggcacggtgtattctggggccttgggacaccaggggctgcaggctccaaggagtcctccagggtccccatgccctgagagaatttctagggaagtcatctcacttggccttctgaaggtcctccctaagagtctcctgacaaaagttacttattga

SEQ ID NO: 829 - DNA, 2052 bp, Homo sapiens
ggcacgaggctgcccccttgcttcgcgcgcgcgcagccccgcagcgcagctttggcggcgccagcagcggagccaacgcacccgagtttgtgtttgaggccaccctgaggatcgggacagctgttcctttgggctgcagaaactccgctgagcagaacttgccgccagaatgctcctcctgttgctgagtatcatcgtcctccacgtcgcggtgctggtgctgctgttcgtctccacgatcgtcagccaatggatcgtgggcaatggacacgcaactgatctctggcagaactgtagcacctcttcctcaggaaatgtccaccactgtttctcatcatcaccaaacgaatggctgcagtctgtccaggccaccatgatcctgtcgatcatcttcagcattctgtctctgttcctgttcttctgccaactcttcaccctcaccaaggggggcaggttttacatcactggaatcttccaaattcttgctggtctgtgcgtgatgagtgctgcggccatctacacggtgaggcacccggagtggcatctcaactcggattactcctacggtttcgcctacatcctggcctgggtggccttccccctggcccttctcagcggtgtcatctatgtgatcttgcggaaacgcgaatgaggcgcccagacggtctgtctgaggctctgagcgtacatagggaagggaggaagggaaaacagaaagcagacaaagaaaaaagagctagcccaaaatcccaaactcaaaccaaaccaaacagaaagcagtggaggtgggggttgctgttgattgaagatgtatataatatctccggtttataaaacctatttataacactttttacatatatgtacatagtattgtttgctttttatgttgaccatcagcctcgtgttgagccttaaagaagtagctaaggaactttacatcctaacagtataatccagctcagtatttttgttttgttttttgtttgtttgttttgttttacccagaaataagataactccatctcgccccttccctttcatctgaaagaagatacctccctcccagtccacctcatttagaaaaccaaagtgtgggtagaaaccccaaatgtccaaaagcccttttctggtgggtgacccagtgcatccaacagaaacagccgctgcccgaacctctgtgtgaagctttacgcgcacacggacaaaatgcccaaactggagccctcgcaaaaacacggcttgtggcattggcatacttgcccttacaggtggagtatcttcgtcacacatctaaatgagaaatcagtgacaacaagtctttgaaatggtgctatggatttaccattccttattatcactaatcatctaaacaactcactggaaatccaattaacaattttacaacataagatagaatggagacctgaataattctgtgtaatataaatggtttataactgcttttgtacctagctaggctgctattattactataatgagtaaatcataaagccttcatcactcccacatttttcttacggtcggagcatcagaacaagcgtctagactccttgggaccgtgagttcctagagcttggctgggtctaggctgttctgtgcctccaaggactgtctggcaatgacttgtattggccaccaactgtagatgtatatatggtgcccttctgatgctaagactccagaccttttgtttttggctttgcattttctgattttataccaactgtgtggactaagatgcattaaaataaacatcagagtaactcaaaaaaaaaaagggggcggaaaaaattatcctgaagggggccaggttagggatcacccggtttctttgcacaaagggggccaaaaaggggcggcaaaaaaggaagacacgcgccacggtataaaacaccgactggagacaccgccgggggcgctgtagagacccacactgggggggcagcgggagccacacaagaatagcaagggaaaaacaacagagatgtgagaacaaatgcggtcacgctgataaacagatacatgacg

SEQ ID NO: 830 - DNA, 3332 bp, Homo sapiens
cagtttcagggtctcgccggcagccccagccggcgggcgcggagcgggcagcggggcccggatcgcaggctcctctgggggccccggagttgggaagcggcgtccgggagcccccggaggaggatgggctgcagacacagcaggctgagcagctgcaaacccccgaaaaagctataactgtccagctctgtgcatcagaggaggctgagcggcaccagaaggatataaccagaattctccagcaacatgaggaggaaaagaagaaatgggcacaacaggtggagaaggaaagggagctagagcttcgagacagactggatgagcagcaaagggtcctggaaggaaagaatgaagaggccctgcaagtcctccgggcctcatatgaacaggagaaagaagcgcttacccactctttccgggaggccagttctacccagcaggagaccatagacagactgacctcacagctggaggctttccaggccaaaatgaagagggtggaggagtccattctgagccgaaactataagaaacatatccaggattatgggagccccagccagttctgggagcaggagctggagagcttacactttgtcatcgagatgaagaatgagcgtattcatgagctggacaggcggctgatcctcatggaaacagtgaaagagaaaaatctgatattggaggaaaaaattacgaccctgcaacaggaaaatgaggacctccatgtccgaagccgcaaccaggtggtcctgtcaaggcagctgtcagaagacctgcttctcacgcgtgaggccctggagaaggaggtgcagctgcggcgacagctccagcaggagaaggaggagctgttgtaccgggtccttggggccaatgcctcgcctgccttccctctggcccctgtcactcccactgaggtctctttcctcgccacatagggtgcagggcctgggcccaccacgacgcctgaagtcacagctccttccaaggtttttctggagaagacagcaggagcctctcagttcttttccaggaaggaacgagggtgggagcgagatggagatcctgggtgtgtgcccagtgagccctggggccttgagttacatggaatcacccacagggttttggaggccccgagaagcgtcttcccttgagttggccaagggaataagcaagaggagacatttcctccctgccccagcactctgtcccaatccgagaagttccgaggctttcccaggggcagtctgtgtcacgctggccatttgacataaaggagacagcccctggtcccagcttgtcagctctgctgccgacttgctgacttatcaacttcctctaggtgtttccactccaccctggcctgctcagagcctcagtttacccctgcattaaaatggtggggggactggtcaaaggactcttatgtcactgcagtgtcccattctaggattgtctgaaggccagagtaggggttggggggagtgtggacaaaccccgcaaatcagagtggggaaggtgagtggtagagagggggtctctgaaggcccttggggctgacagggccaggcagcctccccagctgaggcatcattcctgggccagagtcgtgtccaccaagggacagtagccagagctcctcttcctttaccaggcaaggtgcatcccctcagccctcctggcccttcagtcttggtgccacctgggcacaggggcaagcttggtggttgtgagtccattcatctatcagagctggaacctcatccctgcacagatgaggaaaccaaggcatggagcagttcccagagtcgaatctagatctcatctgtcatccgggtcttatcctttgctctgtttttctcttcaggctctggaaaatcagatctgtgacttaatcttcctctccctggccctcacccacttagtttctttttcattcctgctccctgccttaactcctcctcccactgcccctgatcccaggcccaggcttttacaacctggtgctcagcttccccatcagtgaaaaggggtggctagagtaactaacctcagcaggccgtccagtcctgatagtctgtggatttcggatccttctcaggaagcttcatgtctaatggagactataattataactcctgttctgcatagagcatttgcatcaaaggctttccatacccctccctcccctggtcctcataagatccttgaagcaggttcctattcctcattggcaacatggcaaacagatcacaggagtcaaagggccttgctcaaggtccccagcttcagccccaggccctaagccagcgtcagaacagtcaatctgcatttttcatcagtcattctatagtgacatcatcccagactgccttctgtattcccctgtgtacagtctccttctgtttctaggtttagaagttcagaggtgactgtgtttctccatttccacagccaaatgggggaagaggtgaggctaggggagtgctgtgctgattctccagccatggtcagacaggtcacccaggagcctcgaggaaagccctggagggaatcacatgtgtactttttcatgaagctttttgcaaagcacatctgcgatacactagtttattgaactaatgtccaggagtagacgtgattggtggccaagttatttggggacacctaaacagatcagtgacctgaatgacttctcagaacctttaatatgccaatgtgtgtggcaaacttacaagaagggagctaagtatccagcctctcccaaacctctttgaacaaagcttctgtccctcccacacctctcacctcacaggcacatcaggctgcagaatgcgctttagaaagcattgttttagtccaggcacagtggctcacgcctgtaatcccagcactttgggaggccgaggtgggtggatcacaaggttgggagattgagaccatcctggctaacacagtgaaaccctgtctctactaaaaaaatacaaaaaattagcttggcgtggtggtgggcgcctgtagtcccagcagcttgggaggctgaggctggagaatggtgtgaacccaggaggcggagcttgcagtgagccaagatcgcgccactgcactccagcccgggtgacagagcaagactccgtctcaaaaaaaagaaaagaaaaaagaaagcattgttttaattgagaggggcagggctggagaaggagcaagttgtggggagccaggcttccctcacgcagcctgtggtggatgtgggaaggagatcaacttctcctcactctgggacagacgatgtatggaaactaaaaagaacatgcggcaccttaaaaaaaaaa

SEQ ID NO: 831 - DNA, 3128 bp, Homo sapiens
ttttttttttttccatattgaatcaatatttatttcaggacatgccatgtcaaaataaaacaaagagtcaacccttgcctttaacaattatattgtattataaaagcactttacaactccatcccatctttaagtataagttactggtatgtgggctaatgattatctgtaagcatttctctattcagatccataatccaagtgctctctgaatattacaaggtgacaataagtgggaagtggaggaggaagaggaaagagaggggactaaggttctcccagtttaaggttttgttccaatgaggggatgaggaagtatgaagatatttttgttgtcttttcatctttatactgtgttaagtaatgcttacaacataaattcagcaggcttttcctgagctgtaactcagaagttttcgtcctgcaaacaatgtatttacaaatgtgtttattagcttacacagcaatctcacaataactagtaaagattaaaagggcacactcctagtatatttgtttgcagtgttttaagggaaatacatattgccatggtgaagctctaaatagattcaacgaaacatctgaagattgaaagttgttaaaaaaaaaaaaggcaaagaaataaatatcaccaaagaaaaaagattaattgtagcttaaatataaaactaaatcaccagttaattaaactatacagatctaatacaaaccaaaaccagcctgaaagacccaaccttaaaaaatgctaaaaaataaggcataaatctgcataatattgagttttatttccattctctcctttccctctactatgtatgctttacctgatctgcctctaggggcttacaagaaaacggtttccggtttccgtcttcaatttgacctcaaatgtcctgagcaaagtttttgttattctgctgagggttcttttgttggtaagctttagacatcattatttctactaattcagtagttttgatcgtagcgccaaatttaaattcttccactggttcttctggaaggaattaaaacttttacagtgccttgcctgcacagtattatgtttttaaaaaagaaaacccaagcaaaatctattgcttaaagaggtttcttattttttaaacaaacagaataactcttgacaattttaaaaccttgggagaaacagttcattagaacttcattttcttaccgtgaagaattaaatactaaaaacctgttctgaagcacttggttaattttctctcccagagtctaataaagcacatgtgaaagagccatttgttttagtcagaaatacatcttatgttcttctacttctaagtactcagtatgttctttaggactcattttgaagatgcaccaggagccttttctcattcaagcactgcctaccatgatggctgaattttgacctcaaagaagaccgtaatttatatcagtgctcaagaataattttggacatcttggtccgtagcctacagcaagtggtatctgtaaaattaaaggataattccaatgggcttggtagaactgctgctttgccatctcttgtttgttttgaggaagtcgggggaggctaggtaagaatagggtaatagggaatgggggtaagtgagaggtgagaaaagcaaggagagataaagtaggctgtgaacatagcgctcgttaaccaagccatactcatactgttgagatttccatcattttgaagtacattatcataacattaaaaaagaaaaaaatgttaagaaaatgtatctaatttttaaagttatcactggaatatgctgaaatattttggctttttgtaaaatataaataatgaagacactgacttttgttgtgcttgtgaagctaatagatcatctccacgagacaggcagcaatgatgaattgcaatacgttattactgaagggaaaaggttcaagccaatattcacactgcagtcaatgaaagagtaagggggccaaagcagtgagcttctgaagaaggttgaagatgacatgggagattagcaggaacagcctccttcactgactggttgctcctgaggcttttccagttttatgtcaatcatatcttctctgcttctgtcctgtgtgctttccattcccggcaaagctgctgctacacgtcgaaagagctgctttacattgtatccagcttttgcactagtttcaataaacataacattcagctctttggctttcctctctccctcctcaattgacacttgcctcttgtcagcaagatctgttttatttcctactagcatgatgataacatcacttcctctttctgttctgacatcatcaatccactttgtagtttgctggaatgagttaacatttgtgatatcgtaaactactacagctgcagcagaatcacggatgtaactgggaatgaggctacggaaacgttcctgacccgcagtatcccacagctgaagcctgattgttcgatcctccaagtacatagtttttgataaaaagtcaatgccaattgttgcctgataggtgttgtcaaaactgtcatacatgaatctggtgatcaaagatgtctttccaacgctttgctcccccaggaacaccagcttgaatttcctcagcggattcccgaagtctccgcccgtggacattgtggaactagaggagcggccgccgcctcagcctagagacctcccggaccgatgctgctccagccagctgacgaaaaaggcgagcggaagggcgggcaccgagctctctcggcccctgcaaggcccggtggaggagcccggctggagggcagcaggactctccacagactggcagccgccgccgcctcccggcagagtagcctagcaccgagcgaggcccgcggctgggaagggaaggagggcggtgtcggcaggagccaggggtgtcctctggcttcccaaagctagggccgttccctccttccgcactcggctcccagacctggggaagagaagctgagggtggcggagccggaaccgcagacgtatctgggacctctcacgcgcagcgcctgagcttccacagctgccgccgccgccgcagcccaacctgctgagtgcgcgagcctctggcgcggcgcggggcgagcccgggcgcgagcctgc

SEQ ID NO: 832 - DNA, 2116 bp, Homo sapiens
tgaaccgaggcaagggggcgcggcgcacgcagtatggcgcccaacatctacttggttcgccagcggatcagtcgactcggccagaggatgtccggcttccagatcaacctcaacccgctcaaggagccactcggcttcatcaaggtcctcgagtggattgcttctatctttgcttttgccacctgtggaggttttaagggccaaacagaaattcaagtgaattgtcctcctgcagttactgagaataaaactgttacagctacttttggttatccattcaggttgaatgaggcatcatttcagccacctccaggtgtaaacatatgtgatgtaaattggaaagattacgtcctcataggcgattactcttcttctgcacaattctatgttacctttgcagtctttgtgttcctgtactgcattgctgcccttctgctttatgttggctacacgagtctgtatctggatagtcgtaaacttcctatgatagactttgttgttacacttgttgccacttttttgtggttggtgagcacttcagcctgggctaaagctctgacagatattaaaatagctactggtcacaatattattgatgaacttccgccttgtaagaagaaagcagtactgtgttactttggctctgtgaccagtatgggatccctaaatgtatctgtgatatttggctttctaaatatgatactctggggaggaaatgcttggtttgtgtacaaggagaccagcctacacagtccatcaaatacatctgcccctcatagccaaggaggtattccacctcctaccggaatataattaaagggagaaatacactgtatgaagtatatgttgatactatgacatgttgccaacaccttgagaagcattatttgtttctaataaaagtaatggctttgtcaatatattggtgggtttaaaactttgctgcttttttacataaagcctgtgcctttcctagaaagttaagatgtaaatgtattctcacatgtaaatttgaaagttcaggggtctattatgaaatgatacacatttttaaatgaaccataatttttttcactaagctgtttgccttccaaagtgtttacaccttaagccttaacatgtatcttcattcagaaaacagttatattgtcataccatagtaggaagaaaaacctttatttggaatatacactactgtaagtttgtacagatcatatacctaccacctgtctttgcttaaagagccttgattacataaatatgtaggaaaaaacatattgagttcaaaatttatatctaacattgtttatgttatgatttttttttaattgcaaagactaggtgtatatttttttctgtttttctaaatgacccgtggtacttaataggtgtactaaaattgtgttgggagcagggatttggaaatttctgagagatgtgtagttaatttagtaattctgtttcatgagatatgatctgttatgctagtggtttaataggcttgctatgtaagtagaacgtggctcaactagatatctttatatgtatgggcattactcttagtgatatttgtttcctgtcctttgttgctcatgctgtttaagtgcaggctgagacccagcctctttgtaagtacagtaaaataatccaccgttttttacagaccctagtcaaagggttaaaaaaattaagattgctttccatgtttgaaatttaccattgagagtcaatgaagttgctattttgagtttagcattgatattgtgaaaataagtgcaatttggatttcatgtttcttaatattcattcttgtttcacaaatgaatgattaaggaattatgcatcataaaggaacctaagtgaggtatatgatgagtgtattgtctttgcacacacatataggtatattctgaatacaagcttattcacattttgcttcctaatctttttgttgtacagggattcaggtttcttattcttacaacatgattgtttatatgtgaagcacatcttgctgttgccttatttttgatgcttttattcatgacaagaattgtcaatataagaatgtatatcttttttgcaaccaatttaataaaggagttgaaaaaaaaaa

SEQ ID NO: 833 - DNA, 4120 bp, Homo sapiens
cggcagggttggaaaatgatggaagaggcggaggtggaggcgaccgagtgctgagaggaacctgcggaatcggccgagatggggtctggcgcgcgctttccctcggggacccttcgtgtccggtggttgctgttgcttggcctggtgggcccagtcctcggtgcggcgcggccaggctttcaacagacctcacatctttcttcttatgaaattataactccttggagattaactagagaaagaagagaagcccctaggccctattcaaaacaagtatcttatgttattcaggctgaaggaaaagagcatattattcacttggaaaggaacaaagaccttttgcctgaagattttgtggtttatacttacaacaaggaagggactttaatcactgaccatcccaatatacagaatcattgtcattatcggggctatgtggagggagttcataattcatccattgctcttagcgactgttttggactcagaggattgctgcatttagagaatgcgagttatgggattgaacccctgcagaacagctctcattttgagcacatcatttatcgaatggatgatgtctacaaagagcctctgaaatgtggagtttccaacaaggatatagagaaagaaactgcaaaggatgaagaggaagagcctcccagcatgactcagctacttcgaagaagaagagctgtcttgccacagacccggtatgtggagctgttcattgtcgtagacaaggaaaggtatgacatgatgggaagaaatcagactgctgtgagagaagagatgattctcctggcaaactacttggatagtatgtatattatgttaaatattcgaattgtgctagttggactggagatttggaccaatggaaacctgatcaacatagttgggggtgctggtgatgtgctggggaacttcgtgcagtggcgggaaaagtttcttatcacacgtcggagacatgacagtgcacagctagttctaaagaaaggttttggtggaactgcaggaatggcatttgtgggaacagtgtgttcaaggagccacgcaggcgggattaatgtgtttggacaaatcactgtggagacatttgcttccattgttgctcatgaattgggtcataatcttggaatgaatcacgatgatgggagagattgttcctgtggagcaaagagctgcatcatgaattcaggagcatcgggttccagaaactttagcagttgcagtgcagaggactttgagaagttaactttaaataaaggaggaaactgccttcttaatattccaaagcctgatgaagcctatagtgctccctcctgtggtaataagttggtggacgctggggaagagtgtgactgtggtactccaaaggaatgtgaattggacccttgctgcgaaggaagtacctgtaagcttaaatcatttgctgagtgtgcatatggtgactgttgtaaagactgtcggttccttccaggaggtactttatgccgaggaaaaaccagtgagtgtgatgttccagagtactgcaatggttcttctcagttctgtcagccagatgtttttattcagaatggatatccttgccagaataacaaagcctattgctacaacggcatgtgccagtattatgatgctcaatgtcaagtcatctttggctcaaaagccaaggctgcccccaaagattgtttcattgaagtgaattctaaaggtgacagatttggcaattgtggtttctctggcaatgaatacaagaagtgtgccactgggaatgctttgtgtggaaagcttcagtgtgagaatgtacaagagatacctgtatttggaattgtgcctgctattattcaaacgcctagtcgaggcaccaaatgttggggtgtggatttccagctaggatcagatgttccagatcctgggatggttaacgaaggcacaaaatgtggtgctggaaagatctgtagaaacttccagtgtgtagatgcttctgttctgaattatgactgtgatgttcagaaaaagtgtcatggacatggggtatgtaatagcaataagaattgtcactgtgaaaatggctgggctcccccaaattgtgagactaaaggatacggaggaagtgtggacagtggacctacatacaatgaaatgaatactgcattgagggacggacttctggtcttcttcttcctaattgttccccttattgtctgtgctatttttatcttcatcaagagggatcaactgtggagaagctacttcagaaagaagagatcacaaacatatgagtcagatggcaaaaatcaagcaaacccttctagacagccggggagtgttcctcgacatgtttctccagtgacacctcccagagaagttcctatatatgcaaacagatttgcagtaccaacctatgcagccaagcaacctcagcagttcccatcaaggccacctccaccacaaccgaaagtatcatctcagggaaacttaattcctgcccgtcctgctcctgcacctcctttatatagttccctcacttgatttttttaaccttctttttgcaaatgtcttcagggaactgagctaatactttttttttttcttgatgttttcttgaaaagcctttctgttgcaactatgaatgaaaacaaaacaccacaaaacagacttcactaacacagaaaaacagaaactgagtgtgagagttgtgaaatacaaggaaatgcagtaaagccagggaatttacaataacatttccgtttccatcattgaataagtcttattcagtcatcggtgaggttaatgcactaatcatggattttttgaacatgttattgcagtgattctcaaattaactgtattggtgtaagatttttgtcattaagtgtttaagtgttattctgaattttctaccttagttatcattaatgtagttcctcattgaacatgtgataatctaatacctgtgaaaactgactaatcagctgccaataatatctaatatttttcatcatgcacgaattaataatcatcatactctagaatcttgtctgtcactcactacatgaataagcaaatattgtcttcaaaagaatgcacaagaaccacaattaagatgtcatattattttgaaagtacaaaatatactaaaagagtgtgtgtgtattcacgcagttactcgcttccatttttatgacctttcaactataggtaataactcttagagaaattaatttaatattagaatttctattatgaatcatgtgaaagcatgacattcgttcacaatagcactattttaaataaattataagctttaaggtacgaagtatttaatagatctaatcaaatatgttgattcatggctataataaagcaggagcaattataaaatcttcaatcaattgaacttttacaaaaccacttgagaatttcatgagcactttaaaatctgaactttcaaagcttgctattaaatcatttagaatgtttacatttactaaggtgtgctgggtcatgtaaaatattagacactaatattttcatagaaattaggctggagaaagaaggaagaaatggttttcttaaatacctacaaaaaagttactgtggtatctatgagttatcatcttagctgtgttaaaaatgaatttttactatggcagatatggtatggatcgtaaaattttaagcactaaaaattttttcataacctttcataataaagtttaataataggtttattaactgaatttcattagttttttaaaagtgtttttggtttgtgtatatatacatatacaaatacaacatttacaataaataaaatacttgaaattcttaacacacaaccaaccgacacacaccagacggcaaccacaacaacattgagcgcgtcggcgcccccgagaaggttccaaaacaccgggagggcgcggcccataataaaggacagggaacaggtcccaagaaaccggccgacagggtcgtcccccaaaaaacccggggacgcgtcgaaacaagggcgggccagcgccaacggaccggcagcaaagccgggcggaagccgcacagcaccccaccacccacgacccgcgcagacacatagacggccgagcaccag

SEQ ID NO: 834 - DNA, 1835 bp, Homo sapiens
tagccgggttgacccgggtgtttgggagttattggaggttccctttatggggggcccgcgcgatgcggcggcgtgtggtgccacgggagctggtggtgccggggatcgcgcgtgggcacgtgggcccgctgtccggtgactgctttgtgtccgcacccgcgggatttggtgtccctgcgagtctttggtgtttggtttgcagtttttttttttgagacggagtctctttctgtcccccaggctggagtgcagtagcacgatctcagctcactgcaacctccgctcccgggttcacaccattctcctgcctcagcctcccaagtagctgggactacaggtgcccgccaccgcgcccggctaaattttttttgtatttttagtagagacggggtttcaccatgttagccaggatggtctcgatctcctgacctcgtgatccacccgcctcggcctcccaaagtgctgggattacaggcgtgagccaccgcgcccggccccctcctccccaatttttcatacagttgcccctatacaatatacacacccttgagggcaggtagaagtccagcccacctgcgccagggacgctgtggggagcatttttctctgagttgctaagagaaccctgatgggcggtgagcagaggaaccacagaacagccagggctcaaggctggcagcggataggccaggagagatcgctaggccccagaaagccccctactttcagtcagggtgggcaagagggtcttcgcagtgaagtgggaggcaggcctggaggagggagccagggagacccctgggagccctgaggttgggggccaggcagggagatggggatagcagctgcctcagtacttggggaccttgctgtagtcttcggaatgcacgtgccggcacaagcagatggacaggaccatccccaggagctcgatgatggccacacccacgcccacgccgaggatgatgcccaggttctcctgcagccacgcctgcaccttctccatgcagccctcctggtacacaggccagtcctcagggtggttgccactctgggtcctgttgccgggggcctcgcagaagcccttcctcacagaaaggctgttgtcctcttcccccttgacttcgcaggaacaggggtaggtgacctcagggcgattcatgagctcagcgttgtctgtccagttgtagaagctgacccagccgcagcacttcacctgagcctgcacgtagtcccaggcatcctgcaggctgtcctcgcgactgctgttgtagtctcgaatgagctcagtcacgatgccgcccatctcctgcttcagcttgcccatgttgaagtagaagagggccccggccgtcacctgggcaatgaggatcaggagcaggaaagcaaagtacagccccagcaggcagcggacctcgttgacggcgccgatgcagcccaggaagcccatgagcatagtgactgcccccacgccgatgaagacataggcccccatcctaagcgagctggaggaggtttgcaggacagagatgaaactgctcttgtcggccaggatccacaccccgaagcccaggatcactgcgcccaggataaagaagatcaagttgaagaggaagagaaagtatttggtgactttgatacaggctgagcccatcccgccagtcctggagcttccttccacgaaaccagtgcagctggtcacagggcccacttctgcctgtgcccacgtgtcgtccacacagcagcagggaggactctgcgggttctgctttctgctccgcgctgcaggcccagcgtcacccgctcgtgcctcagtcggcgtcggactgcacagc

SEQ ID NO: 835 - DNA, 4036 bp, Homo sapiens
ttttttttttttgttgcattgtacttattttgtacagttaccttttatttatagcgaaaatgggttttttcatttacagagtaacaaagatttttctttaaataaatgtatttcaacgaaaatgaactgacttaaagaaaaaatattaaggaaataatcacaaagatggtacacacggatcattaaaagatacggatgtatagatacatatgtcacaaatgattaagacttaaaaaatgtaaccctcccaagaagtgggagcctcccaaagtggagaaggcaaatacaatttccatttggggggataaggagaccgacttgcagagaggattagtaggttgccccagaacacacagcaaaggtgtggagccccttgtggtctgaaacattcaggaccctatggcaggaggtgagactgtccaataattcagcttttttcaaggcatagacccaagactcagacaacctcaagaaaggggagtttattttggatataaaggcaacaggaatcctgaccaaatggtcagcagccctctcagcagtaggtatttttgtattgggaacccaaggtcctctgcttagtggctcaacgcttgtctacctttccaaggctcaacgcttgtggagccttgtccacaagcacctgctcccaagggcctccctccctgagttcaaacgcccaagacagagttgatctgattggctagttcaggcccagcctacctgattggacagagcttggtgccaaaccccctcataggctgctggtcagagcctgtgggggcgtgtggtcaggtgcccaatcagctgtgagcaaggcctgtaagtgcaggtgcctgagggctcccaggtcagagttagctgggactggggtcactgtcctgctggggtggaatgttgtttgagccattgcaacgtgatctgcctaggaaagatacgtggaggggtcggggtagggggttgagccccttgcaggagggggcatgccagacctaatgggcacgggactctgcctctctgtgtgaatgtcaggcgcagggagcccagacgaggtggtgccaggtaattaattcgttcatccagggtatacgacggggtgttgggcactgtgtctggggcagtgaaaaataatgaggccctgccctgtggagctgcccttctggaggccagtgtgccagtccctgagctgcagaggagacccctccagtggagggggcagtgggaggtcccaggcctggcagcatcagggcccaccactaggcggggctgctgcctgggcctcggactccagggtttactccccatcagcttctcttgtgggtctgtgaagccactgtgggaagatgcagcaggcatccactttgtggggggatctgtgcccttacttgggccccagcattaaagatacagcagccaagcactctgaggcctcagagatcccaaaggaatagtaacagggcctctttctccaggcgccctgggtccctgacagcttctccctccagcactgacgctagaagtttctggcagattaagggaggcagtgcttccctccaggagaagcaaaaccggcacttgaagagtcagggaagtttgtcacctagatgagggggagcgcacagcagccccagggaatagcatgtgcaacagagggggtgtgagggagctctgagtggctcaggaggacggtagggaggattgcagaaggggatgtccccacacgacaccggaggtacaagtaccaggctgagaagtggggctgagggcagtgggacctgtgcaaggttttgaaccgagggggagcgtggccatatttgggttttggaaagcacgctcaggctgccctgtggacggggaggggagggaaggaggaggctggggcagaaaacccagggaagaggtcagggcagggagccctggagagccgcgaggactgatattggtgaatagctgcagggctggagaggagcgatgcttctgagcctaaattcgtgggatcctgtgattaacgagggagttggggagttactgcccccctgcaacacacacagttcctggctcgggcagcaggacccgggagcagcagtggaggtttggaaatggatggaccaagtgtgcaggactgggtgggggccatccgggtggagaagtccagctgcaactggacactgagtgtcctcagcagtggactgaggaccctcaacagggtccttctgaggctcggcgcagagcaggcagctgcctgcctcccaccctggccatctgtctacaccaagtgagttgggtcctgaccctggagttcttggagggacaagtaggcatcagtgttcaggggcaggcgagcattaagggccctgaactccccctgcccaggaggcctggaccaggggaaactgactccctccctggggccagcgtcagggacctcctccccagcctctcgcagcaccagctcagggggtggctgaaaatccaccaggtctgggactcctggggtgggaggccccaggggctgggggtcccagtctctggggactctttcttgcaaagaagggggcatcctctcttcaccggccccactgcccccaggggcagtgcttggggggctggggccaccgaggagactgggggagaagagcagcaggtcatccctggaggggaaggtgcagtaggcgtcgtcctcccctgacagaggctgcaggggttggggggaagaccctgtgggtgccccggccacaccctcatcagggtcttcctctgagtaggggtcgtaagtaaagtacacctggcaggcctctatctccaaggcatccgggaggtggaagaagaagtaaccctggttggtgaagcagctggtcagcgagtggttgctgcttaaggatgcgggctcaggcaccttgtcctgctgcaggagcagctgcgtcaccttgtccctctccagcacttctagtggcgagatctcaggtgccaggccgccagggctgaaggacgatgaggggaagggcgaagagagccacttctggacgtctcctccatgctctgagctcagctgggaaaagaacttcgaggggtctggggtgttacacttcaggaccttcttcagccatggcccggtgttcctgcagttgatcagcaagtacactaagatgatgaagccaaaagccccgctgagacccacgaggaggtggccgagccacggaatggtgtccttcccaagggctgcaggctttgtcctgaaggccaggggctggctccaggggctccaggtcgtgaactcgccttgcagaggcttgacccgcacctgaaactcatactgggtgtctggggtgagcgtctccaggcagatccattcctgcttctgcttgagagtcagcaggggggcctcctcccaggtgtggcctggggacagcgtccgggcctcgaactccaggtgtctttcaaagtagtgggaggcttgggagatttcccagcttatgttgcatctgtgggtctccacgtggacaacttggagggagatgggggccatcaggcgaaggttctcaaagggcttgaagtcctggatggccatcaccctccatcgcaccccctcacggcacagcaccctcagggtgacgatgtcaactgtggtcagtttctgagaatctggggctccgaggatcaggttgcaggcccaggatgcttgactcacggggagcagctcacaggtttggttccaccgccgtctgtccggccaggcatggacttggcaggaagtgtcctgcagagccccatcttggctccagacacaggagatgttggctctcgagttgtagaagcatgtgaactgggaagtgccattcaccgctgcagatgcccaagaggtagccaggggcaggaggaggatgaggaggggcagacgccaggacagagcaggggccgccattacatccacagggtggagccgaggaaggaagccctggctgagacatggggcggtggcagcgcgcgctctccagtcctccccggtgctgggaccgtggccatctctccagggccc

SEQ ID NO: 836 - DNA, 2584 bp, Homo sapiens
gggggcgtggccccgagaaggcggagacaagatggccgcccatagcgcttggaggacctaagaggcggtggccggggccacgccccgggcaggagggccgctctgtgcgcgcccgctctatgatgcttgcgcgcgtcccccgcgcgccgcgctgcgggcggggcgggtctccgggattccaagggctcggttacggaagaagcgcagcgccggctggggagggggctggatgcgcgcgcacccggggggaggccgctgctgcccggagcaggaggagggggagagtgcggcgggcggcagcggcgctggcggcgactccgccatagagcaggggggccagggcagcgcgctcgccccgtccccggtgagcggcgtgcgcagggaaggcgctcggggcggcggccgtggccgggggcggtggaagcaggcgggccggggcggcggcgtctgtggccgtggccggggccggggccgtggccggggacggggacggggccggggccggggccgcggccgtcccccgagtggcggcagcggccttggcggcgacggcggcggctgcggcggcggcggcagcggtggcggcggcgccccccggcgggagccggtccctttcccgtcggggagcgcggggccggggcccaggggaccccgggccacggagagcgggaagaggatggattgcccggccctcccccccggatggaagaaggaggaagtgatccgaaaatctgggctaagtgctggcaagagcgatgtctactacttcagtccaagtggtaagaagttcagaagcaagcctcagttggcaaggtacctgggaaatactgttgatctcagcagttttgacttcagaactggaaagatgatgcctagtaaattacagaagaacaaacagagactgcgaaacgatcctctcaatcaaaataagggtaaaccagacttgaatacaacattgccaattagacaaacagcatcaattttcaaacaaccggtaaccaaagtcacaaatcatcctagtaataaagtgaaatcagacccacaacgaatgaatgaacagccacgtcagcttttctgggagaagaggctacaaggacttagtgcatcagatgtaacagaacaaattataaaaaccatggaactacccaaaggtcttcaaggagttggtccaggtagcaatgatgagacccttttatctgctgttgccagtgctttgcacacaagctctgcgccaatcacagggcaagtctccgctgctgtggaaaagaaccctgctgtttggcttaacacatctcaacccctctgcaaagcttttattgtcacagatgaagacatcaggaaacaggaagagcgagtacagcaagtacgcaagaaattggaagaagcactgatggcagacatcttgtcgcgagctgctgatacagaagagatggatattgaaatggacagtggagatgaagcctaagaatatgatcaggtaactttcgaccgactttccccaagagaaaattcctagaaattgaacaaaaatgtttccactggcttttgcctgtaagaaaaaaaatgtacccgagcacatagagctttttaatagcactaaccaatgcctttttagatgtatttttgatgtatatatctattattcaaaaaatcatgtttattttgagtcctaggacttaaaattagtcttttgtaatatcaagcaggaccctaagatgaagctgagcttttgatgccaggtgcaatctactggaaatgtagcacttacgtaaaacatttgtttcccccacagttttaataagaacagatcaggaattctaaataaatttcccagttaaagattattgtgacttcactgtatataaacatatttttatactttattgaaaggggacacctgtacattcttccatcatcactgtaaagacaaataaatgattatattcacagactgattggaattcctgcagttgaaaagcacacacaataaagaacccctcgttagccttcctctgatttacattcaactctgatccctgggccttaggtttgacatggaggtggaggaagatagcgcatatatttgcagtatgaactattgcctctggacgttgtgagaattgtgctttcaccagaatttctaagaatttctgctaaatatcacctagcatgtgtaattttttttccttgcctgtgacttggacttttgatagttctataagaataaggctttttcttcccttgggcatgagtcagatacacaaggacccttcaggtgttactagaaggcgtccatgtttattgttttttaaagaatgtttggcactctctaacgtccactagcttactgagttatcaggtgcaggtcagactcttggctacagtgagaggcagcttctagacagagttgcttaatgaaagggtttgtaatactttacaaaccattacctgtacctggcctggcctccaaaatattaacattctttttctgttgaaactcgcgagtgtaactttcataccacttgaatttattgatatttaattatgaaaactagcattacattattaaacgatttctaaaatc

SEQ ID NO: 837 - DNA, 949 bp, Homo sapiens
ctcccgcgggtttctcctcttctcgcgtgtatattgtgccccgccttggggcctccttacccgggcgaggcccttcttcttgggggcccgcggggtgtctccccctccgtcttccggggggcaactcctatagagcgctctggcgaccagagggcttattctgtcatccgggggaaccgggcgtggtgggccaccatcagttcccggctctcaccactggccctgtgcccgccaccagaaatcctgtctgtgattagggtcagccttgtcagtcactcgatggcgaagtgtaggcccctgggtgttgctggggtccgcccccggtcccgcccccgtctatctgccggcccatgataggtggtccccaggggaacttctcggctttccactctggaggtgatgcctccggccccccaacccggtgctggcccggctccccgagcagcttgttaggtaacccccatctttttcctccggcgtagtgaccatcatgagcctcctcaacaagcccaagagtgagatgaccccagaggagctgcagaagcgagaggaggaggaatttaacaccggtccactctctgtgctcacacagtcagtcaagaacaatacccaagtgctcatcaactgccgcaacaataagaaactcctgggccgcgtgaaggccttcgataggcactgcaacatggtgctggagaacgtgaaggagatgtggactgaggtacccaagagtggcaagggcaagaagaagtccaagccagtcaacaaagaccgctacatctccaagatgttcctgcgcggggactcagtcatcgtggtcctgcggaacccgctcatcgccggcaagtaggggccgcctgtctgttgacagaactcactcctctgtcctatgaagaccgctgccattggtgttgagaataataaagctctgtgtttttttctaaaaaaaaaa

SEQ ID NO: 838 - DNA, 1216 bp, Homo sapiens
aaggatccttaattaaattaatcccccccccccccccgaggcacgtagctcagcggcggccgcggcgcgtgcgtctgtgcctctgcgcgggtctcctggtccttctgccatcatgccgatgttcatcgtaaacaccaacgtgccccgcgcctccgtgccggacgggttcctctccgagctcacccagcagctggcgcaggccaccggcaagccccccccagtacatcgcggtgcacgtggtcccggaccagctcatggccttcggcggctccagcgagccgtgcgcgctctgcagcctgcacagcatcggcaagatcggcggcgcgcagaaccgctcctacagcaagctgctgtgcggcctgctggccgagcgcctgcgcatcagcccggacagggtctacatcaactattacgacatgaacgcggccaatgtgggctggaacaactccaccttcgcctaagagccgcagggacccacgctgtctgcgctggctccacccgggaacccgccgcacgctgtgttctaggcccgcccaccccaaccttctggtggggagaaataaacgccgagacgcactgggggccggatgtagaatcctgcttatctgtgaaatgcagttaacacatcagctggacctatttcccgaatgcagggtaacccttctgttatttaaagatgtaaaaaatgcgggagacttgagaagaaaggccatggaaggcaccatcgatggatcactgataaatcctacagtgattgttgatccatttcagatacttgtggcagcaaacaaagcagttcacctctacaaactgggaaaaatgaagacaagaactctatctactgaaattattttcaacctttccccaaataacaatatttcagaggctttgaaaaaatttggtatctcagcaaatgacacttcaattctaattgtttacattgaagagggagaaaaacaaataaatcaagaatacctaatatctcaagtagaaggtcatcaggtttctctgaaaaatcttcctgaaataatgaatattacagaagtcaaaaagatatataaactctcttcacaagaagaaagtattgggacattattggatgctatcatttgtagaatgtcaacaaaagatgttttatgaaatgtcagaaatattaacaaaaattctcagcattaaagaaaacattgattttcctttcctgactataaaaaaaaaa

SEQ ID NO: 839 - DNA, 6497 bp, Homo sapiens
ttttttttttttaattgcatatgaagatttttactatgtttacatttttcttaaattaatttttaaaaaagcatagtaaagagtctgaggacaaattattcaactgtttatcatacataagaccgcatgactataatacaaaggggggttcttttttcatttaacgttacaatatacacagcaagtccggactagatcttacaatctgaacacaggtatttaaccttttccatgctgtttatgtttacaatgcacagaagtcctgtaaccaaactgtgtagtaaagcacacaaaactggactgtaacataacacagtatgcagaagcattggattttatgattttctttacgtaaatatcggtttaaaaactgctttagttttttggtgcttgctaagatgtggcaaccagcacagaaaaaaaaaatgacctgacccatatgatatcttaaccttatattcctaaacagcagtaactactgaattccttttgatattgctatactcaagatgatatccttttattcactgtaaacctttatgaactaccaagttcaaaaaaatcatccacaggcttgacagttaattacaaaataaatatggatttcctgataaacaacaaaaagtttttgtagtttataaaaacgagtatttccaagtttccattcacatttacatagtgtttagcctttcttttctcactgtttacatataaaaacctgcttttgttcagaaaaaaaattgacctagtcagccacatggaattgaccaatagaatgaaacgcggtgttctgctgagtcatcttaaacaggttatcggcagaggtagattactgcttcttttctaggcttcttttgatcctggacaggtaaattacttatcttcattctcccaattcaaccgctcaaaagtgtcacaccccaaaattggtcaatttaaaatgggaacacaaatttagcaactgccagactgtgttacattaaggcagcgtaatctcaacacgaggcacctgttaaataccagcctgtctgctcaggtcacgcatgagagttctgctttgcttgcactcatactctggacctgttggtgcaatcaaggtcttgctttcaagtttacaagtaggttaatcaggaatacaagaatcaactgctggttccatagcttctggatccagtgtccctttaccttcagaagcctgaacacacttagaatgtaacagatgttgtaatcttgaattagatgtcaatctactatgttcagtacacagattgctgtaaatgtattggctatggattcaacaacagttccagttttgtttaagcaatagtacagccataattttcaactgacatttaaaaatggtctagttacaccttgtgtcaaagtgcagaactgctacattattggttacagacatctatgtgctataaaaacagctttggtacaataaattatcaaaaaagaaaataaatttttgtaaaattcacagcataattgtgaggcaaaaaagcagtcacataaaattctgcattttttaaaaatgttcaggatgaacagaagacatctttgtgcagaagaaatggtggagataccacgtgccgagaaaaagcaaaagaaaaagtaaaaagcaggaagggacacagctgtagctatttccatcaaagcaaaccactacttctgtgaccttcaaccaataaggaagtcaactttatgacacacgcaaagtgaccttgcaataccttacaattagtgggtcacaaaagtctattttaaaagaaaggcctcttgaattacccattctctgtgttttcagcattaaggactgtctgcaaaagcatgtccaaaagtgattgcatctgaaatggtaggctcttctaatttcgagtccaaatccataaggccaaaggttatcccaaagaccaccactcagacctccccaggactggccacgaccgacccgttgattgcttctcagtgcaccttggttaggagaccagtcacgttccatcctatcttcctgtggcctctgcaacgggagagccacaggatcccatgtaattgctgctttgctcctcagtaggttcagataggagagttctgatccccgccactcagcatgcttactgtgcctgacaaacttcaccacaaccgtccctttcatacagctgaagatggtgtttgtggaagctggaggtccctcttccttacagtactgcatttccgtgcccaagtgtgtttagaggacttaaaaacccaaatttcccaccctcccacccaaaacaaaacagaacaaaacaaaaaaaaagggggatgggggggacaaaaagaaaaaaaaaaaacaccctcatggggccctttatgcaaattatgtgcagtgccttttactttaaaattagttggcaaatgaccaagaccaacatctgaatattaacttttgctgaatagaaagacaaaaaaaccccactgtgactgggatgtggcaagttaaaatgggggagcaaaaagaggatacctctgagctatccatgaagatgggtttggacatggctcttttaaacacttcaatgtccctttgcaatcttttcaagttaaaaaaaaaatcagctttgccctcttgtagcggttcagtgtgttaatctcctcctgattcaagcagctttgcactttgtttttggaaaaaaaacaccacttctataaaaacacacaagaaacaaactcaagtttcaatgtagtcacgagctagctacaggactctgttgcacacaaactcctgtcatgggggactcttctctatcagccccttgcctcattgtcagatgtccttcagtcatgtaatgtgcaggacctgtattagcagaaaattggtatgttggatgtccagctatgccagtctcttggcggggattggagtagacggtcaaattaacgtccatagctccattctgtccaaagtccaaggtattagcagccactgggcgattctggtaggcctgattgccttggttaccagtagaggaggaagatgtcgaggaagaagtcgttgaggaagacagggatgtcatggagtggtgactgtggccaacctccatagaatcttgggtagaggagctattcgttggagaattgtagacccttggcctggtccggttacccaaggcttgttgtccatggtggtggtgatggtggtggtggtggtgatggtgatgggaactgttaccatggtgatgatgcaatgcattctgttgaggggctacatgaaaggttgtttcttgaacaggatgagtttcaacagtgacctgtgtaggagcttcagtgcctgaccaaccaagaggagcaggaaattgctgacgcacctggggactgtgtgtctcgcagtccatggcctgcacggcagctgtgaagtgcccaccactgtgccgatgctggtgcgtcggatccgaccgggctctcccactgttgcttgtccccgatgagccacctgagcttgacgatgtactggaggtggtgcccgaagactgagactgctccatggcggggcttgtagatacactattacttgtatttgtaccttcatcagctgttttcttgaagaaactgtgctgcagagcataataaggttgaattcgagttttggggtcataatcaagcatccttaaaatgaggtctttgaacttcaagtagtcagcgaccgtatgacctgactccccagcacgtcgcccaccaggtcctcctgtttccactccaagaatgttatgaagtttacgggttcctggtggtttgtactcccgttttccatctttggtcttctttaagttccaagtgccatctggcaacttctcaaagaactttcttgcttttggtgcttggtcaagaatatgagcaggtggaatacccagaacttccactattttattcatctgatctacctcattggcaccactgaacagaggttctccagtgtgcatttcaaccaaaatacacccgagggaccacatatcaatggcaaggtcataaggcattcccagtagcacctctggagaccgataaaagcgactctgaatatactggtatatcctctgccccaactgacaagaactgccaaagtcaactatcttgattgcactgcgtttggggttacaaagaaggatattttcaggttttagatcacagtgaatgatactaagttctggagtcgcaaggaaaagcagtgcagtgcacatctgttgcgcaaactttcgtgttaggttcaaagagacccctcggaaattggtgtttctcagcaagtcatagaggttgtaggacagcatttcaaaaactaaacagagatggtttcgaaacataaagtggcgtttcaaatgcactatgtagtatttcatttcagtgtcatgtttgttcatgagctcaagaagtcgcacttctatctgtgcttgattcagaaaagccttcttgttctttattattttaatggcaacccattcttgctccacacgatcatatgcctttacaacctgtccaaaggaacctttgcctatcaaggagtcaatttcgtaacgatccatccacttttctccgttttttacaatataatcatagttatcatcatcataaccatcattgtaaaccttccgttccttcttatgactagaatcgtctccctggccctgttggtgtcttcgcttcttttttgcatagtaaacctcattaatatgcttgtatgttttgatcaagtcaacagaaagttttctcaggggagcagttgctgggtcacggaaggtttggggcatccgcctctgtaacatgacaatatcaggcatcacctggttagttagaggttgctgaatctggtcagaatatgataaggcagaaacctgttggtcacttatgtttggctggcgacggtcactgtactgatgtgaatggggcatctgtccagccatctgaaggccagcagcatggaatgaaaatgacggtgcaagccgaacagatgaaggtttgcatgctgaagtctctcctcctgtatgcatcgtcttctttcaagtctcatatcatcctgatggggtgggggaagggagggaagagtccagcggcaaaactataacactgtgtgaagaaaaacagattatgataagagataatgatgcaagacaattaccccaactgaggaatatctaacataactacaatcccaaaacataaagaataaaattacttcaaatttgcaaaattcattttctaacattcaaacttaagattttccttagtcttcaataatcaaaatcaactatatataaaatatattcaattgtcagagaaaaaaaaaacagtttcaaaatgtgcctattaccacggaaaatttcaggtattttctaggtatcaaataaacctgaatattccaccatttactttatctggggaaaaaactccacattttgtaattttcatcagttcacaaatcaagaggaacacgaattcactttcatagtagtttactattaagacagaggtaaagttactttataggaaagacaacatgtcaatctaccaatgttatttgtaaattaagttctgagacatttctcacaaccgctcccccaagtccacaagccctcttgctctccaagtggtttctcttattttattgtaattcttttacagtacttcctacttattggcttccactggataactcatggttgaccagaaaaattcataatgacttacaggaaaatgaaagtaatctcagtgttgtcaactgataatcagcagaagaggtaaagacaagtacaagctaaaatctaacttctaaaggagttgagtgaaaactttatgttttaaattgatactatcgaatttaattcaaggaatattttaaatagaacaatgttgcatatgttggccaagttcctaggtcagcctcatgaaaactactgactccaagagatgttcctggtcaagggcactggggccgctgcagaagaaataccaaaacttcttcaattctacatcctccagacaaattctaaaataagctgttttcctttgttagcaccctctcaattcccaatgcctccaattcctaaatttcacatgatgtcatcccaatcatcctgcttaataatccttttccctaagttgttttacactcctaaattactatacaaagctcctattgcctcagtatagttcatttcaggtaagagaaagaaagaaaccaactggactaaaataattcacactaagatttgcaatttccaacaaccattatagtttgcccaaataaatctcttattggtagaattccaagtggtgctacaagtgggtcataatatagatttgagtctatacttattgcctcaaaatacttctgcttttcatttatttctccttatacttttgaactcccaggttctttaaaagctccaactttgtactccaaatagcggcaatactaaacacttcactggaaaagaacctcagagacaatatgagttattttt

SEQ ID NO: 840 - DNA, 383 bp, Homo sapiens
caaaggacaatggaaaagtttagacactctattttcaaaattttataaacttgttttattggggaaaatgtccaaattgctagacacattctaagttctgccttggagaatcctactttgtctgagattgaggcagaggaattggtatcctgggcattactcagctcaggaacatggagcctgtggttcatgccagtgtgtgtcttcatgcagtctctccagaagagcaacagtaagaacatttctgttttaaatttcattttaaaatattttattatctgcaattcaccactgctctgggaaagcaaaaggaaagttcctgttgtgtgtgaagagcctcttaggctataaggcttcccagccatagtcagctatagctattc

SEQ ID NO: 841 - DNA, 381 bp, Homo sapiens
tatttaatcgcgggcgaattccggtcgacgatttcgcggtggaatattttatttcagactgaaaacagagagcactctccttgggaagggaaaggggttgctgagtgagagatggagcctcatggtgtacaactgagggtagttaactcatcacttctcccaagcactcgatcccagcttcacccactggtgttgctttgcttgaactgttcaagccttttatagccttaccataagtatttagatatggtgtccttttctgtttttggggggggagttttgttgtgtttttttaaagtaagtgcttaagtattaactttgggttgtcccctctgtatgtttcgaaggggctttgggtctttttgcttctggtttcttaaa

SEQ ID NO: 842 - DNA, 404 bp, Homo sapiens
gagcctgcggtacggtccggaattcccgggtcgacgatttcgtgtgagccctaccttacccctctgcccctagccaaggagtgtgaatttatagatctaactttcataggcaaaacaaaagcttcgagctgttgcgtgtgtgagtctgttgtgtggatgtgcgtgtgtggtccccagccccagactggattggaaaagtgcatggtgggggcctcggggctgtccccacgctgtccctttgccacaagtctgtggggcaagaggctgcaatattccgtcctgggtgtctgggctgctaacctggcctgctcaggcttcccaccctgtgcggggcacacccccaggaagggaccctggacacggctcccacgtccaggcttaaggtggatgcacttcccgcacct

SEQ ID NO: 843 - DNA, 395 bp, Homo sapiens
ttttttttttttttttttacctttatacaatttattgggtttaatattcataacaataactttttctactgaaatagcagtttgtgtttacctgtcgaaccccaatatgagaaatgtgtacaaaagcaacagactgtgatagaaaaaggtatgtgaaaaaattagcaaaccaaagcatgataaatggatgaagcactataaaattactttgctgtttacgtaactgtatctttaatctgtactgtgctaaacagcctatagccaagttttaaagagttacaggaacaactgctacacattcaaagaacaggcattcactgcagcctcctgatttgacctgatgggagggacaggagaatgagtcactctgccaccacttttcctgccttggattt

SEQ ID NO: 844 - DNA, 416 bp, Homo sapiens
ccggtccgtaattcccgggtcgacgatttcgtgtagaaatcaaaatttattgagaaatctgtttctcctaacagatagtaaccctgccatgatatactacttcaacaatgttataaaatttatgtgataatatacattttaacctgggatttctaaattgctttaacaaatgctaatcctgagagttgccctgcaggactcaaaagggaaaggttttgggacgtggcagaaccctgcagggacatggaattaaggccattgcaatgtatcatctttgtagcattgtcatcactcctaagctgccttcacagttttagtacactaagatgaggaaatcgaaaatgggcagagaaagctcatactgtataattgaagacagtgacagagaacgtgtcagttatgccaaaactcttttg

SEQ ID NO: 845 - DNA, 395 bp, Homo sapiens
gggagacccacgtcgctccagcggaggctgtactgcgagcctcgtctgggagtcggctggagctggcctagggaggcctggggtaacctggggggctcagcaatggtgctgcacggcgaggtggtgtccctatagggagtcggataaaaaagggaaagtgcttagtattagcgtgatgcttggggttattggagcctgagcttgacctcaaacggggggcgatttgatgggaacccccaggctggggaaaatgacagcgcttctcctaatcagctcactggattccatcaccctgagcggaaaaccagatgggcgtcaccccagttctgcagacacatacacaacccgtttgctgcagagccggacccagtggctacacccacagcggtctgtgg

SEQ ID NO: 846 - DNA, 446 bp, Homo sapiens
accggtccggaattcccgggtcgacttcgctgtcgacgatttcgtacaacactacatttaaggttggtaaggatgacttggaggtccatggttttcattaccaacattttaagattctgaatgtcgatggagtctcactgaagagtcaccaaaggtgcctgccctcctcccctgctgggaagtgtcagttggagactgtcccaagggtgctgaagaatccagtggcaggggttctggctgctttccatctgagtgtgggatgggaggggtgttcatgatcatttggatatagcaatctactctgagaaatggaacacaaggagttacctatcactttcacttataattccaaaagatgactacaaccatgtccatgctcagattcaaacagttttccatatcacttttgggtggtaagatgatttacagttttttttttaattggc

SEQ ID NO: 847 - DNA, 424 bp, Homo sapiens
taccggtccggaattcccgggtcgacgatttcgtaaaaaaaaaagaaagagaagaaagaagtgattcctaccccctacctccagagttgttgaaagctgaaaagcatacaagattcttccttttaacttggatttctcgttccagaaattgtgggataatctgtattcttgctttagaaaacattcttagagagggtactagcttactgatgatgtgttaggattgctactgatgctgtcatgtggaaactatttaaaggcactattataaatttatcctataagatgacaatgtttactcaaagtctaacatattcaatgcaagtaagactttctgaaaacacttgatgatgtggaaatgctgcaggattaaataacttgaagagcctttatagattatatgaatgcctatttgtgtctagaa

SEQ ID NO: 848 - DNA, 407 bp, Homo sapiens
  misc_feature (1)...(407): n = a,t,c or g
ttgatagttattgatgtgcatnctgttaaactgatgacagacataactcatcattccccagaaaccttttttgattacagtatctaacattttgcctcctcttttttggttttgctggttataaaggtttggattggagagggctcactggatcccaatccttggagctggatcattggattcaaatcataatgtggataggatagggaggatgaattaccaggattcatggagcgggatcagattaccaggaacataggagtggattcctgccccaaccaaaccgcattcgtgtggatttttttattcaacttaattggctattccaaagattttttttttcctatttttgacgattggagcccttaagatgcacgatggaattgtgttttgcgttttttggtaaa

SEQ ID NO: 849 - DNA, 412 bp, Homo sapiens
gctccagacccctcacctggagttccaggagggagaaaccatcgtgctgaggtgccacagctggaaggacaagcctctggtcaaggtcacattcttccagaatggaaaatccaagaaattttcccgttcggatcccaacttctccatcccacaagcaaaccacagtcacagtggtgattaccactgcacaggaaacataggctacacgctgtactcatccaagcctgtgaccatcactgtccaagctcccagctcttcaccgatggggatcattgtggctgtggtcactgggattgctgtagcggccattgttgctgctgtagtggccttgatctactgcaggaaaaagcggatttcagccaatcccactaatcctgatgaggctgacaaagttggggctgagaacacaatc

SEQ ID NO: 850 - DNA, 400 bp, Homo sapiens
  misc_feature (1)...(400): n = a,t,c or g
aggtttttcaagagttggttttgcgtttccaacctcggagaattccaggcactccccttccccctccgctgacatacttgtataagcggtcatcgttgcgtcatggggcaggcgtggggagcttcctgtcgccttgcgtgggtgtggggcctgggaggaggtcctggggcgtgcacccgccctgngcagtggggaggagagtggcctgagttacttcacccccgcgtgctgctggttaatgtcccgcgtctctgcaccttcgggtgggagcggggactgatctactttcacattctcaagtttttctcatctgcattagaggtgcccagtaggttcccaggttccagcgtgcccctccctcagacacacggacacaatcagccgagaagttcctggtctg

SEQ ID NO: 851 - DNA, 394 bp, Homo sapiens
ggaattcatgcccacctccaccaagaagccactttcctgccagctacaggtgctcacctgaaaagcaagccagaccatattaaccctggcattgctggtacctggaagactttctgattcaatgctttccacctcctcctacccctcaccacccccgtggcatgaaatcctgggggctgctttagaaattgttttctttggctgctggtgggggtgctgctggtgggggtttgcacagctggcacactgcaccagtctggtgggggtttgcacagctggcacactgcaccagtctcctgcctgctgccaacaaggccatttcccaagcactggctttggagaagttggggctctgaagtgggaacacaaggctgccttttgcaggccaggtgta

SEQ ID NO: 852 - DNA, 425 bp, Homo sapiens
ggacgttcgtaatcccggtcgacccctcgttaagactgcttccacctgaaatgctgtcataagtactgggggggtgggggagtgcccatcttgtacatgatattcttagaggtaataaggtaatgatgcatgaatttattttataaactcttggactatgtatttgacatgtaaaatatgtacagtattaacgtcaaccatctctttaaagttagcctataaatattgttgtataattttctttggtcagaaacacttggactgaatagtgacactcggtaaggattttcagtgccatttagcaaaacgtctttagtctatgcaactagcaaaaatctgcataatgcaacaacacagttttcacacttcaaattttacatgaggggttcttcacgattctcctggaacccagtctagcaaaatga

SEQ ID NO: 853 - protein, 362 aa, Homo sapiens
LGSCRGARSCRSKSGSYRASPEVAEREQRGRRMADIIARLREDGIQKRVIQEGRGELPDFQDGTKATFHYRTLHSDDEGTVLDDSRARGKPMELIIGKKFKLPVWETIVCTMREGEIAQFLCDIKHVVLYPLVAKSLRNIAVGKDPLEGQRHCCGVAQMREHSSLGHADLDALQQNPQPLIFHMEMLKVESPGTYQQDPWAMTDEEKAKAVPLIHQEGNRLYREGHVKEAAAKYYDAIACLKNLQMKEQPGSPEWIQLDKQITPLLLNYCQCKLVVEEYYEVLDHCSSILNKYDDNVKAYFKRGKAHAAVWNAQEAQADFAKVLELDPALAPVVSRELRALEARIRQKDEEDKARFRGIFSH

SEQ ID NO: 854 - protein, 237 aa, Homo sapiens
VMDLVLRVADYYFFTPYVYPATWPEDDIFRQAISLLIVTNVGAYILYFFCATLSYYFVFDHALMKHPQFLKNQVRREIKFTVQALPWISILTVALFLLEIRGYSKLHDDLGEFPYGLFELVVSIISFLFFTDMFIYWIHRGLHHRLVYKRLHKPHHIWKIPTPFASHAFHPIDGFLQSLPYHIYPFIFPLHKVVYLSLYILVNIWTISIHDGDFRVRMKNYSMESLQRLNRLLPSYS

SEQ ID NO: 855 - protein, 68 aa, Homo sapiens
MNNFFAESQNNFQMREKYFLHFLCYSQWNGYRYNALLSLICITNITVKNNQQNHKSSLDLQHLPIAMV

SEQ ID NO: 856 - protein, 194 aa, Homo sapiens
AMAAIRKKLVIVGDGACGKTCLLIVFSKDQFPEVYVPTVFENYVADIEVDGKQVELALWDTAGQEDYDRLRPLSYPDTDVILMCFSIDSPDSLENIPEKWTPEVKHFCPNVPIILVGNKKDLRNDEHTRRELAKMKQEPVKPEEGRDMANRIGAFGYMECSAKTKDGVREVFEMATRAALQARRGKKKSGCLVL

SEQ ID NO: 857 - protein, 105 aa, Homo sapiens
PPGRFPCQQDMDQVLEAISTMRFPDERGPLEHLYSLHIPNCDKHGLYNLKQCKMSLNGQRGECWCVNPNTGKLIQGAPTIRGDPECHLFYNEQQEARGVHTQRMQ

SEQ ID NO: 858 - protein, 94 aa, Homo sapiens
EKKRGREDKPGTMATFPPATSAPQQPPGPEDEDSSLDESDLYSLAHSYLGGGGRKGRTKREAAANTNRPSPGGHERKLVTKLQNSERKKRGARR

SEQ ID NO: 859 - protein, 80 aa, Homo sapiens
KTTMTAFSRARVKLLTTTSAVRGTCGDSSGVAAQGALERAQHPCCPPAEPVLRECRTDADALGEISSIERKGVQCLAVIL

SEQ ID NO: 860 - protein, 176 aa, Homo sapiens
FRTPQWTHSAACPCLGQVDQYKGKRDLESLREYVESQLQRTETGATETVTPSEAPVLAAEPEADKGTVLALTENNFDDTIAEGITFIKFYAPWCGHCKTLAPTWEELSKKEFPGLAGVKIAEVDCTAERNICSKYSVRGYPTLLLFRGGKKVSEHSGGRDLDSLHRFVLSQAKDEL

SEQ ID NO: 861 - protein, 254 aa, Homo sapiens
CIQEAWRPVVSAPAATPAPSVDIYPLALRPCRHRRRSSAQRDTREPTMAPFEPLASGILLLLWLIAPSRACTCVPPHPQTAFCNSDLVIRAKFVGTPEVNQTTLYQRYEIKMTKMYKGFQALGDAADIRFVYTPAMESVCGYFHRSHNRSEEFLIAGKLQDGLLHITTCSFVAPWNSLSLAQRRGFTKTYTVGCEECTVFPCLSIPCKLQSGTHCLWTDQLLQGSEKGFQSRHLACLPREPGLCTWQSLRSQIA

SEQ ID NO: 862 - protein, 290 aa, Homo sapiens
ARGGDDGGGSAPTGSSLRAPPSSRERASASGQAPARRRQRPRPLGGTALTQGLHRHPEPNSKMGGKLSKKKKGYNVNDEKAKEKDKKAEGAATEEEGTPKESEPQAPAEPAEAKEGKEKPDQDAEGKAEEKEGEKDAAAAKEEAPKAEPEKTEGAAEAKAEPPKAPEQEQAAPGPAAGGEAPKAAEAAAAPPAESAAPAAGEEPSKEEGEPKKTEAPAAPAAQETKSDGAPASDSKPGSSEAAPSSKETPAATEAPSSTPKAQGPAASAEEPKPVEAPAANSDQTVTVKE

SEQ ID NO: 863 - protein, 160 aa, Homo sapiens
SPPPPPLFWSPQTQREPTMVLSPADKTNVKAAWGKVGAHAGEYGAEALERMFLSFPTTKTYFPHFDLSHGSAQVKGHGKKVADALTNAVAHVDDMPNALSALSDLHAHKLRVDPVNFKLLSHCLLVTLAAHLPAEFTPAVHASLDKFLASVSTVLTSKYR

SEQ ID NO: 864 - protein, 569 aa, Homo sapiens
  misc_feature (1)...(569): Xaa = any amino acid or nothing
MFADRXLFSTNHKDIGTLYLLFGAXAGVLGTALSLLIRAELGQPGNLLGNDHIYNVIVTAHAFVIIFFIVIPIIIGGFGNXLVPLIIGAPDMAFPRINNISFXLLPPSLLLLLASAIVEAGAGTGXTVYPPLAGNYSHPGASVDLTIFSLHLAGVSSILGAINFITTIINIKPPAITQYQTPLFVXSVLITAVLLLLSLPVLAAGITILLTDRNLNTTFFDPAGGGDPILYQHLFXFFGHPEVYILILPGFGIISHIVTYYSGKKEPFGYIGMVXAMISIGFLGFIVXAHHIFTVGIDVDTRAYFTSATIIIAIPTGVKVFSXLATLHGSNMKXSAAVLXALGFIFLFTVGGLTGIVLANSSLDIVLHDTYYVVAHFHYVLSIGAVFAIIGGFIHXFPLFSGYTLDQTYAKIHFTIIFIGVNLTFFPQHFLGLSGMPRRYSDYPDAYTTXNILSSVGSFISLTAVILIIFMIXEAFASKRKVLIVEEPSINLEXLYGCPPPYHTFEEPVYIKSRQKRKESNPPKLVSRPTPWHSMTFTKQITSRQNNKRGPKHTQGAEHHYQQGNNGAP

SEQ ID NO: 865 - protein, 253 aa, Homo sapiens
RGCRSECRAAVMAAALWGFFPVLLLLLLSGDVQSSEVPGAAAEGSGGSGVGIGDRFKIEGRAVVPGVKPQDWISAARVLVDGEEHVGFLKTDGSFVVHDIPSGSYVVEVVSPAYRFDPVRVDITSKGKMRARYVNYIKTSEVVRLPYPLQMKSSGPPSYFIKRESWGWTDFLMNPMVMMMVLPLLIFVLLPKVVNTSDPDMRREMEQSMNMLNSNHELPDVSEFMTRLFSSKSSGKSSSGSSKTGKSGAGKRR

SEQ ID NO: 866 - protein, 268 aa, Homo sapiens
KRLGSSAISMSKYKLIMLRHGEGAWNKENRFCSWVDQKLNSEGMEEARNCGKQLKALNFEFDLVFTSVLNRSIHTAWLILEELGQEWVPVESSWRLNERHYGALIGLNREQMALNHGEEQVRLWRRSYNVTPPPIEESHPYYQEIYNDRRYKVCDVPLDQLPRSESLKDVLERLLPYWNERIAPEVLRGKTILISAHGNSSRALLKHLEGISDEDIINITLPTGVPILLELDENLRAVGPHQFLGDQEAIQAAIKKVEDQGKVKQAKK

SEQ ID NO: 867 - protein, 181 aa, Homo sapiens
PSATPRQTGPATTMNSKGQYPTQPTYPVQPPGNPVYPQTLHLPQAPPYTDAPPAYSELYRPSFVHPGAATVPTMSAAFPGASLYLPMAQSVAVGPLGSTIPMAYYPVGPIYPPGSTVLVEGGYDAGARFGAGATAGNIPPPPPGCPPNAAQLAVMQGANVLVTQRKGNFFMGGSDGGYTIW

SEQ ID NO: 868 - protein, 118 aa, Homo sapiens
PSLQNCEVQARDWQIQCLVSIHLLVHTWSPLALSSHSERGMRVLSCRIRHEEAAVMEGAGAGSGFRKELVSRLLHLHFKDDKTKEAAVRGVRQAQAEDALRVDVDQLEKVLPQLLLDF

SEQ ID NO: 869 - protein, 148 aa, Homo sapiens
YRVRNSRVDWKEQYIHENYSRALEVEGIVEQPCPDVYWFPLLSEQMCDELLAEMEHYGQWSGGRHEDSRLAGGYENVPTVDIHMKQVGYEDQLLQLLRTYVGPMTESLFPGYHTKKRAVMNFVVRYRPDEQPSLRPHHDSSTFTLNVA

SEQ ID NO: 870 - protein, 356 aa, Homo sapiens
GAASRRRRRRRLLRVRLRLRLRLQPAMPHSVTLRGPSPWGFRLVGGRDFSAPLTISRVHAGSKAALAALCPGDLIQAINGESTELMTHLEAQNRIKGCHDHLTLSVSRPEGRSWPSAPDDSKAQAHRIHIDPEIQDGSPTTSRRPSGTGTGPEDGRPSLGSPYGQPPRFPVPHNGSSEATLPAQMSTLHVSPPPSADPARGLPRSRDCRVDLGSEVYRMLREPAEPVAAEPKQSGSFRYLQGMLEAGEGGDWPGPGGPRNLKPTASKLGAPLSGLQGLPECTRCGHGIVGTIVKARDKLYHPECFMCSDCGLNLKQRGYFFLDERLYCESHAKARVKPPEGYDVVAVYPNAKVELV

SEQ ID NO: 871 - protein, 479 aa, Homo sapiens
AERAVENMLLGGPPRSPRSGTSPKGPWSSTGHVQFGKSPQTWPRRTRPRSPEPAAPSGVRGSTWTRRRDTPRRAGPTALSRYVGHLWMGRRPPSPEARGPVPRSSAASRARRSLASPGISPGPLTATIGGAVAGGGPRQGRAEAHKEVFPGQRVGKMAAPMELFCWSGGWGLPSVDLDSLAVLTYARFTGAPLKVHKISNPWQSPSGTLPALRTSHGEVISVPHKIITHLRKEKYNADYDLSARQGADTLAFMSLLEEKLLPVLVHTFWIDTKNYVEVTRKWYAEAMPFPLNFFLPGRMQRQYMERLQLLTGEHRPEDEEELEKELYREARECLTLLSQRLGSQKFFFGDAPASLDAFVFSLLGLPGWLQAKLGPVGKLAGSHLRGLAQNLCAYCTHILSLYFPWDGSLRVPPQRQKPAGPETEEEPYRRRNQILSVLAGLAAMVGYALLSGIVSIQRATPARAPGTRTLGMAEEDEEE

SEQ ID NO: 872 - protein, 128 aa, Homo sapiens
ETTGAPGTVCKVGWTINGKMRAAHPGLTLLQLIHKQKGGYTESQRPMGRDQHSTESIRSNSKLFIMNTECGQTHDCACPRRFAEGNCFLTPSSLRLSIGTSRECSLASLLWTEQLTPSSTSLHTISFA

SEQ ID NO: 873 - protein, 615 aa, Homo sapiens
GPGARAVGTSMVRHQPLQYYEPQLCLSCLTGIYGCRWKRYQRSHDDTTPWERLWFLLLTFTFGLTLTWLYFWWEVHNDYDEFNWYLYNRMGYWSDWPVPILVTTAAAFAYIAGLLVLALCHIAVGQQMNLHWLHKIGLVVILASTVVAMSAVAQLWEDEWEVLLISLQGTAPFLHVGAVAAVTMLSWIVAGQFARAERTSSQVTILCTFFTVVFALYLAPLTISSPCIMEKKDLGPKPALIGHRGAPMLAPEHTLMSFRKALEQKLYGLQADITISLDGVPFLMHDTTLRRTTNVEEEFPELARRPASMLNWTTLQRLNAGQWFLKTDPFWTASSLSPSDHREAQNQSICSLAELLELAKGNATLLLNLRDPPREHPYRSSFINVTLEAVLHSGFPQHQVMWLPSRQRPLVRKVAPGFQQTSGSKEAVASLRRGHIQRLNLRYTQVSRQELRDYASWNLSVNLYTVNAPWLFSLLWCAGVPSVTSDNSHTLSQVPSPLWIMPPDEYCLMWVTADLVSFTLIVGIFVLQKWRLGGIRSYNPEQIMLSAAVRRTSRDVSIMKEKLIFSEISDGVEVSDVLSVCSDNSYDTYANSTATPVGPRGGGSHTKTLIERSGR

SEQ ID NO: 874 - protein, 579 aa, Homo sapiens
GWAVPRPGPRGLTVATEAAAAAAAAAAAAISSRTRAPQAPEGRNRRLEKMADDIDIEAMLEAPYKKDENKLSSANGHEERSKKRKKSKSRSRSHERKRSKSKERKRSRDRERKKSKSRERKRSRSKERRRSRSRSRDRRFRGRYRSPYSGPKFNSAIRGKIGLPHSIKLSRRRSRSKSPFRKDKSPVREPIDNLTPEERDARTVFCMQLAARIRPRDLEEFFSTVGKVRDVRMISDRNSRRSKGIAYVEFVDVSSVPLAIGLTGQRVLGVPIIVQASQAEKNRAAAMANNLQKGSAGPMRLYVGSLHFNITEDMLRGIFEPFGRIESIQLMMDSETGRSKGYGFITFSDSECAKKALEQLNGFELAGRPMKVGHVTERTDASSASSFLDSDELERTGIDLGTTGRLQLMARLAEGTGLQIPPAAQQALQMSGSLAFGAVAEFSFVIDLQTRLSQQTEASALAAAASVQPLATQCFQLSNMFNPQTEEEVGWDTEIKDDVIEECNKHGGVIHIYVDKNSAQGNVYVKCPSIAAAIAAVNALHGRWFAGKMITAAYVPLPTYHNLFPDSMTATQLLVPSRR

SEQ ID NO: 875 - protein, 585 aa, Homo sapiens
HEALLQPLTLSSALSSPGTMASTSTTIRSHSSSRRGFSASSARLPGVSRSGFSSVSVSRSRGSGGLGGACGGAGFGSRSLYGLGGSKRISIGGGSCAISGGYGSRAGGSYGFGGAGSGFGFGGGAGIGFGLGGGAGLAGGFGGPGFPVCPPGGIQEVTVNQSLLTPLNLQIDPTIQRVRAEEREQIKTLNNKFASFIDKVRFLEQQNKVLETKWTLLQEQGTKTVRQNLEPLFEQYINNLRRQLDSIVGERGRLDSELRGMQDLVEDFKNKYEDEINKRTAAENEFVTLKKDVDAAYMNKVELQAKADTLTDEINFLRALYDAELSQMQTHISDTSVVLSMDNNRNLDLDSIIAEVKAQYEEIAQRSRAEAESWYQTKYEELQVTAGRHGDDLRNTKQEIAEINRMIQRLRSEIDHVKKQCANLQAAIADAEQRVGEMALKDAKNKLEGLEDALQQGPSRDLARLLKEYQELMNVKLALDVEIATYRKLLEGEECRLNGEGVGQVNISVVQSTVSSGYGGASGVGSGLGLGGGSSYSYGSGLGVGGGFSSSSGRAIGGGLSSVGGGSSTIKYTTTSSSSRKSYKH

SEQ ID NO: 876 - protein, 100 aa, Homo sapiens
PLVSSISPLGGVINLLFFFFLRWLLTLSPGLECSDTISAHCIFLLSGSSGSPASASQVAGITGVQHLPRLIFIFLVETGFRHVGQAGLKLLTSSDLPTLA

SEQ ID NO: 877 - protein, 488 aa, Homo sapiens
RACGAGDSGVGSASLRAAGSGGGGAMSGGTPYIGSKISLISKAEIRYEGILYTIDTENSTVALAKVRSFGTEDRPTDRPIPPRDEVFEYIIFRGSDIKDLTVCEPPKPQCSLPQDPAIVQSSLGSSTSSFQSMGSYGPFGRMPTYSQFSPSSLVGQQFGAVGVAGSSLTSFGTETSNSGTLPQSSAVGSAFTQDTRSLKTQLSQGRSSPQLDPLRKSPTMEQAVQTASAHLPAPAAVGRRSPVSTRPLPSASQKAGENQEHRQAEVHKVSRPENEQLRNDNKRQVAPGAPSAPRRGRGGHRGGRGRFGIRRDGPMKFEKDFDFESANAQFNKEEIDREFHNKLKLKEDKLEKQEKPVNGEDKGDSGVDTQNSEGNADEEDPLGPNCYYDKTKSFFDNISCDDNRERRPTWAEERRLNAETFGIPLRPNRGRGGYRGRGGLGFRGGRGRGGGRGGTFTAPRGFRGGFRGGRGGREFADFEYRKDNKVAA

SEQ ID NO: 878 - protein, 358 aa, Homo sapiens
LLLTDVTPGLSPPTRCCHWQSVVGLRVTGATRSIMGPWGEPELLVWRPEAVASEPPVPVGLEVKLGALVLLLVLTLLCSLVPICVLRRPGANHEGSASRQKALSLVSCFAGGVFLATCLLDLLPDYLAAIDEALAALHVTLQFPLQEFILAMGFFLVLVMEQITLAYKEQSGPSPLEETRALLGTVNGGPQHWHDGPGVPQASGAPATPSALRACVLVFSLALHSVFEGLAVGLQRDRARAMELCLALLLHKGILAVSLSLRLLQSHLRAQVVAGCGILFSCMTPLGIGLGAALAESAGPLHQLAQSVLEGMAAGTFLYITFLEILPQELASSEQRILKVILLLAGFALLTGLLFIQI

SEQ ID NO: 879 - protein, 670 aa, Homo sapiens
SPLTRPAAPARGAPTPRHSAPGQPPAAMGLLPKLGVSQGSDTSTSRAGRCARSVFGNIKVFVLCQGLLQLCQLLYSAYFKSSLTTIEKRFGLSSSSSGLISSLNEISNAILIIFVSYFGSRVHRPRLIGIGGLFLAAGAFILTLPHFLSEPYQYTLASTGNNSRLQAELCQKHWQDLPPSKCHSTTQNPQKETSSMWGLMVVAQLLAGIGTVPIQPFGISYVDDFSEPSNSPLYISILFAISVFGPAFGYLLGSIMLQIFVDYGRVNTAAVNLVPGDPRWIGAWWLGLLISSALLVLTSFPFFFFPRAMPIGAKRAPATADEARKLEEAKSRGSLVDFIKRFPCIFLRLLMNSLFVLVVLAQCTFSSVIAGLSTFLNKFLEKQYGTSAAYANFLIGAVNLPAAALGMLFGGILMKRFVFSLQTIPRIATTIITISMILCVPLFFMGCSTPTVAEVYPPSTSSSIHPQSPACRRDCSCPDSIFHPVCGDNGIEYLSPCHAGCSNINMSSATSKQLIYLNCSCVTGGSASAKTGSCPVPCAHFLLPAIFLISFVSLIACISHNPLYMMVLRVVNQEEKSFAIGVQFLLMRLLAWLPSPALYGLTIDHSCIRWNSLCLGRRGACAYYDNDALRDRYLGLQMGYKALGMLLLCFISWRVKKNKEYNVQKAAGLI

SEQ ID NO: 880 - protein, 74 aa, Homo sapiens
EPSAAAMSSGASASALQRLVEQLKLEAGVERIKVSQAAAELQQYCMQNACKDALLVGVPAGSNPFREPRSCALL

SEQ ID NO: 881 - protein, 401 aa, Homo sapiens
EGAQVARRRSRRQWRAGRCGRGRGGRRAERTGGRGPPGRPRPLPPGPARRGRRRMETPFYGDEALSGLGGGASGSGGTFASPGRLFPGAPPTAAAGSMMKKDALTLSLSEQVAAALKPAPAPPPTPLRADGAPSAAPPDGLLASPDLGLLKLASPELERLIIQSNGLVTTTPTSSQFLYPKVAASEEQEFAEGFVKALEDLHKQNQLGAGAAAAAAAAAAGGPSGTATGSAPPGELAPAAAAPEAPVYANLSSYAGGAGGAGGAATVAFAAEPVPFPPPPPPGALGPPRLAALKDEPQTVPDVPSFGESPPLSPIDMDTQERIKAERKRLRNRIAASKCRKRKLERISRLEEKVKTLKSQNTELASTASLLREQVAQLKQKVLSHVNSGCQLLPQHQVPAY

SEQ ID NO: 882 - protein, 137 aa, Homo sapiens
FRPEMAATSAAAAAASSIMGTRVAPGIHPGSGRFTAVFGFGKKKAAPKKSAKKTVTTDRPLWYPGAISPDWLDGSLVGDYGFDPFGLGKPAEYLQFDIDSLDQNLAKNLAGDVIGTRTEAADAKSTPFQPYSEVFGI

SEQ ID NO: 883 - protein, 133 aa, Homo sapiens
CFWNSRVAHFVKKVSMAASTMALSSPAFAGKAVNLSPAASEVLGSGRVTMRKTVAKPKGPSGSPWYGSDRVKYLGPFSGESPSYLTGEFPGDYGWDTAGLSADPETFARNRELEVIHSRWAMLGALGCVFPEL

SEQ ID NO: 884 - protein, 327 aa, Homo sapiens
VNFIHLILEALVDGPRMQASAHVTRPSKRPSKIGFDEVFVISLARRPDRRERMLASLWEMEISGRVVDAVDGWMLNSSAIRNLGVDLLPGYQDPYSGRTLTKGEVGCFLSHYSIWEEVVARGLARVLVFEDDVRFESNFRGRLERLMEDVEAEKLSWDLIYLGRKQVNPEKETAVEGLPGLVVAGYSYWTLAYALRLAGARKLLASQPLRRMLPVDEFLPIMFDQHPNEQYKAHFWPRDLVAFSAQPLLAAPTHYAGDAEWLSDTETSSPWDDDSGRLISWSGSQKTLRSPAWTCLSSGETTQRWIPFPKGLTAKEQDSQAPVPCLA

SEQ ID NO: 885 - protein, 120 aa, Homo sapiens
TFYFVLHYSTSMAASTMALSSPAFAGKAVKLSPAASEVLGSGRVTMRKTVAKPKGPSGSPWYGSDRVKYLGPFSGESPSYLTGEFPGDYGWDTAGLSADPETFARNRELEVIHSRWAMLG

SEQ ID NO: 886 - protein, 480 aa, Homo sapiens
GGPAAAGEAEPTLLAMGGAVVDEGPTGVKAPDGGWGWAVLFGCFVITGFSYAFPKAVSVFFKELIQEFGIGYSDTAWISSILLAMLYGTGPLCSVCVNRFGCRPVMLVGGLFASLGMVAASFCRSIIQVYLTTGVITGLGLALNFQPSLIMLNRYFSKRRPMANGLAAAGSPVFLCALSPLGQLLQDRYGWRGGFLILGGLLLNCCVCAALMRPLVVTAQPGSGPPRPSRRLLDLSVFRDRGFVLYAVAASVMVLGLFVPPVFVVSYAKDLGVPDTKAAFLLTILGFIDIFARPAAGFVAGLGKVRPYSVYLFSFSMFFNGLADLAGSTAGDYGGLVVFCIFFGISYGMVGALQFEVLMAIVGTHKFSSAIGLVLLMEAVAVLVGPPSGGKLLDATHVYMYVFILAGAEVLTSSLILLLGNFFCIRKKPKEPQPEVAAAEEEKLHKPPADSGVDLREVEHFLKAEPEKNGEVVHTPETSV

SEQ ID NO: 887 - protein, 30 aa, Homo sapiens
RWDSHFLLPPHPCRIHVRPGGLVRTVTVNE

SEQ ID NO: 888 - protein, 748 aa, Homo sapiens
AAGPRRAPPPSGRLGPAARAGRARAAGPEARAMGETKIIYHLDGQETPYLVKLPLPAERVTLADFKGVLQRPSYKFFFKSMDDDFGVVKEEISDDNAKLPCFNGRVVYWLVSAEGSHPDPAPFCADNPSELPPPMERTGGIGDSRPPSFHPHAGGGSQENLDNDTETDSLVSAQRERPRRRDGPEHATRLNGTAKGERRREPGGYDSSSTLMSSELETTSFFDSDEDDSTSRFSSSTEQSSASRLMRRHKRRRRKQKVSRIERSSSFSSITDSTMSLNIITVTLNMEKYNFLGISIVGQSNERGDGGIYIGSIMKGGAVAADGRIEPGDMLLQVNEINFENMSNDDAVRVLREIVHKPGPITLTVAKCWDPSPRGCFTLPRSEPIRPIDPAAWVSHTAAMTGTFPAYGMSPSLSTITSTSSSITSSIPDTERLDDFHLSIHSDMAAIVKAMASPESGLEVRDRMWLKITIPNAFIGSDVVDWLYHNVEGFTDRREARKYASNLLKAGFIRHTVNKITFSEQCYYIFGDLCGNMANLSLHDHDGSSGASDQDTLAPLPHPGAAPWPMAFPYQYPPPPHPYNPHPGFPELGYSYGGGSASSQHSEGSRSSGSNRSGSDRRKEKDPKAGDSKSGGSGSESDHTTRSSLRGPRERAPSERSGPAASEHSHRSHHSLASSLRSHHTHPSYGPPGVPPLYGPPMLMMPPPPAAMGPPGAPPGRDLASVPPELTASRQSFRMAMGNPSEFFVDVM

SEQ ID NO: 889 - protein, 544 aa, Homo sapiens
TLRHHLSYSPGQAHVCRSTMSCSSRASSSRAGGSSSARVSAGGSSFSSGSRCGLGGSSAQGFRGGASSCSLSGGSSDAFGGSFGGGFGSCSVGGGFGGASGSGTGFGGGSSFGGVSGFGRGSGFCGSSRFSSGATGGFYSYGGGMGGGVGDGGLFSGGEKQTMQNLNDRLANYLDKVRALEEANTDLENKIKEWYDKYGPGSGDGGSGRDYSKYYSIIEDLRNQIIAATVENAGIILHIDNARLAADDFRLKYENELCLRQSVEADINGLRKVLDDLTMTRSDLEMQIESFTEELAYLRKNHEEEMKNMQGSSGGEVTVEMNAAPGTDLTKLLNDMRAQYEELAEQNRREAEERFNKQSASLQAQISTDAGAATSAKNEITELKRTLQALEIELQSQLAMKSSLEGTLADTEAGYVAQLSEIQTQISALEEEICQIWGETKCQNAEYKQLLDIKTRLEVEIETYRRLLDGEGGGSSFAEFGGRNSGSVNMGSRDLVSGDSRSGSCSGQGRDSSKTRVTKTIVEELVDGKVVSSQVSSISEVKVK

SEQ ID NO: 890 - protein, 212 aa, Homo sapiens
PELGRGCQGPARKSQRSLNSPVLGPACAFLPVGVRRVSHLSALPRTLVICLRREMLLLDCNPEVDGLKHLLETGASVNAPPDPCKQSPVHLAAGSGLACFLLWQLQTGADLNQQDVLGEAPLHKAAKVGSLECLSLLVASDAQIDLCNKNGQTAEDLAWSCGFPDCAKFLTTIKCMQTIKASEHPDRNDCVAVLRQKRSLGSVENTSGKRKC

SEQ ID NO: 891 - protein, 322 aa, Homo sapiens
LSFWPIPTITPWWRGRPTMIGRADIEGSKSDVAMNAWPPQASYPCGNFSDTSPQSLGEEPLIPSVLQSPAHSATYTMCEEETTALVCDNGSGLCKAGFAGDDAPRAVFPSIVGRPRHQGVMVGMGQKDSYVGDEAQSKRGILTLKYPIEHGIITNWDDMEKIWHHSFYNELRVAPEEHPTLLTEAPLNPKANREKMTQIMFETFNVPAMYVAIQAVLSLYASGRTTGIVLDSGDGRHPTMSPIYEGLWPLPHAIMRLDLGGVTHTDYLMKILTERGITFGSPSIRIWRPPGDGYGRSTETSARPYPEKTPMRVNRRASQHSH

SEQ ID NO: 892 - protein, 409 aa, Homo sapiens
KGLLWMNHGDERSRTADAASWKTGMAPFFEMKLKHYKIFEGMPVTFTCRVAGNPKPKIYWFKDGKQISPKSDHYTIQRDLDGTCSLHTTASTLDDDGNYTIMAANPQGRISCTGRLMVQAVNQRGRSPRSPSGHPHVRRPRSRSRDSGDENEPIQERFFRPHFLQAPGDLTVQEGKLCRMDCKVSGLPTPDLSWQLDGKPVRPDSAHKMLVRENGVHSLIIEPVTSRDAGIYTCIATNRAGQNSFSLELVVAAKEAHKPPVFIEKLQNTGVADGYPVRLECRVLGVPPPQIFWKKENESLTHSTDRVSMHQDNHGYICLLIQGATKEDAGWYTVSAKNEAGIVSCTARLDVYTQWHQQSQSTKPKKVRPSASRYAALSDQGLDIKAAFQPEANPSHLTLNTALVESEDL

SEQ ID NO: 893 - protein, 153 aa, Homo sapiens
IFFFFFFFFPAFKMSKRGRGGSSGAKFRISLGLPVGAVINCADNTGAKNLYIISVKGIKGRLNRLPAAGVGDMVMATVKKGKPELRKKVHPAVVIRQRKSYRRKDGVFLYFEDNAGVIVNNKGEMKGSAITGPVAKECADLWPRIASNAGSIA

SEQ ID NO: 894 - protein, 229 aa, Homo sapiens
HSPASHRKITHPSTPAEETYNLGRRVLPLSAVTYFQKSGPGLLPAPATQSASVAGTLQNSLCSQVTKKKRANMLVLLAGIFVVHIATVIMLFVSTIANVWLVSNTVDASVGLWKNCTNISCSDSLSYASEDALKTVQAFMILSIIFCVIALLVFVFQLFTMEKGNRFFLSGATTLVCWLCILVGVSIYTSHYANRDGTQYHHGYSYILGWICFCFSFIIGVLYLVLRKK

SEQ ID NO: 895 - protein, 557 aa, Homo sapiens
LECSSYSMPRIPASPLSCCPPDMLGPCMLLLLLLLGLRLQLSLGIIPVEEENPDFWNREAAEALGAAKKLQPAQTAAKNLIIFLGDGMGVSTVTAARILKGQKKDKLGPEIPLAMDRFPYVALSKTYNVDKHVPDSGATATAYLCGVKGNFQTIGLSAAARFNQCNTTRGNEVISVMNRAKKAGKSVGVVTTTRVQHASPAGTYAHTVNRNWYSDADVPASARQEGCQDIATQLISNMDIDVILGGGRKYMFRMGTPDPEYPDDYSQGGTRLDGKNLVQEWLAKRQGARYVWNRTELMQASLDPSVTHLMGLFEPGDMKYEIHRDSTLDPSLMEMTEAALRLLSRNPRGFFLFVEGGRIDHGHHESRAYRALTETIMFDDAIERAGQLTSEEDTLSLVTADHSHVFSFGGYPLRGSSIFGLAPGKARDRKAYTVLLYGNGPGYVLKDGARPDVTESESGSPEYRQQSAVPLDEETHAGEDVAVFARGPQAHLVHGVQEQTFIAHVMAFAACLEPYTACDLAPPAGTTDAAHPGRSVVPALLPLLAGTLLLLETATAP

SEQ ID NO: 896 - protein, 459 aa, Homo sapiens
TRRVVSRDGAPDGGIEQMGLAMEHGGSYARAGGSSRGCWYYLRYFFLFVSLIQFLIILGLVLFMVYGNVHVSTESNLQATERRAEGLYSQLLGLTASQSNLTKELNFTTRAKDAIMQMWLNARRDLDRINASFRQCQGDRVIYTNNHRYMAAIILSEKQCRDQFKDMNKSCDALLFMLNQKVKTLEVEIAKEKTICTKDKESVLLNKRVAEEQLVECVKTRELQHQERQLAKEQLQKVQALCLPLDKDKFEMDLRNLWRDSIIPRSLDNLGYNLYHPLGSELASIRRACDHMPSLMSSKVEELARSLRADIERVARENSDLQRQKLEAQQGLRASQEAKQKVEKEAQAREAKLQAECSRQTQLALEEKAVLRKERDNLAKELEEKKREAEQLRMELAIRNSALDTCIKTKSQPMMPVSRPMGPVPNPQPIDPASLEEFKRKILESQRPPAGIPVAPSSG

SEQ ID NO: 897 - protein, 1176 aa, Homo sapiens
SGSGVRCALLGATCLFACVPLSSVALESRRAAPSLDMSYNYVVTAQKPTAVNGCVTGHFTSAEDLNLLIAKNTRLEIYVVTAEGLRPVKEVGMYGKIAVMELFRPKGESKDLLFILTAKYNACILEYKQSGESIDIITRAHGNVQDRIGRPSETGIIGIIDPECRMIGLRLYDGLFKVIPLDRDNKELKAFNIRLEELHVIDVKFLYGCQAPTICFVYQDPQGRHVKTYEVSLREKEFNKGPWKQENVEAEASMVIAVPEPFGGAIIIGQESITYHNGDKYLAIAPPIIKQSTIVCHNRVDPNGSRYLLGDMEGRLFMLLLEKEEQMDGTVTLKDLRVELLGETSIAECLTYLDNGVVFVGSRLGDSQLVKLNVDSNEQGSYVVAMETFTNLGPIVDMCVVDLERQGQGQLVTCSGAFKEGSLRIIRNGIGIHEHASIDLPGIKGLWPLRSDPNRETDDTLVLSFVGQTRVLMLNGEEVEETELMGFVDDQQTFFCGNVAHQQLIQITSASVRLVSQEPKALVSEWKEPQAKNISVASCNSSQVVVAVGRALYYLQIHPQELRQISHTEMEHEVACLDITPLGDSNGLSPLCAIGLWTDISARILKLPSFELLHKEMLGGEIIPRSILMTTFESSHYLLCALGDGALFYFGLNIETGLLSDRKKVTLGTQPTVLRTFRSLSTTNVFACSDRPTVIYSSNHKLVFSNVNLKEVNYMCPLNSDGYPDSLALANNSTLTIGTIDEIQKLHIRTVPLYESPRKICYQEVSQCFGVLSSRIEVQDTSGGTTALRPSASTQALSSSVSSSKLFSSSTAPHETSFGEEVEVHNLLIIDQHTFEVLHAHQFLQNEYALSLVSCKLGKDPNTYFIVGTAMVYPEEAEPKQGRIVVFQYSDGKLQTVAEKEVKGAVYSMVEFNGKLLASINSTVRLYEWTTEKELRTECNHYNNIMALYLKTKGDFILVGDLMRSVLLLAYKPMEGNFEEIARDFNPNWMSAVEILDDDNFLGAENAFNLFVCQKDSAATTDEERQHLQEVGLFHLGEFVNVFCHGSLVMQNLGETSTPTQGSVLFGTVNGMIGLVTSLSESWYNLLLDMQNRLNKVIKSVGKIEHSFWRSFHTERKTEPATGFIDGDLIESFLDISRPKMQEVVANLQYDDGSGMKREATADDLIKVVEELTRIH

SEQ ID NO: 898 - protein, 251 aa, Homo sapiens
CFLCLSGDFMVMTIFFNVSRRFGYVAFQNYVPSSVTTMLSWVSFWIKTESAPARTSLGITSVLTMTTLGTFSRKNFPRVSYITALDFYIAICFVFCFCALLEFAVLNFLIYNQTKAHASPKLRHPRINSRAHARTRARSRACARQHQEAFVCQIVTTEGSDGEERPSCSAQQPPSPGSPEGPRSLCSKLACCEWCKRFKKYFCMVPDCEGSTWQQGRLCIHVYRLDNYSRVVFPVTFFFFNVLYWLVCLNL

SEQ ID NO: 899 - protein, 2432 aa, Homo sapiens
ENGADAMATNIEQIFRSFVVSKFREIQQELSSGRNEGQLNGETNTPIEGNQAGDAAASARSLPNEEIVQKIEEVLSGVLDTELRYKPDLKEGSRKSRCVSVQTDPTDEIPTKKSKKHKKHKNKKKKKKKEKEKKYKRQPEESESKTKSHDDGNIDLESDSFLKFDSEPSAVALELPTRAFGPSETNESPAVVLEPPVVSMEVSEPHILETLKPATKTAELSVVSTSVISEQSEQSVAVMPEPSMTKILDSFAAAPVPTTTLVLKSSEPVVTMSVEYQMKSVLKSVESTSPEPSKIMLVEPPVAKVLEPSETLVVSSETPTEVYPEPSTSTTMDFPESSAIEALRLPEQPVDVPSEIADSSMTRPQELPELPKTTALELQESSVASAMELPGPPATSMPELQGPPVTPVLELPGPSATPVPELPGPLSTPVPELPGPPATAVPELPGPSVTPVPQLSQELPGLPAPSMGLEPPQEVPEPPVMAQELPGLPLVTAAVELPEQPAVTVAMELTEQPVTTTELEQPVGMTTVEHPGHPEVTTATGLLGQPEATMVLELPGQPVATTALELPGQPSVTGVPELPGLPSATRALELSGQPVATGALELPGPLMAAGALEFSGQSGAAGALELLGQPLATGVLELPGQPGAPELPGQPVATVALEISVQSVVTTSELSTMTVSQSLEVPSTTALESYNTVAQELPTTLVGETSVTVGVDPLMAPESHILASNTMETHILASNTMDSQMLASNTMDSQMLASNTMDSQMLASSTMDSQMLATSSMDSQMLATSSMDSQMLATSTMDSQMLATSSMDSQMLATSSMDSQMLATSSMDSQMLATSSMDSQMLATSTMDSQMLATSTMDSQMLATSSMDSQMLASGTMDSQMLASGTMDAQMLASGTMDAQMLASSTQDSAMLGSKSPDPYRLAQDPYRLAQDPYRLGHDPYRLGHDAYRLGQDPYRLGHDPYRLTPDPYRMSPRPYRIAPRSYRIAPRPYRLAPRPLMLASRRSMMMSYAAERSMMSSYERSMMSYERSMMSPMAERSMMSAYERSMMSAYERSMMSPMAERSMMSAYERSMMSAYERSMMSPMADRSMMSMGADRSMMSSYSAADRSMMSSYSAADRSMMSSYTADRSMMSMAADSYTDSYTDTYTEAYMVPPLPPEEPPTMPPLPPEEPPMTPPLPPEEPPEGPALPTEQSALTAENTWPTEVPSLPSEESVSQPEPPVSQSEISEPSAVPTDYSVSASDPSVLVSEAAVTVPEPPPEPESSITLTPVESAVVAEEHEVVPERPVTCMVSETPAMSAEPTVLASEPPVMSETAETFDSMRASGHVASEVSTSLLVPAVTTPVLAESILEPPAMAAPESSAMAVLESSAVTVLESSTVTVLESSTVTVLEPSVVTVPEPPVVAEPDYVTIPVPVVSALEPSVPVLEPAVSVLQPSMIVSEPSVSVQESTVTVSEPAVTVSEQTQVIPTEVAIESTPMILESSIMSSHVMKGINLSSGDQNLAPEIGMQEIALHSGEEPHAEEHLKGDFYESEHGINIDLNINNHLIAKEMEHNTVCAAGTSPVGEIGEEKILPTSETKQRTVLDTYPGVSEADAGETLSSTGPFALEPDATGTSKGIEFTTASTLSLVNKYDVDLSLTTQDTEHDMVISTSPSGGSEADIEGPLPAKDIHLDLPSNNNLVSKDTEEPLPVKESDQTLAALLSPKESSGGEKEVPPPPKETLPDSGFSANIEDINEADLVRPLLPKDMERLTSLRAGIEGPLLASDVGRDRSAASPVVSSMPERASESSSEEKDDYEIFVKVKDTHEKSKKNKNRDKGEKEKKRDSSLRSRSKRSKSSEHKSRKRTSESRSRARKRSSKSKSHRSQTRSRSRSRRRRRSSRSRSKSRGRRSVSKEKRKRSPKHRSKSRERKRKRSSSRDNRKTVRARSRTPSRRSRSHTPSRRRRSRSVGRRRSFSISPSRRSRTPSRRSRTPSRRSRTPSRRSRTPSRRSRTPSRRSRTPSRRRRSRSVVRRRSFSISPVRLRRSRTPLRRRFSRSPIRRKRSRSSERGRSPKRLTDLDKAQLLEIAKANAAAMCAKAGVPLPPNLKPAPPPTIEEKVAKKSGGATIEELTEKCKQIAQSKEDDDVIVNKPHVSDEEEEEPPFYHHPFKLSEPKPIFFNLNIAAAKPTPPKSQVTLTKEFPVSSGSQHRKKEADSVYGEWVPVEKNGEENKDDDNVFSSNLPSEPVDISTAMSERALAQKRLSENAFDLEAMSMLNRAQERIDAWAQLNSIPGQFTGSTGVQVLTQEQLANTGAQAWIKKDQFLRAAPVTGGMGAVLMRKMGWREGEGLGKNKEGNKEPILVDFKTDRKGLVAVGERAQKRSGNFSAAMKDLSGKHPVSALMEICNKRRWQPPEFLLVHDSGPDHRKHFLFRVLRNGALTRPNCMFFLNRY

SEQ ID NO: 900 - protein, 423 aa, Homo sapiens
PENNQIETMEDLCVANTLFALNLFKHLAKASPTQNLFLSPWSISSTMAMVYMGSRGSTEDQMAKVLQFNEVGANAVTPMTPENFTSCGFMQQIQKGSYPDAILQAQAADKIHSSFRSLSSAINASTGNYLLESVNKLFGEKSASFREEYIRLCQKYYSSEPQAVDFLECAEEARKKIYSWVKTQTKGKIPNLLPEGSVDGDTRMVLVNAVYFKGKWKTPFEKKLNGLYPFRVNSAQRTPVQMMYLREKLNIGYIEDLKAQILELPYAGDVSMFLLLPDEIADVSTGLELLESEITYDKLNKWTSKDKMAEDEVEVYIPQFKLEEHYELRSILRSMGMEDAFNKGRANFSGMSERNDLFLSEVFHQAMVDVNEEGTEAAAGTGGVMTGRTGHGGPQFVADHPFLFLIMHKITNCILFFGRFSSP

SEQ ID NO: 901 - protein, 1586 aa, Homo sapiens
GPGGAISLSVEAKAGADLLVKGKQARMDIYDTQTLGVVVFGGFMVVSAIGIFLVSTFSMKETSYEEALANQRKEMAKTHHQKVEKKKKEKTVEKKGKTKKKEEKPNGKIPDHDPAPNVTVLLREPVRAPAVAVAPTPVQPPIIVAPVATVPAMPQEKLASSPKDKKKKEKKVAKVEPAVSSVVNSIQVLTSKAAILETAPKEVPMVVVPPVGAKGNTPATGTTQGKKAEGTQNQSKKAEGAPNQGRKAEGTPNQGKKTEGTPNQGKKAEGTPNQGKKAEGTPNQGKKAEGAQNQGKKVDTTPNQGKKVEGAPTQGRKAEGAQNQAKKVEGAQNQGKKAEGAQNQGKKGEGAQNQGKKAEGAQNQGKKAEGAQNQGKKAEGAQNQGKKAEGAQNQGKKAEGAQNQGKKAEGAQNQGKKVEGAQNQGKKAEGAQNQGKKAEGAQNQGKKAEGAQNQGKKAEGAQNQGKKAEGAQNQDKKAEGAQNQGRKAEGAQNQGRKAEGAQNQGKKAEGAPNQGKKAEGAPNQGKKAEGTPNQGKKAEGTPNQGKKAEGTPNQGKKAEGAQNQGKKAEGAQNQGKKAEGTPNQGKKAEGAQNQGKKAEGAQNQGKKAEGAQNQGKKAEGAQNQGKKAEGAQNQGKKAEGAQNQGKKVEGAQNQGKKAEGAQNQGKKAEGAQNQGKKAEGAQNQGQKGEGAQNQGKKTEGAQGKKAERSPNQGKKGEGAPIQGKKADSVANQGTKVEGITNQGKKAEGSPSEGKKAEGSPNQGKKADAAANQGKKTESASVQGRNTDVAQSPEAPKQEAPAKKKSGSKKKGEPGPPDADGPLYLPYKTLVSTVGSMVFNEGEAQRLIEILSEKAGIIQDTWHKATQKGDPVAILKRQLEEKEKLLATEQEDAAVAKSKLRELNKEMAAEKAKAAAGEAKVKKQLVAREQEITAVQARMQASYREHVKEVQQLQGKIRTLQEQLENGPNTQLARLQQENSILRDALNQATSQVESKQNAELAKLRQELSKVSKELVEKSEAVRQDEQQRKALEAKAAAFEKQVLQLQASHRESEEALQKRLDEVSRELCHTQSSHASLRADAEKAQEQQQQMAELHSKLQSSEAEVRSKCEELSGLHGQLQEARAENSQLTERIRSIEALLEAGQARDAQDVQASQAEADQQQTRLKELESQVSGLEKEAIELREAVEQQKVKNNDLREKNWKAMEALATAEQACKEKLHSLTQAKEESEKQLCLIEAQTMEALLALLPELSVLAQQNYTEWLQDLKEKGPTLLKHPPAPAEPSSDLASKLREAEETQSTLQAECDQYRSILAETEGMLRDLQKSVEEEEQVWRAKVGAAEEELQKSRVTVKHLEEIVEKLKGELESSDQVREHTLHLEAELEKHMAAASAECQNYAKEVAGLRQLLLESQSQLDAAKSEAQKQSDELALVRQQLSEMKSHVEDGDIAGAPASSPEAPPAEQDPVQLKTQLEWTEAILEDEQTQRQKLTAEFEEAQTSACRLQEELEKLRTAGPLESSETEEASQLKERLEKEKKLTSDLGRAATRLQELLKTTQEQLAREKDTVKKLQEQLEKAEDGSSSKEGTSV

SEQ ID NO: 902 - protein, 546 aa, Homo sapiens
AVRRSQAECCGAILASLSVGPGGKKMVLDLDLFRVDKGGDPALIRETQEKRFKDPGLVDQLVKADSEWRRCRFRADNLSKLKNLCSKTIGEKMKKKEPVGDDESVPENVLSFDDLTADALAGLACSSANLKVSQIKKVRLLIDEAILKCDAERIKLEAERFENLREIGNLLHPSVPISNDEDVDNKVERIWGDCTVRKKYSHVDLVVMVDGFEGEKGAVVAGSRGYFLKGVLVFLEQALIQYALRTLGSRGYIPIYTPFFMRKEVMQEVAQLSQFDEELYKVIGKGSEKSDDNSYDEKYLIATSEQPIAALHRDEWLRPEDLPIKYAGLSTCFRQEVGSHGRDTRGIFRVHQFEKIEQFVYSSPHDNKSWEMFEEMITTAEEFYQSLGIPYHIVNIVSGSLNHAASKKLDLEAWFPGSGAFRELVSCSNCTDYQARRLRIRYGQTKKMMDKVEFVHMLNATMCATTRTICAILENYQTEKGITVPEKLKEFMPPGLQELIPFVKPAPIEQEPSKKQKKQHEGSKKKAAARDVTLENRLQNMEVTDA

SEQ ID NO: 903 - protein, 1614 aa, Homo sapiens
GKSARGGIRARRRGAEPASLASEGSRGGRAPGGPPETRRMPHEELPSLQRPRYGSIVDDERLSAEEMDERRRQNIAYEYLCHLEEAKRWMEVCLVEELPPTTELEEGLRNGVYLAKLAKFFAPKMVSEKKIYDVEQTRYKKSGLHFRHTDNTVQWLRAMESIGLPKIFYPETTDVYDRKNIPRMIYCIHALSLYLFKLGIAPQIQDLLGKVDFTEEEISNMRKELEKYGIQMPSFSKIGGILANELSVDEAALHAAVIAINEAVEKGIAEQTVVTLRNPNAVLTLVDDNLAPEYQKELWDAKKKKEENARLKNSCISEEERDAYEELLTQAEIQGNINKVNRQAAVDHINAVIPEGDPENTLLALKKPEAQLPAVYPFAAAMYQNELFNLQKQNTMNYLAHEELLIAVEMLSAVALLNQALESNDLVSVQNQLRSPAIGLNNLDKAYVERYANTLLSVKLEVLSQGQDNLSWNEIQNCIDMVNAQIQEENDRVVAVGYINEAIDEGNPLRTLETLLLPTANISDVDPAHAQHYQDVLYHAKSQKLGDSESVSKVLWLDEIQQAVDEANVDEDRAKQWVTLVVDVNQCLEGKKSSDILSVLKSSTSNANDIIPECADKYYDALVKAKELKSERVSSDGSWLKLNLHKKYDYYYNTDSKESSWVTPESCFYKESWLTGKEIEDIIEEVTVGYIRENIWSASEELLLRFQATSSGPILREEFEARKSFLHEQEENVVKIQAFWKGYKQRKEYMHRRQTFIDNTDSVVKIQSWFRMATARKSYLSRLQYFRDHNNEIVKIQSLLRANKARDDYKTLVGSENPPLTVIRKFVYLLDQSDLDFQEELEVARLREEVVTKIRANQQLEKDLNLMDIKIGLLVKNRITLEDVISHSKKLNKKKGGEMEILNNTDNQGIKSLSKERRKTLETYQQLFYLLQTNPLYLAKLIFQMPQNKSTKFMDTVIFTLYNYASNQREEYLLLKLFKTALEEEIKSKVDQVQDIVTGNPTVIKMVVSFNRGARGQNTLRQLLAPVVKEIIDDKSLIINTNPVEVYKAWVNQLETQTGEASKLPYDVTTEQALTYPEVKNKLEASIENLRRVTDKVLNSIISSLDLLPYGLRYIAKVLKNSIHEKFPDATEDELLKIVGNLLYYRYMNPAIVAPDGFDIIDMTAGGQINSDQRRNLGSVAKVLQHAASNKLFEGENEHLSSMNNYLSETYQEFRKYFKEACNVPEPEEKFNMDKYTDLVTVSKPVIYISIEEIISTHSLLLEHQDAIAPEKNDLLSELLGSLGEVPTVESFLGEGAVDPNDPNKANTLSQLSKTEISLVLTSKYDIEDGEAIDSRSLMIKTKKLIIDVIRNQPGNTLTEILETPATAQQEVDHATDMVSRAMIDSRTPEEMKHSQSMIEDAQLPLEQKKRKIQRNLRTLEQTGHVSSENKYQDILNEIAKDIRNQRIYRKLRKAELAKLQQTLNALNKKAAFYEEQINYYDTYIKTCLDNLKRKNTRRSIKLDGKGEPKGAKRAKPVKYTAAKLHEKGVLLDIDDLQTNQFKNVTFDIIATEDVGIFDVRSKFLGVEMEKVQLNIQDLLQMQYEGVAVMKMFDKVKVNVNLLIYLLNKKFYGK

SEQ ID NO: 904 - protein, 467 aa, Homo sapiens
EFRAPGMRSRPAGPALLLLLLFLGAAESVRRAQPPRRYTPDWPSLDSRPLPAWFDEAKFGVFIHWGVFSVPAWGSEWFWWHWQGEGRPQYQRFMRDNYPPGFSYADFGPQFTARFFHPEEWADLFQAAGAKYVVLTTKHHEGFTNWPSPVSWNWNSKDVGPHRDLVGELGTALRKRNIRYGLYHSLLEWFHPLYLLDKKNGFKTQHFVSAKTMPELYDLVNSYKPDLIWSDGEWECPDTYWNSTNFLSWLYNDSPVKDEVVVNDRWGQNSSCHHGGYYNCEDKFKPQSLPDHKWEMCTSIDKFSWGYRRDMALSDVTEESEIISELVQTVSLGGNYLLNIGPTKDGLIVPIFQERLLAVGKWLSINGEAIYASKPWRVQWEKNTTSVWYTSKGSAVYAIFLHWPENGVLNLESPITTSTTKITMLGIQGDLKWSTDPDKGLFISLPQLPPSAVPAEFAWTIKLTGVK

SEQ ID NO: 905 - protein, 697 aa, Homo sapiens
SLLADRTGAPAPGVTRSSQPPRHMAPGQAPHQATPWRDAHPFFLLSPVMGLLSRAWSRLRGLGPLEPWLVEAVKGAALVEAGLEGEARTPLAIPHTPWGRRPEEEAEDSGGPGEDRETLGLKTSSSLPEAWGLLDDDDGMYGEREATSVPRGQGSQFADGQRAPLSPSLLIRTLQGSDKNPGEEKAEEEGVAEEEGVNKFSYPPSHRECCPAVEEEDDEEAVKKEAHRTSTSALSPGSKPSTWVSCPGEEENQATEDKRTERSKGARKTSVSPRSSGSDPRSWEYRSGEASEEKEEKAHKETGKGEAAPGPQSSAPAQRPQLKSWWCQPSDEEEGEVKALGAAEKDGEAECPPCIPPPSAFLKAWVYWPGEDTEEEEDEEEDEDSDSGSDEEEGEAEASSSTPATGVFLKSWVYQPGEDTEEEEDEDSDTGSAEDEREAETSASTPPASAFLKAWVYRPGEDTEEEEDEDVDSEDKEDDSEAALGEAESDPHPSHPDQRAHFRGWGYRPGKETEEEEAAEDWGEAEPCPFRVAIYVPGEKPPPPWAPPRLPLRLQRRLKRPETPTHDPDPETPLKARKVRFSEKVTVHFLAVWAGPAQAARQGPWEQLARDRSRFARRITQAQEELSPCLTPAARARAWARLRNPPLAPIPALTQTLPSSSVPSSPVQTTPLSQAVATPSRSSAAAAAALDLSGRRG

SEQ ID NO: 906 - protein, 106 aa, Homo sapiens
QAHLVRKLPASRMSLYRDVLLLCLPWLLEAGAVQPAPLSRVFDHAMLQAHRAHQLAIVTYPEFADTYIPKHQKDSFLHDSQTSFCFSDSIPTLSKMQETLQTSNLE

SEQ ID NO: 907 - protein, 639 aa, Homo sapiens
PTPCRSRPAPSRPRSRSRSPVGETKMGTISGGGGSNAATRQVGCAPSGRPSTRPSGTAIRARPVASVKPIDEGLAEVRVIEDEAIGIEGERLDRRKERRRQEALIEDQQQRQRRWPGLPAARPGRAASSAGIGGRQGLLARGTLWWLSSGLVRSSSGRRNQTDVDAPGVEAEAGVVVAEGLPQPPRASGQTPERGGATRLGKMTQFLPPNLLALFAPRDPIPYLPPLEKLPHEKHHNQPYCGIAPYIREFEDPRDAPPPTRAETREERMERKRREKIERRQQEVETELKMWDPHNDPNAQGDAFKTLFVARVNYDTTESKLRREFEVYGPIKRIHMVYSKRSGKPRGYAFIEYEHERDMHSAYKHADGKKIDGRRVLVDVERGRTVKGWRPRRLGGGLGGTRRGGADVNIRHSGRDDTSRYDERPGPSPLPHRDRDRDRERERRERSRERDKERERRRSRSRDRRRRSRSRDKEERRRSRERSKDKDRDRKRRSSRSRERARRERERKEELRGGGGDMAEPSEAGDAPPDDGPPGELGPDGPDGPEEKGRDRDRERRRSHRSERERRRDRDRDRDRDREHKRGERGSERGRDEARGGGGGQDNGLEGLGNDSRDMYMESEGGDGYLAPENGYLMEAAPE

SEQ ID NO: 908 - protein, 1029 aa, Homo sapiens
LCSQPCVVNLEAVVSSEFRSSIPVYKKRWKNEKHLHTSRTQIVHVKFPSIMVYRDDYFIRHSISVSAVIVRAWITHKYSGRDWNVKWEENLLHAVAKNYTLLQTIPPFERPFKDHQVCLEWNMGYIWNLRANRIPQCPLENDVVALLGFPYASSGENTGIVKKFPRFRNRELEATRRQRMDYPVFTVSLWLYLLHYCKANLCGILYFVDSNEMYGTPSVFLTEEGYLHIQMHLVKGEDLAVKTKFIIPLKEWFRLDISFNGGQIVVTTSIGQDLKSYHNQTISFREDFHYNDTAGYFIIGGSRYVAGIEGFFGPLKYYRLRSLHPAQIFNPLLEKQLAEQIKLYYERCAEVQEIVSVYASAAKHGGERQEACHLHNSYLDLQRRYGRPSMCRAFPWEKELKDKHPSLFQALLEMDLLTVPRNQNESVSEIGGKIFEKAVKRLSSIDGLHQISSIVPFLTDSSCCGYHKASYYLAVFYETGLNVPRDQLQGMLYSLVGGQGSERLSSMNLGYKHYQGIDNYPLDWELSYAYYSNIATKTPLDQHTLQGDQAYVETIRLKDDEILKVQTKEDGDVFMWLKHEATRGNAAAQQRLAQMLFWGQQGVAKNPEAAIEWYAKGALETEDPALIYDYAIVLFKGQGVKKNRRLALELMKKAASKGLHQAVNGLGWYYHKFKKNYAKAAKYWLKAEEMGNPDASYNLGVLHLDGIFPGVPGRNQTLAGEYFHKAAQGGHMEGTLWCSLYYITGNLETFPRDPEKAVVWAKHVAEKNGYLGHVIRKGLNAYLEGSWHEALLYYVLAAETGIEVSQTNLAHICEERPDLARRYLGVNCVWRYYNFSVFQIDAPSFAYLKMGDLYYYGHQNQSQDLELSVQMYAQAALDGDSQGFFNLALLIEEGTIIPHHILDFLEIDSTLHSNNISILQELYERCWSHSNEESFSPCSLAWLYLHLRLLWGAILHSALIYFLGTFLLSILIAWTVQYFQSVSASDPPPRPSQASPDTATSTASPAVTPAADASDQDQPTVTNNPEPRG

SEQ ID NO: 909 - protein, 120 aa, Homo sapiens
GPALKMQAQAPVVVVTQPGVGPGPAPQNSNWQTGMCDCFSDCGVCLCGTFCFPCLGCQVAADMNECCLCGTSVAMRTLYRTRYGIPGSICDDYMATLCCPHCTLCQIKRDINRRRAMRTF

SEQ ID NO: 910 - protein, 76 aa, Homo sapiens
GSRKSKNCKYPRKPRSSRKRSSSGSRSRSRERRDNPGKYKKKSHYYRDQRRERSRSYERTGRRYERDHPGHSRHRR

SEQ ID NO: 911 - protein, 344 aa, Homo sapiens
GAVAASSRVRTLRRGAEEREGARGSRSESRARTQPGPTALPSCPGRAPAMEHQLLCCEVETIRRAYPDANLLNDRVLRAMLKAEETCAPSVSYFKCVQKEVLPSMRKIVATWMLEVCEEQKCEEEVFPLAMNYLDRFLSLEPVKKSRLQLLGATCMFVASKMKETIPLTAEKLCIYTDNSIRPEELLQMELLLVNKLKWNLAAMTPHDFIEHFLSKMPEAEENKQIIRKHAQTFVALCATDVKFISNPPSMVAAGSVVAAVQGLNLRSPNNFLSYYRLTRFLSRVIKCDPDCLRACQEQIEALLESSLRQAQQNMDPKAAEEEEEEEEEVDLACTPTDVRDVDI

SEQ ID NO: 912 - protein, 410 aa, Homo sapiens
AGSKALRELGTPPPRTRSLAPAAARPQRTMESGSTAASEEARSLRECELYVQKHNIQALLKDSIVQLCTARPERPMAFLREYFERLEKEEAKQIQNLQKAGTRTDSREDEISPPPPNPVVKGRRRRGAISAEVYTEEDAASYVRKVIPKDYKTMAALAKAIEKNVLFSHLDDNERSDIFDAMFSVSFIAGETVIQQGDEGDNFYVIDQGETDVYVNNEWATSVGEGGSFGELALIYGTPRAATVKAKTNVKLWGIDRDSYRRILMGSTLRKRKMYEEFLSKVSILESLDKWERLTVADALEPVQFEDGQKIVVQGEPGDEFFIILEGSAAVLQRRSENEEFVEVGRLGPSDYFGEIALLMNRPRAATVVARGPLKCVKLDRPRFERVLGPCSDILKRNIQQYNSFVSLSV

SEQ ID NO: 913 - protein, 136 aa, Homo sapiens
GSGGGGGGPLGSGRDGGGSMNAPPAFESFLLFEGEKKITINKDTKVPNACLFTINKEDHTLGNIIKSQLLKDPQVLFAGYKVPHPLEHKIIIRVQTTPDYSPQEAFTNAITDLISELSLLEERFRVAIKDKQEGIE

SEQ ID NO: 914 - protein, 1532 aa, Homo sapiens
ALQISRRKHQEKKERGGFIQSCFQFLQNLKPGGYGMDVTKKNKRDGTEVTERIVTETVTTRLTSLPPKGGTSNGYAKTASLGGGSRLEKQSLTHGSSGYINSTGSTRGHASTSSYRRAHSPASTLPNSPGSTFERKTHVTRHAYEGSSSGNSSPEYPRKEFASSSTRGRSQTRESEIRVRLQSASPSTRWTELDDVKRLLKGSRSASVSPTRNSSNTLPIPKKGTVETKIVTASSQSVSGTYDATILDANLPSHVWSSTLPAGSSMGTYHNNMTTQSSSLLNTNAYSAGSVFGVPNNMASCSPTLHPGLSTSSSVFGMQNNLAPSLTTLSHGTTTTSTAYGVKKNMPQSPAAVNTGVSTSAACTTSVQSDDLLHKDCKFLILEKDNTPAKKEMELLIMTKDSGKVFTASPASIAATSFSEDTLKKEKQAAYNADSGLKAEANGDLKTVSTKGKTTTADIHSYSSSGGGGSGGGGGVGGAGGGPWGPAPAWCPCGSCCSWWKWLLGLLLTWLLLLGLLFGLIALAEEVRKLKARVDELERIRRSILPYGDSMDRIEKDRLQGMAPAAGADLDKIGLHSDSQEELWMFVRKKLMMEQENGNLRGSPGPKGDMGSPGPKGDRGFPGTPGIPGPLGHPGPQGPKGQKGSVGDPGMEGPMGQRGREGPMGPRGEAGPPGSGEKGERGAAGEPGPHGPPGVPGSVGPKGSSGSPGPQGPPGPVGLQGLRGEVGLPGVKGDKGPMGPPGPKGDQGEKGPRGLTGEPGMRGLPGAVGEPGAKGAMGPAGPDGHQGPRGEQGLTGMPGIRGPPGPSGDPGKPGLTGPQGPQGLPGTPGRPGIKGEPGAPGKIVTSEGSSMLTVPGPPGPPGAMGPPGPPGAPGPAGPAGLPGHQEVLNLQGPPGPPGPRGPPGPSIPGPPGPRGPPGEGLPGPPGPPGSFLSNSETFLFGPPGPPGPPGPKGDQGPPGPRGHQGEQGLPGFSTSGSSSFGLNLQGPPGPPGPQGPKGDKGDPGVPGALGIPSGPSEGGSSSTMYVSGPPGPPGPPGPPGSISSSGQEIQQYISEYMQSDSIRSYLSGVQGPPGPPGPPGPVTTITGETFDYSELASHVVSYLRTSGYGVSLFSSSISSEDILAVLQRDDVRQYLRQYLMGPRGPPGPPGASGDGSLLSLDYAELSSRILSYMSSSGISIGLPGPPGPPGLPGTSYEELLSLLRGSEFRGIVGPPGPPGPPGIPGNVWSSISVEDLSSYLHTAGLSFIPGPPGPPGPPGPRGPPGVSGALATYAAENSDSFRSELISYLTSPDVRSFIVGPPGPPGPQGPPGDSRLLSTDASHSRGSSSSSHSSSVRRGSSYSSSMSTGGGGAGSLGAGGAFGEAAGDRGPYGTDIGPGGGYGAAAEGGMYAGNGGLLGADFAGDLDYNELAVRVSESMQRQGLLQGMAYTVQGPPGQPGPQGPPGISKVFSAYSNVTADLMDFFQTYGAIQGPPGQKGEMGTPGPKGDRGPAGPPGHPGPPGPRGHKGEKGDKGDQVYAGRRRRRSIAVKP

SEQ ID NO: 915 - protein, 478 aa, Homo sapiens
SRGGIPRTAGKGAGQAQGSLEPSPGLPSPVGARMLKKQSAGLVLWGAILFVAWNALLLLFFWTRPAPGRPPSVSALDGDPASLTREVIRLAQDAEVELERQRGLLQQIGDALSSQRGRVPTAAPPAQPRVPVTPAPAVIPILVIACDRSTVRRCLDKLLHYRPSAELFPIIVSQDCGHEETAQAIASYGSAVTHIRQPDLSSIAVPPDHRKFQGYYKIARHYRWALGQVFRQFRFPAAVVVEDDLEVAPDFFEYFRATYPLLKADPSLWCVSAWNDNGKEQMVDASRPELLYRTDFFPGLGWLLLAELWAELEPKWPKAFWDDWMRRPEQRQGRACIRPEISRTMTFGRKGVSHGQFFDQHLKFIKLNQQFVHFTQLDLSYLQREAYDRDFLARVYGAPQLQVEKVRTNDRKELGEVRVQYTGRDSFKAFAKALGVMDDLKSGVPRAGYRGIVTFQFRGRRVHLAPPPTWEGYDPSWN

SEQ ID NO: 916 - protein, 3002 aa, Homo sapiens
YFSREKPLRGRYLKRWGKEGAAGAAAETVGATSGQEPQLGQLRAEPSSGCSGHDWEQPPPPPRESEPPLLHWQGPPEVGAAPGEGGRSPARGTGGGIAGPRRRGALQGAAAAADRAPGAARGGGSRWRLGIMRRGRLLEIALGFTVLLASYTSHGADANLEAGNVKETRASRAKRRGGGGHDALKGPNVCGSRYNAYCCPGWKTLPGGNQCIVPICRHSCGDGFCSRPNMCTCPSGQIAPSCGSRSIQHCNIRCMNGGSCSDDHCLCQKGYIGTHCGQPVCESGCLNGGRCVAPNRCACTYGFTGPQCERDYRTGPCFTVISNQMCQGQLSGIVCTKTLCCATVGRAWGHPCEMCPAQPHPCRRGFIPNIRTGACQDVDECQAIPGLCQGGNCINTVGSFECKCPAGHKLNEVSQKCEDIDECSTIPGICEGGECTNTVSSYFCKCPPGFYTSPDGTRCIDVRPGYCYTALTNGRCSNQLPQSITKMQCCCDAGRCWSPGVTVAPEMCPIRATEDFNKLCSVPMVIPGRPEYPPPPLGPIPPVLPVPPGFPPGPQIPVPRPPVEYLYPSREPPRVLPVNVTDYCQLVRYLCQNGRCIPTPGSYRCECNKGFQLDLRGECIDVDECEKNPCAGGECINNQGSYTCQCRAGYQSTLTRTECRDIDECLQNGRICNNGRCINTDGSFHCVCNAGFHVTRDGKNCEDMDECSIRNMCLNGMCINEDGSFKCICKPGFQLASDGRYCKDINECETPGICMNGRCVNTDGSYRCECFPGLAVGLDGRVCVDTHMRSTCYGGYKRGQCIKPLFGAVTKSECCCASTEYAFGEPCQPCPAQNSAEYQALCSSGPGMTSAGSDINECALDPDICPNGICENLRGTYKCICNSGYEVDSTGKNCVDINECVLNSLLCDNGQCRNTPGSFVCTCPKGFIYKPDLKTCEDIDECESSPCINGVCKNSPGSFICECSSESTLDPTKTICIETIKGTCWQTVIDGRCEININGATLKSQCCSSLGAAWGSPCTLCQVDPICGKGYSRIKGTQCEDIDECEVFPGVCKNGLCVNTRGSFKCQCPSGMTLDATGRICLDIRLETCFLRYEDEECTLPIAGRHRMDACCCSVGAAWGTEECEECPMRNTPEYEELCPRGPGFATKEITNGKPFFKDINECKMIPSLCTHGKCRNTIGSFKCRCDSGFALDSEERNCTDIDECRISPDLCGRGQCVNTPGDFECKCDEGYESGFMMMKNCMDIDECQRDPLLCRGGVCHNTEGSYRCECPPGHQLSPNISACIDINECELSAHLCPNGRCVNLIGKYQCACNPGYHSTPDRLFCVDIDECSIMNGGCETFCTNSEGSYECSCQPGFALMPDQRSCTDIDECEDNPNICDGGQCTNIPGEYRCLCYDGFMASEDMKTCVDVNECDLNPNICLSGTCENTKGSFICHCDMGYSGKKGKTGCTDINECEIGAHNCGKHAVCTNTAGSFKCSCSPGWIGDGIKCTDLDECSNGTHMCSQHADCKNTMGSYRCLCKEGYTGDGFTCTDLDECSENLNLCGNGQCLNAPGGYRCECDMGFVPSADGKACEDIDECSLPNICVFGTCHNLPGLFRCECEIGYELDRSGGNCTDVNECLDPTTCISGNCVNTPGSYICDCPPDFELNPTRVGCVDTRSGNCYLDIRPRGDNGDTACSNEIGVGVSKASCCCSLGKAWGTPCEMCPAVNTSEYKILCPGGEGFRPNPITVILEDIDECQELPGLCQGGKCINTFGSFQCRCPTGYYLNEDTRVCDDVNECETPGICGPGTCYNTVGNYTCICPPDYMQVNGGNNCMDMRRSLCYRNYYADNQTCDGELLFNMTKKMCCCSYNIGRAWNKPCEQCPIPSTDEFATLCGSQRPGFVIDIYTGLPVDIDECREIPGVCENGVCINMVGSFRCECPVGFFYNDKLLVCEDIDECQNGPVCQRNAECINTAGSYRCDCKPGYRFTSTGQCNDRNECQEIPNICSHGQCIDTVGSFYCLCHTGFKTNDDQTMCLDINECERDACGNGTCRNTIGSFNCRCNHGFILSHNNDCIDVDECASGNGNLCRNGQCINTVGSFQCQCNEGYEVAPDGRTCVDINECLLEPRKCAPGTCQNLDGSYRCICPPGYSLQNEKCEDIDECVEEPEICALGTCSNTEGSFKCLCPEGFSLSSSGRRCQDLRMSYCYAKFEGGKCSSPKSRNHSKQECCCALKGEGWGDPCELCPTEPDEAFRQICPYGSGIIVGPDDSAVDMDECKEPDVCKHGQCINTDGSYRCECPFGYTLAGNECVDTDECSVGNPCGNGTCKNVIGGFECTCEEGFEPGPMMTCEDINECAQNPLLCAFRCVNTYGSYECKCPVGYVLREDRRMCKDEDECEEGKHDCTEKQMECKNLIGTYMCICGPGYQRRPDGEGCVDENECQTKPGICENGRCLNTRGSYTCECNDGFTASPNQDECLDNREGYCFTEVLQNMCQIGSSNRNPVTKSECCCDGGRGWGPHCEICPFQGTVAFKKLCPHGRGFMTNGADIDECKVIHDVCRNGECVNDRGSYHCICKTGYTPDITGTSCVDLNECNQAPKPCNFICKNTEGSYQCSCPKGYILQEDGRSCKDLDECATKQHNCQFLCVNTIGGFTCKCPPGFTQHHTSCIDNNECTSDINLCGSKGICQNTPGSFTCECQRGFSLDQTGSSCEDVDECEGNHRCQHGCQNIIGGYRCSCPQGYLQHYQWNQCVDENECLSAHICGGASCHNTLGSYKCMCPAGFQYEQFSGGCQDINECGSAQAPCSYGCSNTEGGYLCGCPPGYFRIGQGHCVSGMGMGRGNPEPPVSGEMDDNSLSPEACYECKINGYPKRGRKRRSTNETDASNIEDQSETEANVSLASWDVEKTAIFAFNISHVSNKVRILELLPALTTLTNHNRYLIESGNEDGFFKINQKEGISYLHFTKKKPVAGTYSLQISSTPLYKKKELNQLEDKYDKDYLSGELGDNLKMKIQVLLH

SEQ ID NO: 917 - protein, 708 aa, Homo sapiens
AGQTPGHRASGPSERSPAPRTRLQPGGEAATRTEPATPGRRAGPGSATMEALMARGALTGPLRALCLLGCLLSHAAAAPSPIIKFPGDVAPKTDKELAVQYLNTFYGCPKESCNLFVLKDTLKKMQKFFGLPQTGDLDQNTIETMRKPRCGNPDVANYNFFPRKPKWDKNQITYRIIGYTPDLDPETVDDAFARAFQVWSDVTPLRFSRIHDGEADIMINFGRWEHGDGYPFDGKDGLLAHAFAPGTGVGGDSHFDDDELWTLGEGQVVRVKYGNADGEYCKFPFLFNGKEYNSCTDTGRSDGFLWCSTTYNFEKDGKYGFCPHEALFTMGGNAEGQPCKFPFRFQGTSYDSCTTEGRTDGYRWCGTTEDYDRDKKYGFCPETAMSTVGGNSEGAPCVFPFTFLGNKYESCTSAGRSDGKMWCATTANYDDDRKWGFCPDQGYSLFLVAAHEFGHAMGLEHSQDPGALMAPIYTYTKNFRLSQDDIKGIQELYGASPDIDLGTGPTPTLGPVTPEICKQDIVFDGIAQIRGEIFFFKDRFIWRTVTPRDKPMGPLLVATFWPELPEKIDAVYEAPQEEKAVFFAGNEYWIYSASTLERGYPKPLTSLGLPPDVQRVDAAFNWSKNKKTYIFAGDKFWRYNEVKKKMDPGFPKLIADAWNAIPDNLDAVVDLQGGGHSYFFKGAYYLKLENQSLKSVKFGSIKSDWLGC

SEQ ID NO: 918 - protein, 532 aa, Homo sapiens
RRRPRLLPGAEPCEPRVGPRRADMGCSAKARWAAGALGVAGLLCAVLGAVMIVMVPSLIKQQVLKNVRIDPSSLSFNMWKEIPIPFYLSVYFFDVMNPSEILKGEKPQVRERGPYVYRESRHKSNITFNNNDTVSFLEYRTFQFQPSKSHGSESDYIVMPNILVLGAAVMMENKPMTLKLIMTLAFTTLGERAFMNRTVGEIMWGYKDPLVNLINKYFPGMFPFKDKFGLFAELNNSDSGLFTVFTGVQNISRIHLVDKWNGLSKVDFWHSDQCNMINGTSGQMWPPFMTPESSLEFYSPEACRSMKLMYKESGVFEGIPTYRFVAPKTLFANGSIYPPNEGFCPCLESGIQNVSTCRFSAPLFLSHPHFLNADPVLAEAVTGLHPNQEAHSLFLDIHPVTGIPMNCSVKLQLSLYMKSVAGIGQTGKIEPVVLPLLWFAESGAMEGETLHTFYTQLVLMPKVMHYAQYVLLALGCVLLLVPVICQIRSQEKCYLFWSSSKKGSKDKEAIQAYSESLMTSAPKGSVLQEAKL

SEQ ID NO: 919 - protein, 260 aa, Homo sapiens
TAASGARSRPEPGTQVRSLNFRMLTTLLPILLLSGWAFCSQDASDGLQRLHMLQISYFRDPYHVWYQGNASLGGHLTHVLEGPDTNTTIIQLQPLQEPESWARTQSGLQSYLLQFHGLVRLVHQERTLAFPLTIRCFLGCELPPEGSRAHVFFEVAVNGSSFVSFRPERALWQADTQVTSGVVTFTLQQLNAYNRTRYELREFLEDTCVQYVQKHISAENTKGSQTSRSYTSLVLGVLVGSFIIAGVAVGIFLCTGGRRC

SEQ ID NO: 920 - protein, 217 aa, Homo sapiens
VWVGLAAVEFVTYEVTPLESLPFNSSWSACLALGSFCSLRPAPSLRAGLQRRAQPSAACQQPPSRPAAQPRTKPGQSFLAARAMNTEMYQTPMEVAVYQLHNFSISFFSSLLGGDVVSVKLDNSASGASVVAIDNKIEQAMDLVKNHLMYAVREEVEILKEQIRELVEKNSQLERENTLLKTLASPEQLEKFQSCLSPEEPAPESPQVPEAPGGSAV

SEQ ID NO: 921 - protein, 658 aa, Homo sapiens
MRALRDRAGLLLCVLLLAALLEAALGLPVKKPRLRGPRPGSLTRLAEVSGGGTGLRSALSVPPPQPAGSSRAGSGTGTHTGSDPPMERGAGAGRKLPDTGRCPVTEGSTVQLIAPWNAADVHSHGDKDSQTCIRVSASPDPRPLKEEEEAPLLPRTHLQAEPHQHGCWTVTEPAAMTPGNATPPRTPEVTPLRLELQKLPGLANTTLSTPNPDTQASASPDPRPLREEEEARLLPRTHLQAELHQHGCWTVTEPAALTPGNATPPRTQEVTPLLLELQKLPELVHATLSTPNPDNQVTIKVVEDPQAEVSIDLLAEPSNPPPQDTLSWLPALWSFLWGDYKGEEKDRAPGEKGEEKEEDEDYPSEDIEGEDQEDKEEDEEEQALWFNGTTDNWDQGWLAPGDWVFKDSVSYDYEPQKEWSPWSPCSGNCSTGKQQRTRPCGYGCTATETRTCDLPSCPGTEDKDTLGLPSEEWKLLARNATDMHDQDVDSCEKWLNCKSDFLIKYLSQMLRDLPSCPCAYPLEAMDSPVSLQDEHQGRSFRWRDASGPRERLDIYQPTGRFCLRSMLSGESSTLAAQHCCYDEDSRLLTRGKGAGMPNLISTDFSPKLHFKFDTTPWILCKGDWSRLHAVLPPNNGRACTDNPLEEEYLAQLQEAKEY

SEQ ID NO: 922 - protein, 271 aa, Homo sapiens
FSCYCYCCCCHRHYHWAHLPRPLPAAPPPAPHKMSEDLAKQLASYKAQLQQVEAALSGNGENEDLLKLKKDLQEVIELTKDLLSTQPSETLASSDSFASTQPTHSWKVGDKCMAVWSEDGQCYEAEIEEIDEENGTAAITFAGYGNAEVTPLLNLKPVEEGRKAKEDSGNKPMSKKEMIAQQREYKKKKALKKAQRIKELEQEREDQKVKWQQFNNRAYSKNKKGQVKRSIFASPESVTGKVGVGTCGIADKPMTQYQDTSKYNVRHLMPQ

SEQ ID NO: 923 - protein, 344 aa, Homo sapiens
DPASNMWQLWASLCCLLVLANARSRPSFHPVSDELVNYVNKRNTTWQAGHNFYNVDMGYLKRLCGTFLGGPKPPQRVMFTEDLKLPASFDAREQWPQCPTIKEIRDQGSCGSCWAFGAVEAISDRICIHTNAHVSVEVSAEDLLTCCGSMCGDGCNGGYPAEAWNFWTRKGLVSGGLYESHVGCRPYSIPPCEHHVNGSRPPCTGEGDTPKCSKICEPGYSPTYKQDKHYGYNSYSVSNSEKDIMAEIYKNGPVEGAFSVYSDFLLYKSGVYQHVTGEMMGGHAIRILGWGVENGTPYWLVANSWNTDWGDNGFFKILRGQDHCGIESEVVAGIPRTDQYWEKI

SEQ ID NO: 924 - protein, 91 aa, Homo sapiens
PSCTIQRNIFINYFVNASFLVAPRTFLRRRESHLIPFFKCKCFFLRGEIICWLFIFWYNQKIVWDIELWEALTVSGVSLTFHRWGVSFYIL

SEQ ID NO: 925 - protein, 216 aa, Homo sapiens
  misc_feature (1)...(216): Xaa = any amino acid or nothing
IYGTWSATHTQTKRTRQKNTQRHTNTQVREQRTRPEQQERCGPHTTSKRRQRPTREQEKHTQRGRAAQQNRRKQNHGERTRTKQSKKSDSEDKKQQKSSHRTTTQQXHKPEQQRTATTPQRQADTRTRSSTTSTKREQTPDEARADRRRISKSTRHTTETKATTTRRDANEHTTHTQRPAGEKNETRRRRETEKTEKQKNKRRQRRQREERDDRQN

SEQ ID NO: 926 - protein, 488 aa, Homo sapiens
AEAGPGARAAAAMAIKFLEVIKPFCVILPEIQKPERKIQFKEKVLWTAITLFIFLVCCQIPLFGIMSSDSADPFYWMRVILASNRGTLMELGISPIVTSGLIMQLLAGAKIIEVGDTPKDRALFNGAQKLFGMIITIGQSIVYVMTGMYGDPSEMGAGICLLITIQLFVAGLIVLLLDELLQKGYGLGSGISLFIATNICETIVWKAFSPTTVNTGRGMEFEGAIIALFHLLATRTDKVRALREAFYRQNLPNLMNLIATIFVFAVVIYFQGFRVDLPIKSARYRGQYNTYPIKLFYTSNIPIILQSALVSNLYVISQMLSARFSGNLLVSLLGTWSDTSSGGPARAYPVGGLCYYLSPPESFGSVLEDPVHAVVYIVFMLGSCAFFSKTWIEVSGSSAKDVAKQLKEQQMVMRGHRETSMVHELNRYIPTAAAFGGLCIGALSVLADFLGAIGSGTGILLAVTIIYQYFEIFVKEQSEVGSMGALLF

SEQ ID NO: 927 - protein, 635 aa, Homo sapiens
PARTMFYAHFVLSKRGPLAKIWLAAHWDKKLTKAHVFECNLESSVESIISPKVKMALRTSGHLLLGVVRIYHRKAKYLLADCNEAFIKIKMAFRPGVVDLPEENREAAYNAITLPEEFHDFDQPLPDLDDIDVAQQFSLNQSRVEEITMREEVGNISILQENDFGDFGMDDREIMREGSAFEDDDMLVSTTTSNLLLESEQSTSNLNEKINHLEYEDQYKDDNFGEGNDGGILDDKLISNNDGGIFDDPPALSEAGVMLPEQPAHDDMDEDDNVSMGGPDSPDSVDPVEPMPTMTDQTTLVPNEEEAFALEPIDITVKETKAKRKRKLIVDSVKELDSKTIRAQLSDYSDIVTTLDLAPPTKKLMMWKETGGVEKLFSLPAQPLWNNRLLKLFTRCLTPLVPEDLRKRRKGGEADNLDEFLKEFENPEVPREDQQQQHQQRDVIDEPIIEEPSRLQESVMEASRTNIDESAMPPPPPQGVKRKAGQIDPEPVMPPQQVEQMEIPPVELPPEEPPNICQLIPELELLPEKEKEKEKEKEDDEEEEDEDASGGDQDQEERRWNKRTQQMLHGLQRALAKTGAESISLLELCRNTNRKQAAAKFYSFLVLKKQQAIELTQEEPYSDIIATPGPRFHII

SEQ ID NO: 928 - protein, 202 aa, Homo sapiens
KEKARGRPKPLLLLPITSATTAMGLTISSLFSRLFGKKQMRILMVGLDAAGKTTILYKLKLGEIVTTIPTIGFNVETVEYKNICFTVWDVGGQDRIRPLWKHYFQNTQGLIFVVDSNDRERIQEVADELQKMLLVDELRDAVLLLFANKQDLPNAMAISEMTDKLGLQSLRNRTWYVQATCATQGTGLYEGLDWLSNELSKR

SEQ ID NO: 929 - protein, 142 aa, Homo sapiens
VPVMARPGDPCQFSVEARLGSWVPVWWKLGEPRTGLAPLPPLTLPLPLALDVFAAVFSLAQVWVGGAHRKLSLLLPRFESLQRAVGGGPGALGDQPLKGTFWSLQYLQGLETANVPLMGNPCVCVCVCVCVCVCVFSPRPVT

SEQ ID NO: 930 - protein, 261 aa, Homo sapiens
GIFRSLRVLFPLFSVGRPQFARSLSAAPQLSDTADTMGFGDLKSPAGLQVLNDYLADKSYIEGYVPSQADVAVFEAVSSPPPADLCHALRWYNHIKSYEKEKASLPGVKKALGKYGPADVEDTTGSGATDSKDDDDIDLFGSDDEEESEEAKRLREERLAQYESKKAKKPALVAKSSILLDVKPWDDETDMAKLEECVRSIQADGLVWGSSKLVPVGYGIKKLQIQCVVEDDKVGTDMLEEQITAFEDYVQSMDVAAFNKI

SEQ ID NO: 931 - protein, 405 aa, Homo sapiens
KLGRRGPGHSRPGGARARASRVSGWAARRPAQAGGRRGSPCRENSNSPMESADFYEAEPRPPMSSHLQSPPHAPSSAAFGFPRGAGPAQPPAPPAAPEPLGGICEHETSIDISAYIDPAAFNDEFLADLFQHSRQQEKAKAAWAHGGGGGGDFDYPGAPAGPGGAVMPGGAHGPPPGYGCAAAGYLDGRLEPLYERVGAPALRPLVIKQEPREEDEAKQLALAGLFPYQPPPPPPPSHPHPHPPPAHLAAPHLQFQIAHCGQTTMHLQPGHPTPPPTPVPSPHPAPAVGAAGLPALASALKGLGAAHPDLRASGGSGAGKAKKSVDKNSNEYRVRRERNNIAVRKSRDKAKQRNVETQQKVLELTSDNDRLRKRVEQLSRELDTLRGIFRQLPESSLVKAMGNCA

SEQ ID NO: 932 - protein, 110 aa, Homo sapiens
FFFPRPSFTLLPKVECSGVISAHCNCRLPGSSNSHASASQVPGTTGVSYHARLIFVFLVEMGFHYVGQAGLELLTSGDPPTLASRSAGITGMSHCARPWTWLSLSSPQTF

SEQ ID NO: 933 - protein, 484 aa, Homo sapiens
GGTLSRWSIMADMQNLVERLERAVGRLEAVSHTSDMHRGYADSPSKAGAAPYVQAFDSLLAGPVAEYLKISKEIGGDVQKHAEMVHTGLKLERALLVTASQCQQPAENKLSDLLAPISEQIKEVITFREKNRGSKLFNHLSAVSESIQALGWVAMAPKPGPYVKEMNDAAMFYTNRVLKEYKDVDKKHVDWVKAYLSIWTELQAYIKEFHTTGLAWSKTGPVAKELSGLPSGPSAGSGPPPPPPGPPPPPVSTSSGSDESASRSALFAQINQGESITHALKHVSDDMKTHKNPALKAQSGPVRSGPKPFSAPKPQTSPSPKRATKKEPAVLELEGKKWRVENQENVSNLVIEDTELKQVAYIYKCVNTTLQIKGKINSITVDNCKKLGLVFDDVVGIVEIINSKDVKVQVMGKVPTISINKTDGCHAYLSKNSLDCEIVSAKSSEMNVLIPTEGGDFNEFPVPEQFKTLWNGQKLVTTVTEIAG

SEQ ID NO: 934 - protein, 485 aa, Homo sapiens
PPQTQRSPRVAWTLILPVGTLRSACREDRLPDPQKSGERVKRSSPRRGSLPEQRRAEPGTMGPRRLLLVAACFSLCGPLLSARTRARRPESKATNATLDPRSFLLRNPNDKYEPFWEDEEKNESGLTEYRLVSINKSSPLQKQLPAFISEDASGYLTSSWLTLFVPSVYTGVFVVSLPLNIMAIVVFILKMKVKKPAVVYMLHLATADVLFVSVLPFKISYYFSGSDWQFGSELCRFVTAAFYCNMYASILLMTVISIDRFLAVVYPMQSLSWRTLGRASFTCLAIWALAIAGVVPLVLKEQTIQVPGLNITTCHDVLNETLLEGYYAYYFSAFSAVFFFVPLIISTVCYVSIIRCLSSSAVANRSKKSRALFLSAAVFCIFIICFGPTNVLLIAHYSFLSHTSTTEAAYFAYLLCVCVSSISSCIDPLIYYYASSECQRYVYSILCCKESSDPSSYNSSGQLMASKMDTCSSNLNNSIYKKLLT

SEQ ID NO: 935 - protein, 171 aa, Homo sapiens
SEWRERAEWLCGRVSETGSACSMADQLTEEQIAEFKEAFSLFDKDGDGTITTKELGTVMRSLGQNPTEAELQDMINEVDADGNGTIDFPEFLTMMARKMKDTDSEEEIREAFRVFDKDGNGYISAAELRHVMTNLGEKLTDEEVDEMIREADIDGDGQVNYEEFVQMMTAK

SEQ ID NO: 936 - protein, 415 aa, Homo sapiens
KMSEYIRVTEDENDEPIEIPSEDDGTVLLSTVTAQFPGACGLRYRNPVSQCMRGVRLVEGILHAPDAGWGNLVYVVNYPKDNKRKMDETDASSAVKVKRAVQKTSDLIVLGLPWKTTEQDLKEYFSTFGEVLMVQVKKDLKTGHSKGFGFVRFTEYETQVKVMSQRHMIDGRWCDCKLPNSKQSQDEPLRSRKVFVGRCTEDMTEDELREFFSQYGDVMDVFIPKPFRAFAFVTFADDQIAQSLCGEDLIIKGISVHISNAEPKHNSNRQLERSGRFGGNPGGFGNQGGFGNSRGGGAGLGNNQGSNMGGGMNFGAFSINPAMMAAAQAALQSSWGMMGMLASQQNQSGPSGNNQNQGNMQREPNQAFGSGNNSYSGSNSGAAIGWGSASNAGSGSGFNGGFGSSMDSKSSGWGM

SEQ ID NO: 937 - protein, 332 aa, Homo sapiens
AAVTEGNKMAAPKGSLWVRTQLGLPPLLLLTMALAGGSGTASAEAFDSVLGDTASCHRACQLTYPLHTYPKEEELYACQRGCRLFSICQFVDDGIDLNRTKLECESACTEAYSQSDEQYACHLGCQNQLPFAELRQEQLMSLMPKMHLLFPLTLVRSFWSDMMDSAQSFITSSWTFYLQADDGKIVIFQSKPEIQYAPHLEQEPTNLRESSLSKMSSDLQMRNSQAHRNFLEDGESDGFLRCLSLNSGWILTTTLVLSVMVLLWICCATVATAVEQYVPSEKLSIYGDLEFMNEQKLNRYPASSLVVVRSKTEDHEEAGPLPTKVNLAHSEI

SEQ ID NO: 938 - protein, 114 aa, Homo sapiens
  misc_feature (1)...(114): Xaa = any amino acid or nothing
VTESFHPLVFCLFVFEMESCSVTQAGVQWRDLGSLQPPPPGFNXLSLLSLPSSWGYRHPPSCPANFHIFVETGFHHVGQAGLELLTSGDPPTLVSRSAGITDVSHCARPCPLVL

SEQ ID NO: 939 - protein, 156 aa, Homo sapiens
RVLGLPAAAAAAAASGRGARSDVTAMAGIKALISLSFGGAIGLMFLMLGCALPIYNKYWPLFVLFFYILSPIPYCIARRLVDDTDAMSNACKELAIFLTTGIVVSAFGLPIVFARAHLIEWGACALVLTGNTVIFATILGFFLVFGSKDDFSWQQW

SEQ ID NO: 940 - protein, 286 aa, Homo sapiens
DGPARGHETSLGHRGVSGDGGSMGPPLTAHPLPSRPRPLLAVERTGQRPLWAPSLELPKPVMQPLPAGAFLEEVAEGTPAQTESEPKVLDPEEDLLCIAKTFSYLRESGWYWGSITASEARQHLQKMPEGTFLVRDSTHPSYLFTLSVKTTRGPTNVRIEYADSSFRLDSNCLSRPRILAFPDVVSLVQHYVASCTADTRSDSPDPAPTPALPMPKEDAPSDPALPAPPPATAVHLKLVQPFVRRSSARSLQHLCRLVINRLVADVDCLPLPRRMADYLRQYPFQL

SEQ ID NO: 941 - protein, 188 aa, Homo sapiens
DAAVAMTAQGGLVANRGRRFKWAIELSGPGGGSRGRSDRGSGQGDSLYPVGYLDKQVPDTSVQETDRILVEKRCWDIALGPLKQIPMNLFIMYMAGNTISIFPTMMVCMMAWRPIQALMAISATFKMLESSSQKFLQGLVYLIGNLMGLALAVYKCQSMGLLPTHASDWLAFIEPPERMEFSGGGLLL

SEQ ID NO: 942 - protein, 94 aa, Homo sapiens
FFFLRQCLTLSPRLECSGMIWAHCNLLLLDSSNSLASASQVAETTSTHHHTRLILYFSVETGFRHIGRVGLELLASSNPPTSASQSARITGISH

SEQ ID NO: 943 - protein, 231 aa, Homo sapiens
PRTLKSSLPPPMSAFSLALALVSSPQPPPPIGMANRGPAYGLSREVQQKIEKQYDADLEQILIQWITTQCRKDVGRPQPGRENFQNWLKDGTVLCELINALYPEGQAPVKKIQASTMAFKQMEQISQFLQAAERYGINTTDIFQTVDLWEGKNMACVQRTLMNLGGLAVARDDGLFSGDPNWFPKKSKENPRNFSDNQLQEGKNVIGLQMGTNRGASQAGMTGYGMPRQIL

SEQ ID NO: 944 - protein, 37 aa, Homo sapiens
MSPSSCPTAMSDCRASIWMTGRRTTCPARFASPEPMT

SEQ ID NO: 945 - protein, 74 aa, Homo sapiens
  misc_feature (1)...(74): Xaa = any amino acid or nothing
MLARELTAAVAPCRAASLARWTLGFCDERLVPFDHAESTYGLLRTHLLSRLPIPEKQSDHHLXPSCLLEERLRT

SEQ ID NO: 946 - protein, 412 aa, Homo sapiens
TARGGGSEPGPTMAANYSSTSTRREHVKVKTSSQPGFLERLSETSGGMFVGLMAFLLSFYLIFTNEGRALKTATSLAEGLSLVVSPDSIHSVAPENEGRLVHIIGALRTSKLLSDPNYGVHLPAVKLRRHVEMYQWVETEESREYTEDGQVKKETRYSYNTEWRSEIINSKNFDREIGHNNPSAMAVESFMATAPFVQIGRFFLSSGLIDKVDNFKSLSLSKLEDPHVDIIRRGDFFYHSENPKYPEVGDLRVSFSYAGLSGDDPDLGPAHVVTVIARQRGDQLVPFSTKSGDTLLLLHHGDFSAEEVFHRELRSNSMKTWGLRAAGWMAMFMGLNLMTRILYTLVDWFPVFRDLVNIGLKAFAFCVATSLTLLTVAAGWLFYRPLWALLIAGLALVPILVARTRVPAKKLE

SEQ ID NO: 947 - protein, 559 aa, Homo sapiens
MSATSVDTQRTKGQDNKVQNGSLHQKDTVHDNDFEPYLTGQSNQSNSYPSMSDPYLSSYYPPSIGFPYSLNEAPWSTAGDPPIPYLTTYGQLSNGDHHFMHDAVFGQPGGLGNNIYQHRFNFFPENPAFSAWGTSGSQGQQTQSSAYGSSYTYPPSSLGGTVVDGQPGFHSDTLSKAPGMNSLEQGMVGLKIGDVSSSAVKTVGSVVSSVALTGVLSGNGGTNVNMPVSKPTSWAAIASKPAKPQPKMKTKSGPVMGGGLPPPPIKHNMDIGTWDNKGPVPKAPVPQQAPSPQAAPQPQQVAQPLPAQPPALAQPQYQSPQQPPQTRWVAPRNRNAAFGQSGGAGSDSNSPGNVQPNSAPSVESHPVLEKLKAAHSYNPKEFEWNLKSGRVFIIKSYSEDDIHRSIKYSIWCSTEHGNKRLDSAFRCMSSKGPVYLLFSVNGSGHFCGVAEMKSPVDYGTSAGVWSQDKWKGKFDVQWIFVKDVPNNQLRHIRLENNDNKPVTNSRDTQEVPLEKAKQVLKIISSYKHTTSIFDDFAHYEKRQEEEEVVRKERQSRNKQ

SEQ ID NO: 948 - protein, 203 aa, Homo sapiens
REQILFIEIRDTAKGGETEQPPSLSPLHGGRMPEMGEGIQSLARETQSHRGRRQGWDATWVTRCRESLNRGGAGAGKRAGALAHHVFLALIEPNLAEREASEEEVKACSDETVVADLLVKVVYVLGAILKIFLREGNVLNQHSGMDIEKYSEHYQHDHSPGAEDDAAGGQLRPTAQERRHKEGSRGSPRCKRARKAVGGGGLI

SEQ ID NO: 949 - protein, 80 aa, Homo sapiens
GQGQNWNQGFNNYYDQGYGNYNSAYGGDQNYSGYGGYDYTGYNYGNYGYGQGYADYSGQQSTYGKASRGGGNHQNNYQPY

SEQ ID NO: 950 - protein, 199 aa, Homo sapiens
AATMADGQMPFSCHYPSRLRRDPFRDSPLSSRLLDDGFGMDPFPDDLTASWPDWALPRLSSAWPGTLRSGMVPRGPTATARFGVPAEGRTPPPFPGEPWKVCVNVHSFKPEELMVKTKDGYVEVSGKHEEKQQEGGIVSKNFTKKIQLPAEVDPVTVFASLSPEGLLIIEAPQVPPYSTFGESSFNNELPQDSQEVTCT

SEQ ID NO: 951 - protein, 919 aa, Homo sapiens
RGGGMVDYHAANQSYQYGPSSAGNGAGGGGSMGDYMAQEDDWDRDLLLDPAWEKQQRKTFTAWCNSHLRKAGTQIENIDEDFRDGLKLMLLLEVISGERLPKPERGKMRVHKINNVNKALDFIASKGVKLASIGAEEIVDGNAKMTLGMIWTIILRFAIQDISVEETSAKEGLLLWCQRKTAPYKNVNVQNFHISWKDGLAFNALIHRHRPELIEYDKLRKDDPVTNLNNAFEVAEKYLDIPKMLDAEDIVNTARPDEKAIMTYVSSFYHAFSGAQKAETETAANRICKVLAVNQENEHLMEDYEKLASDLLEWIRRTIPWLEDRVPQKTIQEMQQKLEDFRDYRRVHKPPKVQEKCQLEINFNTLQTKLRLSNRPAFMPSEGKMVSDINNGWQHLEQAEKGYEEWLLNEIRRLERLDHLAEKFRQKASIHEAWTDGKEAMLKHRDYETATLSDIKALIRKHEAFESDLAAHQDRVEQIAAIAQELNELDYYDSHNVNTRCQKICDQWDALGSLTHSRREALEKTEKQLEAIIDQLHLEYAKRAAPFNNWMESAMEDLQDMFIVHTIEEIEGLISAHDQFKSTLPDADREREAILAIHKEAQRIAESNHIKLSGSNPYTTVTPQIINSKWEKVQQLVPKRDHALLEEQSKQQQSNEHLRRQFASQANVVGPWIQTKMEEIGRISIEMNGTLEDQLSHLKQYERSIVDYKPNLDLLEQQHQLIQEALIFDNKHTNYTMEHIRVGWEQLLTTIARTINEVENQILTRDAKGISQEQMQEFRASFNHFDKDHGGALGPEEFKACLISLGYDVENDRQGEAEFNRIMSLVDPNHSGLVTFQAFIDFMSRETTDTDTADQVIASFKVLAGDKNFITAEELRRELPPDQAEYCIARMAPYQGPDAVPGALDYKSFSTALYGESDL

SEQ ID NO: 952 - protein, 410 aa, Homo sapiens
ARGSTPRHLLCGSCASQAQCRSARRSGCSCPARRRPARAVGCGLRPRCWPALHGCGLCGARCSATLRRAAWDNAAMVRRDRLRRMREWWVQVGLLAVPLLAAYLHIPPPQLSPALHSWKSSGKFFTYKGLRIFYQDSVGVVGSPEIVVLLHGFPTSSYDWYKIWEGLTLRFHRVIALDFLGFGFSDKPRPHHYSIFEQASIVEALLRHLGLQNRRINLLSHDYGDIVAQELLYRYKQNRSGRLTIKSLCLSNGGIFPETHRPLLLQKLLKDGGVLSPILTRLMNFFVFSRGLTPVFGPYTRPSESELWDMWAGIRNNDGNLVIDSLLQYINQRKKFRRRWVGALASVTIPIHFIYGPLDPVNPYPEFLELYRKTLPRSTVSILDDHISHYPQLEDPMGFLNAYMGFINSF

SEQ ID NO: 953 - protein, 343 aa, Homo sapiens
NGAWVPCLHPPRGKETPCCNKVSSAPPPSPSPLEPGSPPLRSSRGSLPPTPPLPPAPRFRPQPGGRPGARARVRPERSAPGPMDSSAVITQISKEEARGPLRGKGDQKSAASQKPRSRGILHSLFCCVCRDDGEALPAHSGAPLLVEENGAIPKQTPVQYLLPEAKAQDSDKICVVIDLDETLVHSSFKPVNNADFIIPVEIDGVVHQVYVLKRPHVDEFLQRMGELFECVLFTASLAKYADPVADLLDKWGAFRARLFRESCVFHRGNYVKDLSRLGRDLRRVLILDNSPASYVFHPDNAVPVASWFDNMSDTELHDLLPFFEQLSRVDDVYSVLRQPRPGS

SEQ ID NO: 954 - protein, 127 aa, Homo sapiens
LFSRISASTAAMSLLLLVVSALQILILILLFVATLDKSWWTLPGKESLNLWHDCTWNNDTKTWPCSNASENGCLKATQGLMVLSLILCCQSFILFMFQLYTMRRGGLFYATGLCQLCTSGAVFTGAL

SEQ ID NO: 955 - protein, 1187 aa, Homo sapiens
  misc_feature (1)...(1187): Xaa = any amino acid or nothing
AGRPRRSCWPGRAAMAASWSETARAWRGPSRSASCIRSMCTRIAFCLMEKISWLCRPRRVCLCAASRPWVSSSACTPSPTRALCAPCFFLXRVSESRTHRMTGMPQMGRMRSPRCPRALAPPAFLPPTGPSSPLPAPETPTAPAAESAPNGLSTVSHDYLKGSYGLDLEAVRGGASHLPHLTRTLATSCRRLHSEVDKVLSGLEILSKVFDQQSSPMVTRLLQQQNLPQTGEQELESLVLKLSVLKDFLSGIQKKALKALQDMSSTAPPAPQPSTRKAKTIPVQAFEVKLDVTLGDLTKIGKSQKFTLSVDVEGGRLVLLRRQRDSQEDWTTFTHDRIRQLIKSQRVQNKLGVVFEKEKDRTQRKDFIFVSARKREAFCQLLQLMKNKHSKQDEPDMISVFIGTWNMGSVPPPKNVTSWFTSKGLGKTLDEVTVTIPHDIYVFGTQENSVGDREWLDLLRGGLKELTDLDYRPIAMQSLWNIKVAVLVKPEHENRISHVSTSSVKTGIANTLGNKGAVGVSFMFNGTSFGFVNCHLTSGNEKTARRNQNYLDILRLLSLGDRQLNAFDISLRFTHLFWFGDLNYRLDMDIQEILNYISRKEFEPLLRVDQLNLEREKHKVFLRFSEEEISFPPTYRYERGSRDTYAWHKQKPTGVRTNVPSWCDRILWKSYPETHIICNSYGCTDDIVTSDHSPVFGTFEVGVTSQFISKKGLSKTSDQAYIEFESIEAIVKTASRTKFFIEFYSTCLEEYKKSFENDAQSSDNINFLKVQWSSRQLPTLKPILADIEYLQDQHLLLTVKSMDGYESYGECVVALKSMIGSTAQQFLTFLSHRGEETGNIRGSMKVRVPTERLGTRERLYEWISIDKDEAGAKSKAPSVSRGSQEPRSGSRKPAFTEASCPLSRLFEEPEKPPPTGRPPAPPRAAPREEPLTPRLKPEGAPEPEGVAAPPPKNSFNNPAYYVLEGVPHQLLPPEPPSPARAPVPSATKNKVAITVPAPQLGHHRHPRVGEGSSSDEESGGTLPPPDFPPPPLPDSAIFLPPSLDPLPGPVVRGRGGAEARGPPPPKAHPRPPLPPGPSPASTFLGEVGSGDDRSCSVLQMAKTLSEVDYAPAGPARSALLPGPLELQPPPGTALGLWPAPQLPSTPHPGEHPGRPGRGGSVPAGRAGQRAGRGRHECLAAGHRLGAL

SEQ ID NO: 956 - protein, 274 aa, Homo sapiens
RVVPPGLLAGEGVCQLLRHSSPGRCLLKSRARGSVIMSRYGRYGGETKVYVGNLGTGAGKGELERAFSYYGPLRTVWIARNPPGFAFVEFEDPRDAEDAVRGLDGKVICGSRVRVELSTGMPRRSRFDRPPARRPFDPNDRCYECGEKGHYAYDCHRYSRRRRSRSRSRSHSRSRGRRYSRSRSRSRGRRSRSASPRRSRSISLRRSRSASLRRSRSGSIKGSRYFQSPSRSRSRSRSISRPRSSRSKSRSPSPKRSRSPSGSPRRSASPERMD

SEQ ID NO: 957 - protein, 336 aa, Homo sapiens
RGFGPAERPPLRLSSAWRGRERPMGAEASSSWCPGTALPEERLSVKRASEISGFLGQGSSGEAALDVLTHVLEGAGNKLTSSCGKPSSNRMSLQWTAVATFLYAEVFVVLLLCIPFISPKRWQKIFKSRLVELLVSYGNTFFVVLIVILVLLVIDAVREIRKYDDVTEKVNLQNNPGAMEHFHMKLFRAQRNLYIAGFSLLLSFLLRRLVTLISQQATLLASNEAFKKQAESASEAAKKYMEENDQLKKGAAVDGGKLDVGNAEVKLEEENRSLKADLQKLKDELASTKQKLEKAENQVLAMRKQSEGLTKEYDRLLEEHAKLQAAVDGPMDKKEE

SEQ ID NO: 958 - protein, 601 aa, Homo sapiens
RWDEDMNRTWPRRIWGSSQDEAELIREDIQGALHNYRSGRGERRAAALRATQEELQRDRSPAAETPPLQRRPSVRAVISTVERGAGRGRPQAKPIPEAEEAQRPEPVGTSSNADSASPDLGPRGPDLAVLQAEREVDILNHVFDDVESFVSRLQKSAEAARVLEHRERGRRSRRRAAGEGLLTLRAKPPSEAEYTDVLQKIKYAFSLLARLRGNIADPSSPELLHFLFGPLQMIVNTSGGPEFASSVRRPHLTSDAVALLRDNVTPRENELWTSLGDSWTRPGLELSPEEGPPYRPEFFSGWEPPVTDPQSRAWEDPVEKQLQHERRRRQQSAPQVAVNGHRDLEPESEPQLESETAGKWVLCNYDFQARNSSELSVKQRDVLEVLDDSRKWWKVRDPAGQEGYVPYNILTPYPGPRLHHSQSPARSLNSTPPPPPAPAPAPPPALARPRWDRPRWDSCDSLNGLDPSEKEKFSQMLIVNEELQARLAQGRSGPSRAVPGPRAPEPQLSPGSDASEVRAWLQAKGFSSGTVDALGVLTGAQLFSLQKEELRAVSPEEGARVYSQVTVQRSLLEDKEKVSELEAVMEKQKKKVEGEVEMEVI

SEQ ID NO: 959 - protein, 445 aa, Homo sapiens
GGRKSRAFKKAITTTFAARMPLLWLRGFLLASCWIIVRSSPTPGSEGHSAAPDCPSCALAALPKDVPNSQPEMVEAVKKHILNMLHLKKRPDVTQPVPKAALLNAIRKLHVGKVGENGYVEIEDDIGRRAEMNELMEQTSEIITFAESGTARKTLHFEISKEGSDLSVVERAEVWLFLKVPKANRTRTKVTIRLFQQQKHPQGSLDTGEEAEEVGLKGERSELLLSEKVVDARKSTWHVFPVSSSIQRLLDQGKSSLDVRIACEQCQESGASLVLLGKKKKKEEEGEGKKKGGGEGGAGADEEKEQSHRPFLMLQARQSEDHPHRRRRRGLECDGKVNICCKKQFFVSFKDIGWNDWIIAPSGYHANYCEGECPSHIAGTSGSSLSFHSTVINHYRMRGHSPFANLKSCCVPTKLRPMSMLYYDDGQNIIKKDIQNMIVEECGCS

SEQ ID NO: 960 - protein, 877 aa, Homo sapiens
NVPEPDGHIISPLLAGFYMFWTMIILLQVLIPISLYVSIEIVKLGQIYFIQSDVDFYNEKMDSIVQCRALNIAEDLGQIQYLFSDKTGTLTENKMVFRRCSVAGFDYCHEENARRLESYQEAVSEDEDFIDTVSGSLSNMAKPRAPSCRTVHNGPLGNKPSNHLAGSSFTLGSGEGASEVPHSRQAAFSSPIETDVVPDPEQVMVDFAALGPLTFQLLHILPFDSVRKRMSVVVRHPLSNQVVVYTKGADSVIMELLSVASPDGASLEKQQMIVREKTQKHLDDYAKQGLRTLCIAKKVMSDTEYAEWLRNHFLAETSIDNREELLLESAMRLENKLTLLGATGIEDRLQEGVPESIEALHKAGIKIWMLTGDKQETAVNIAYACKLLEPDDKLFILNTQSKDACGMLMSTILKELQKKTQALPEQVSLSEDLLQPPVPRDSGLRAGLIITGKTLEFALQESLQKQFLELTSWCQAVVCCRATPLQKSEVVKLVRSHLQVMTLAIGDGANDVSMIQVADIGIGVSGQEGMQAVMASDFAVSQFKHLSKLLLVHGHWCYTRLSNMILYFFYKNVAYVNLLFWYQFFCGFSGTSMTDYWVLIFFNLLFTSAPPVIYGVLEKDVSAETLMQLPELYRSGQKSEAYLPHTFWITLLDAFYQSLVCFFVPYFTYQGSDTDIFAFGNPLNTAALFIVLLHLVIESKSLTWIHLLVIIGSILSYFLFAIVFGAMCVTCNPPSNPYWIMQEHMLDPVFYLVCILTTSIALLPRFVYRVLQGSLFPSPILRAKHFDRLTPEERTKALKKWRGAGKMNQVTSKYANQSAGKSGRRPMPGPSAVFAMKSASSCAIEQGNLSLCETALDQGYSETKAFEMAGPSKGKES

SEQ ID NO: 961 - protein, 637 aa, Homo sapiens
EMNPSAPSYPMASLYVGDLHPDVTEAMLYEKFSPAGPILSIRVCRDMITRRSLGYAYVNFQQPADAERALDTMNFDVIKGKPVRIMWSQRDPSLRKSGVGNIFIKNLDKSIDNKALYDTFSAFGNILSCKVVCDENGSKGYGFVHFETQEAAERAIEKMNGMLLNDRKVFVGRFKSRKEREAELGARAKEFTNVYIKNFGEDMDDERLKDLFGKFGPALSVKVMTDESGKSKGFGFVSFERHEDAQKAVDEMNGKELNGKQIYVGRAQKKVERQTELKRKFEQMKQDRITRYQGVNLYVKNLDDGIDDERLRKEFSPFGTITSAKVMMEGGRSKGFGFVCFSSPEEATKAVTEMNGRIVATKPLYVALAQRKEERQAHLTNQYMQRMASVRAVPNPVINPYQPAPPSGYFMAAIPQTQNRAAYYPPSQIAQLRPSPRWTAQGARPHPFQNMPGAIRPAAPRPPFSTMRPASSQVPRVMSTQRVANTSTQTMGPRPAAAAAAATPAVRTVPQYKYAAGVRNPQQHLNAQPQVTMQQPAVHVQGQEPLTASMLASAPPQEQKQMLGERLFPLIQAMHPTLAGKITGMLLEIDNSELLHMLESPESLRSKVDEAVAVLQAHQAKEAAQKAVNSATGVPTV

SEQ ID NO: 962 - protein, 791 aa, Homo sapiens
FVFWKILKTKKHKHSGPSAMLSLKKYLTEGLLQFTILLSLIGVRVDVDTYLTSQLPPLREIILGPSSAYTQTQFHNLRNTLDGYGIHPKSIDLDNYFTARRLLSQVRALDRFQVPTTEVNAWLVHRDPEGSVSGSQPNSGLALESSSGLQDVTGPDNGVRESETEQGFGEDLEDLGAVAPPVSGDLTKEDIDLIDILWRQDIDLGAGREVFDYSHRQKEQDVEKELRDGGEQDTWAGEGAEALARNLLVDGETGESFPAQVPSGEDQTALSLEECLRLLEATCPFGENAEFPADISSITEAVPSESEPPALQNNLLSPLLTGTESPFDLEQQWQDLMSIMEMQAMEVNTSASEILYSAPPGDPLSTNYSLAPNTPINQNVSLHQASLGGCSQDFLLFSPEVESLPVASSSTLLPLAPSNSTSLNSTFGSTNLTGLFFPPQLNGTANDTAGPELPDPLGGLLDEAMLDEISLMDLAIEEGFNPVQASQLEEEFDSDSGLSLDSSHSPSSLSSSEGSSSSSSSSSSSSSSASSSASSSFSEEGAVGYSSDSETLDLEEAEGAVGYQPEYSKFCRMSYQDPAQLSCLPYLEHVGHNHTYNMAPSALDSADLPPPSALKKGSKEKQADFLDKQMSRDEHRARAMKIPFTNDKIINLPVEEFNELLSKYQLSEAQLSLIRDIRRRGKNKMAAQNCRKRKLDTILNLERDVEDLQRDKARLLREKVEFLRSLRQMKQKVQSLYQEVFGRLRDENGRPYSPSQYALQYAGDGSVLLIPRTMADQQARRQERKPKDRRK

SEQ ID NO: 963 - protein, 703 aa, Homo sapiens
SVCWEDRYLKARMEESPLSRAPSRGGVNFLNVARTYIPNTKVECHYTLPPGTMPSASDWIGIFKVEAACVRDYHTFVWSSVPESTTDGSPIHTSVQFQASYLPKPGAQLYQFRYVNRQGQVCGQSPPFQFREPRPMDELVTLEEADGGSDILLVVPKATVLQNQLDESQQERNDLMQLKLQLEGQVTELRSRVQELERALATARQEHTELMEQYKGISRSHGEITEERDILSRQQGDHVARILELEDDIQTISEKVLTKEVELDRLRDTVKALTREQEKLLGQLKEVQADKEQSEAELQVAQQENHHLNLDLKEAKSWQEEQSAQAQRLKDKVAQMKDTLGQAQQRVAELEPLKEQLRGAQELAASSQQKATLLGEELASAAAARDRTIAELHRSRLEVAEVNGRLAELGLHLKEEKCQWSKERAGLLQSVEAEKDKILKLSAEILRLEKAVQEERTQNQVFKTELAREKDSSLVQLSESKRELTELRSALRVLQKEKEQLQEEKQELLEYMRKLEARLEKVADEKWNEDATTEDEEAAVGLSCPAALTDSEDESPEDMRLPPYGLCERGDPGSSPAGPREASPLVVISQPAPISPHLSGPAEDSSSDSEAEDEKSVLMAAVQSGGEEANLLLPELGSAFYDMASGFTVGTLSETSTGGPATPTWKECPICKERFPAESDKDALEDHMDGHFFFSTQDPFTFE

SEQ ID NO: 964 - protein, 1166 aa, Homo sapiens
YLDMMSFVQKGSWLLLALLHPTIILAQQEAVEGGCSHLGQSYADRDVWKPEPCQICVCDSGSVLCDDIICDDQELDCPNPEIPFGECCAVCPQPPTAPTRPPNGQGPQGPKGDPGPPGIPGRNGDPGIPGQPGSPGSPGPPGICESCPTGPQNYSPQYDSYDVKSGVAVGGLAGYPGPAGPPGPPGPPGTSGHPGSPGSPGYQGPPGEPGQAGPSGPPGPPGAIGPSGPAGKDGESGRPGRPGERGLPGPPGIKGPAGIPGFPGMKGHRGFDGRNGEKGETGAPGLKGENGLPGENGAPGPMGPRGAPGERGRPGLPGAAGARGNDGARGSDGQPGPPGPPGTAGFPGSPGAKGEVGPAGSPGSNGAPGQRGEPGPQGHAGAQGPPGPPGINGSPGGKGEMGPAGIPGAPGLMGARGPPGPAGANGAPGLRGGAGEPGKNGAKGEPGPRGERGEAGIPGVPGAKGEDGKDGSPGEPGANGLPGAAGERGAPGFRGPAGPNGIPGEKGPAGERGAPGPAGPRGAAGEPGRDGVPGGPGMRGMPGSPGGPGSDGKPGPPGSQGESGRPGPPGPSGPRGQPGVMGFPGPKGNDGAPGKNGERGGPGGPGPQGPPGKNGETGPQGPPGPTGPGGDKGDTGPPGPQGLQGLPGTGGPPGENGKPGEPGPKGDAGAPGAPGGKGDAGAPGERGPPGLAGAPGLRGGAGPPGPEGGKGAAGPPGPPGAAGTPGLQGMPGERGGLGSPGPKGDKGEPGGPGADGVPGKDGPRGPTGPIGPPGPAGQPGDKGEGGAPGLPGIAGPRGSPGERGETGPPGPAGFPGAPGQNGEPGGKGERGAPGEKGEGGPPGVAGPPGKDGTSGHPGPIGPPGPRGNRGERGSEGSPGHPGQPGPPGPPGAPGPCCGGVGAAAIAGIGGEKAGGFAPYYGDEPMDFKINTDEIMTSLKSVNGQIESLISPDGSRKNPARNCRDLKFCHPELKSGEYWVDPNQGCKLDAIKVFCNMETGETCISANPLNVPRKHWWTDSSAEKKHVWFGESMDGGFQFSYGNPELPEDVLDVQLAFLRLLSSRASQNITYHCKNSIAYMDQASGNVKKALKLMGSNEGEFKAEGNSKFTYTVLEDGCTKHTGEWSKTVFEYRTRKAVRLPIVDIAPYDIGGPDQEFGVDVGPVCFL

SEQ ID NO: 965 - protein, 674 aa, Homo sapiens
QRKTPSSRYSSGMSHVAVENALGLDQQFAGLDLNSSDNQSGGSTASKGRYIPPHLRNREATRGFYDKDSSGWSSSKDKDAYSSFGSRSDSRGKSSFFSDRGSGSRGRFDDRGRSDYDGIGSRGDRSGFGKFERGGNSRWCDKSDEDDWSKPLPPSERLEQELFSGGNTGINFEKYDDIPVEATGNNCPPHIESFSDVEMGEIIMGNIELTRYTRPTPVQKHAIPIIKEKRDLMACAQTGSGKTAAFLLPILSQIYSDGPGEALRAMKENGRYGRRKQYPISLVLAPTRELAVQIYEEARKFSYRSRVRPCVVYGGADIGQQIRDLERGCHLLVATPGRLVDMMERGKIGLDFCKYLVLDEADRMLDMGFEPQIRRIVEQDTMPPKGVRHTMMFSATFPKEIQMLARDFLDEYIFLAVGRVGSTSENITQKVVWVEESDKRSFLLDLLNATGKDSLTLVFVETKKGADSLEDFLYHEGYACTSIHGDRSQRDREEALHQFRSGKSPILVATAVAARGLDISNVKHVINFDLPSDIEEYVHRIGRTGRVGNLGLATSFFNERNINITKDLLDLLVEAKQEVPSWLENMAYEHHYKGSSRGRSKSSRFSGGFGARDYRQSSGASSSSFSSSRASSSRSGGGGHGSSRGFGGGGYGGFYNSDGYGGNYNSQGVDWWGN

SEQ ID NO: 966 - protein, 292 aa, Homo sapiens
AGTSLVRRLAAAAAAAAGARAPAAEGGRAGAGEGGGPVRDDSPDGVSPPSGAGFGLGGAGYSPSMTMGDKKSPTRPKRQAKPAADEGFWDCSVCTFRNSAEAFKCSICDVRKGTSTRKPRINSQLVAQQVAQQYATPPPPKKEKKEKVEKQDKEKPEKDKEISPSVTKKNTNKKTKPKSDILKDPPSEANSIQSANATTKTSETNHTSRPRLKNVDRSTAQQLAVTVGNVTVIITDFKEKTRSSSTSSSTVTSSAGSEQQNQSSSGSESTDKGSSRSSTPKGDMSAVNDESF

SEQ ID NO: 967 - protein, 133 aa, Homo sapiens
PCRNSRVDDFVLTHNLLSSHVRGVGSRGFPLRLQATEVRICPVEFNPNFVARMIPKVEWSAFLEAADNLRLIQVPKGPVEGYEENEEFLRTMHHLLLEVEVIEGTLQCPESGRMFPISRGIPNMLLSEEETES

SEQ ID NO: 968 - protein, 205 aa, Homo sapiens
QTTMCYGKCARCIGHSLVGLALLCIAANILLYFPNGETKYASENHLSRFVWFFSGIVGGGLLMLLPAFVFIGLEQDDCCGCCGHENCGKRCAMLSSVLAALIGIAGSGYCVIVAALGLAEGPLCLDSLGQWNYTFASTEGQYLLDTSTWSECTEPKHIVEWNVSLFSILLALGGIEFILCLIQVINGVLGGICGFCCSHQQQYDC

SEQ ID NO: 969 - protein, 351 aa, Homo sapiens
TWCTTTMLAARLVCLRTLPSRVFHPAFTKASPVVKNSITKNQWLLTPSREYATKTRIGIRRGRTGQELKEAALEPSMEKIFKIDQMGRWFVAGGAAVGLGALCYYGLGLSNEIGAIEKAVIWPQYVKDRIHSTYMYLAGSIGLTALSAIAISRTPVLMNFMMRGSWVTIGVTFAAMVGAGMLVRSIPYDQSPGPKHLAWLLHSGVMGAVVAPLTILGGPLLIRAAWYTAGIVGGLSTVAMCAPSEKFLNMGAPLGVGLGLVFVSSLGSMFLPPTTVAGATLYSVAMYGGLVLFSMFLLYDTQKVIKRAEVSPMYGVQKYDPINSMLSIYMDTLNIFMRVATMLATGGNRKK

SEQ ID NO: 970 - protein, 232 aa, Homo sapiens
  misc_feature (1)...(232): Xaa = any amino acid or nothing
VCPHPAMARLLQASCLLSLLLAGFVSQSRGQEKSKMDCHGGISGTIYEYGALTIDGEEYIPFKQYAGKYVLFVNVASYXGLTGQYIELNALQEELAPFGLVILGFPCNQFGKQEPGENSEILPTLKYVRPGGGFVPNFQLFEKGDVNGEKEQKFYTFLKNSCPPTSELLGTSDRLFWEPMKVHDIRWNFEKFLVGPDGIPIMRWHHRTTVSNVKMDILSYMRRQAALGVKRK

SEQ ID NO: 971 - protein, 275 aa, Homo sapiens
PHFPIPFPPRKVQHLARPSPKTARPPWTIRRILPPPPKKSHPPALPRRTFGPRDSARAALAEECPAGGPTPAVRFATRSREVGGSVAGFQTPMGIPMGKSMLVLLTFLAFASCCIAAYRPSETLCGGELVDTLQFVCGDRGFYFRLPGRPASRVSRRSRGIVEECCFRSCDLALLETYCATPAKSERDVSTPPTVLPDNFPRYPVGKFFQYDTWKQSTQRLRRGLPALLRARRGHVLAKELEAFREAKRHRPLIALPTQDPAHGGAPPEMASNRK

SEQ ID NO: 972 - protein, 482 aa, Homo sapiens
RVPSQALRDRRGLGDQQATPRAREELLLSALPHPAPRQARWPPAASSGGGGGGGGGWHHGPGRCPPCPGDEDTAAMDSPCQPQPLSQALPQLPGSSSEPLEPEPGRARMGVESYLPCPLLPSYHCPGVPSEASAGSGTPRATATSTTASPLRDGFGGQDGGELRPLQSEGAAALVTKGCQRLAAQGARPEAPKRKWAEDGGDAPSPSKRPWARQENQEAEREGGMSCSCSSGSGEASAGLMEEALPSAPERLALDYIVPCMRYYGICVKDSFLGAALGGRVLAEVEALKRGGRLRDGQLVSQRAIPPRSIRGDQIAWVEGHEPGCRSIGALMAHVDAVIRHCAGRLGSYVINGRTKAMVACYPGNGLGYVRHVDNPHGDGRCITCIYYLNQNWDVKVHGGLLQIFPEGRPVVANIEPLFDRLLIFWSDRRNPHEVKPAYATRYAITVWYFDAKERAAAKDKYQLASGQKGVQVPVSQPPTPT

SEQ ID NO: 973 - protein, 255 aa, Homo sapiens
LPWSGFCPHTFLATFLVSENLQLHLLFWTRGPGGASSWDQTSMDPLQKRNPASPSKSSPMTAAETSQEGPAPSQPSYSEQPMMGLSNLSPGPGPSQAVPLPEGLLRQRYREEKTLEERRWERLEFLQRKKAFLRHVRRRHRDHMAPYAVGREARISPLGDRSQNRFRCECRYCQSHRPNLSGIPGESNRAPHPSSWETLVQGLSGLTLSLGTNQPGPLPEAALQPQETEEKRQRERQKGSKIMFQRLLKQWLEEN

SEQ ID NO: 974 - protein, 354 aa, Homo sapiens
GYLELQCCVLLASTLGMPLTPTVQGFQWTLRGPDVETSPFGAPRAASHGVGRHQELRDPTVPGPTSSATNVSMVVSAGPWSGEKAEMNILEINKKSRPQLAENKQQFRNLKQKCLVTQVAYFLANRQNNCDYEDCKDLIKSMLRDERLLTEEKLAEELGQAEELRQYKVLVHSQERELTQLREKLQEGRDASRSLNQHLQALLTPDEPDNSQGRDLREQLAEGCRLAQHLVQKLSPENDDDEDEDVKVEEAEKVQELYAPREVQKAEERKSLRTHWRSMPSLVQIATTLVSPTSLTGTPESHLRKTKSTQLSLTHPLMMNGWMLYALSQKMKVIMSKRKKKGQCLPDHLEGFVV

SEQ ID NO: 975 - protein, 989 aa, Homo sapiens
SFGRLNALNMKSLKAKFRKSDTNEWNKNDDRLLQAVENGDAEKVASLLGKKGASATKHDSEGKTAFHLAAAKGHVECLRVMITHGVDVTAQDTTGHSALHLAAKNSHHECIRKLLQSKCPAESVDSSGKTALHYAAAQGCLQAVQILCEHKSPINLKDLDGNIPLLLAVQNGHSEICHFLLDHGADVNSRNKSGRTALMLACEIGSSNAVEALIKKGADLNLVDSLGYNALHYSKLSENAGIQSLLLSKISQDADLKTPTKPKQHDQVSKISSERSGTPKKRKAPPPPISPTQLSDVSSPRSITSTPLSGKESVFFAEPPFKAEISSIRENKDRLSDSTTGADSLLDISSEADQQDLLSLLQAKVASLTLHNKELQDKLQAKSPKEAEADLSFDSYHSTQTDLGPSLGKPGETSPPDSKSSPSVLIHSLGKSTTDNDVRIQQLQEILQDLQKRLESSEAERKQLQVELQSRRAELVCLNNTEISENSSDLSQKLKETQSKYEEAMKEVLSVQKQMKLGLVSPESMDNYSHFHELRVTEEEINVLKQDLQNALEESERNKEKVRELEEKLVEREKGTVIKPPVEEYEEMKSSYCSVIENMNKEKAFLFEKYQEAQEEIMKLKDTLKSQMTQEASDEAEDMKEAMNRMIDELNKQVSELSQLYKEAQAELEDYRKRKSLEDVTAEYIHKAEHEKLMQLTNVSRAKAEDALSEMKSQYSKVLNELTQLKQLVDAQKENSVSITEHLQVITTLRTAAKEMEEKISNLKEHLASKEVEVAKLEKQLLEEKAAMTDAMVPRSSYEKLQSSLESEVSVLASKLKESVKEKEKVHSEVVQIRSEVSQVKREKENIQTLLKSKEQEVNELLQKFQQAQEELAEMKRYAESSSKLEEDKDKKINEMSKEVTKLKEALNSLSQLSYSTSSSKRQSQQLEALQQQVKQLQNQLAECKKQHQEVISVYRMHLLYAVQGQMDEDVQKVLKQILTMCKNQSQKK

SEQ ID NO: 976 - protein, 98 aa, Homo sapiens
  misc_feature (1)...(98): Xaa = any amino acid or nothing
EHLNVFIFEKWGQSLTMSPRLECNGMISAHCNLRLLGSSDSPASASXVAGIIGTHHHAQLIFCIFSRDRVSPCWPGWSXTPDLVIHPPRPPRVLGLQA

SEQ ID NO: 977 - protein, 297 aa, Homo sapiens
SRGQLDSGQSSEQHGGNRQPEQSRSRSSSSSSSPRRSRSAAEPAMALSMPLNGLKEEDKEPLIELFVKAGSDGESIGNCPFSQRLFMILWLKGVVFSVTTVDLKRKPADLQNLAPGTHPPFITFNSEVKTDVNKIEEFLEEVLCPPKYLKLSPKHPESNTAGMDIFAKFSAYIKNSRPEANEALERGLLKTLQKLDEYLNSPLPDEIDENSMEDIKFSTRKFLDGNEMTLADCNLLPKLHIVKVVAKKYRNFDIPKEMTGIWRYLTNAYSRDEFTNTCPSDKEVEIAYSDVAKRLTK

SEQ ID NO: 978 - protein, 180 aa, Homo sapiens
WHPALGPDAAHRPPPVLGKMSVPGPYQAATGPSSAPSAPPSYEETVAVNSYYPTPPAPMPGPTTGLVTGPDGKGMNPPSYYTQPAPIPNNNPITVQTVYVQHPITFLDRPIQMCCPSCNKMIVSQLSYNAGALTWLSCGSLCLLGCIAGCCFIPFCVDALQDVDHYCPNCRALLGTYKRL

SEQ ID NO: 979 - protein, 373 aa, Homo sapiens
QALRGPPVCRSRKVAEQDPKVARGSRDDSSPQESCCLLRNMVSKSRWKLLAMLALVLVVMVWYSISREDRYIELFYFPIPEKKEPCLQGEAESKASKLFGNYSRDQPIFLRLEDYFWVKTPSAYELPYGTKGSEDLLLRVLAITSSSIPKNIQSLRCRRCVVVGNGHRLRNSSLGDAINKYDVVIRLNNAPVAGYEGDVGSKTTMRLFYPESAHFDPKVENNPDTLLVLVAFKAMDFHWIETILSDKKRVRKGFWKQPPLIWDVNPKQIRILNPFFMEIAADKLLSLPMQQPRKIKQKPTTGLLAITLALHLCDLVHIAGFGYPDAYNKKQTIHYYEQITLKSMAGSGHNVSQEALAIKRMLEMGAIKNLTSF

SEQ ID NO: 980 - protein, 254 aa, Homo sapiens
  misc_feature (1)...(254): Xaa = any amino acid or nothing
YRLTAPAPTYSAREIIIYCLDLLIWGSPARLIGRKVQHDTRGVCAPPSAILVSSRQWANSPKVLGWPLTGNPRDXFGAFLLGENQPGMIQDCGPTWVVPGQSERRHVFGQSDELIGQKVAHALAEGLGVIACIGEKLDEREAGITEKVVFEQTKVIADNVKDWSKVVLAYEPVWAIGTGKTATPQQAQEVHEKLRGWLKSNVSDAVAQSTRIIYGGSVTGATCKELASQPDVDGFLVGGASLKPEFVDIINAKQ

SEQ ID NO: 981 - protein, 323 aa, Homo sapiens
HSRGFPGGRWLDSFLPAHWQGSAPPGCTRARAGGHKSRGRAETRSSPTARPSSGCTMHVNGKVALVTGAAQGIGRAFAEALLLKGAKVALVDWNLEAGVQCKAALDEQFEPQKTLFIQCDVADQQQLRDTFRKVVDHFGRLDILVNNAGVNNEKNWEKTLQINLVSVISGTYLGLDYMSKQNGGEGGIIINMSSLAGLMPVAQQPVYCASKHGIVGFTRSAALAANLMNSGVRLNAICPGFVNTAILESIEKEENMGQYIRISRDHIKDMIKYYGILDPPLIANGLITLIEDDALNGAIMKITTSKGIHFQDYDTTPFQAKTQ

SEQ ID NO: 982 - protein, 196 aa, Homo sapiens
SRLGTVREFRGYRRPTRPPTRPPTRPPTRPLLSFRGAVAMKVELCSFSGYKIYPGHGRRYARTDGKVFQFLNAKCESAFLSKRNPRQINWTVLYRRKHKKGQSEEIQKKRTRRAVKFQRAITGASLADIMAKRNQKPEVRKAQREQAIRAAKEAKKAKQASKKTAMAAAKAPTKAAPKQKIVKPVKVSAPRVGGKR

SEQ ID NO: 983 - protein, 285 aa, Homo sapiens
GHCSGKSLLRWTVRLSALSSSQRPHAGPPAGPSTLRPPSFPGASFGLDCPCSSILLPPPDLLSSRLPPPLARVMRSRLLLSVAHLPTIRETTEEMLLGGPGQEPPPSPSLDDYVRSISRLAQPTSVLDKATAQGQPRPPHRPAQACRKGRPAVSLRDITARFSGQQPTLPMADTVDPLDWLFGESQEKQPSQRDLPRRTGPSAGLWGPHRQMDSSKPMGAPRGRLCEARMPGHSLARPPQDGQQSSDLRSWTFGQSAQAMASRHRPRPSSVLRTLYSHLPVIHEL

SEQ ID NO: 984 - protein, 216 aa, Homo sapiens
  misc_feature (1)...(216): Xaa = any amino acid or nothing
NSNVLFSSAITAWPQYKLDNGSKWPENGTYDFSILQPISILYGCTFLLSHNLVPDTSPLGNYLPVLXQARQEICQTANLLLPTPDSQPYEDTLAGRSVLVKSLTPQTLQPQWTRPYPVIYSTPTAVHLQDPLHWVHHSRIKPCPSDSQLDLSSSSWKPQDXAESRSDKQPTTLKLLAAPSQGHASMQHSFQMAIPACFQAGFIRSSGPSSLKTCRL

SEQ ID NO: 985 - protein, 367 aa, Homo sapiens
HTQVSGLLTPQLQEPDVWSPSRGQPVSLHLPGKGAPEVKEMAWWKSWIEQEGVTVKSSSHFNPDPDAETLYKAMKGIGTNEQAIIDVLTKRSNTQRQQIAKSFKAQFGKDLTETLKSELSGKFERLIVALMYPPYRYEAKELHDAMKGLGTKEGVIIEILASRTKNQLREIMKAYEEDYGSSLEEDIQADTSGYLERILVCLLQGSRDDVSSFVDPGLALQDAQDLYAAGEKIRGTDEMKFITILCTRSATHLLRVFEEYEKIANKSIEDSIKSETHGSLEEAMLTVVKCTQNLHSYFAERLYYAMKGAGTRDGTLIRNIVSRSEIDLNLIKCHFKKMYGKTLSSMIMEDTSGDYKNALLSLVGSDP

SEQ ID NO: 986 - protein, 460 aa, Homo sapiens
QIFGFGGGFWARTGQFIKDDAPGLDRILLGARPKHLPGLQSVEAAAGRARGGVMRRNLRLGPSSGADAQGQGAPRPGLAAPRMLLPPASQASRGSGSTGCSLMAQEVDTAQGAEMRRGAGAARGRASWCWALALLWLAVVPGWSRVSGIPSRRHWPVPYKRFDFRPKPDPYCQAKYTFCPTGSPIPVMEGDDDIEVFRLQAPVWEFKYGDLLGHLKIMHDAIGFRSTLTGKNYTMEWYELFQLGNCTFPHLRPEMDAPFWCNQGAACFFEGIDDVHWKENGTLVQVATISGNMFNQMAKWVKQDNETGIYYETWNVKASPEKGAETWFDSYDCSKFVLRTFNKLAEFGAEFKNIETNYTRIFLYSGEPTYLGNETSVFGPTGNKTLGLAIKRFYYPFKPHLPTKEFLLSLLQIFDAVIVHKQFYLFYNFEYWFLPMKFPFIKITYEEIPLPIRNKTLSGL

SEQ ID NO: 987 - protein, 250 aa, Homo sapiens
FSLFNFLNLDMKDVGPESCGQPTPCWPSPALESVLGKASQHLGLESGQPLYLLELNWGGTECALSSTGRTAACFLPISLLPTSPAAWLGPEALCLPGRPGTTGLRDTGGPLLLPPPTLLQDTTRWCWMLVLWPAKVHGDSPHGILRDQAAGIGKEFHPDHCPSQVPRRPHHTPFQGQGSSKPRARILCCCLVESLPPCVGSVGQAECIGDRAVSMGLGVCELRPRCAVWRRVLSGKRCGFKVCVCRGWVC

SEQ ID NO: 988 - protein, 123 aa, Homo sapiens
  misc_feature (1)...(123): Xaa = any amino acid or nothing
AWRRVEILPFLFIXLLLLLLLFSLRQSLTLLPRLECNGAISAHCNLRLPGSSDSPASASRVAGITGAHHHAQLIFVFLAETGFRHVGQAGFELLTSGDPPASASQTAGIIGMSHLASPIYLII

SEQ ID NO: 989 - protein, 413 aa, Homo sapiens
CSLRSQCRAPAAPRLPARRTSGSRGAPSPQRRLPARAASDRRPRAATGRGDRAAACGRGAGQRWGLRLLSPEVPGSLRQDARGEAAEAAPTSRRTGRRAGMGIGRSEGGRRGALGVLLALGAALLAVGSASEYDYVSFQSDIGPYQSGRFYTKPPQCVDIPADLRLCHNVGYKKMVLPNLLEHETMAEVKQQASSWVPLLNKNCHAGTQVFLCSLFAPVCLDRPIYPCRWLCEAVRDSCEPVMQFFGFYWPEMLKCDKFPEGDVCIAMTPPNATEASKPQGTTVCPPCDNELKSEAIIEHLCASEFALRMKIKEVKKENGDKKIVPKKKKPLKLGPIKKKDLKKLVLYLKNGADCPCHQLDNLSHHFLIMGRKVKSQYLLTAIHKWDKKNKEFKNFMKKMKNHECPTFQSVFK

SEQ ID NO: 990 - protein, 425 aa, Homo sapiens
LLSWHLLPGGSELTHKPRLLVIFQKMNPASAPPPLPPPGQQVIHVTQDLDTDLEALFNSVMNPKPSSWRKKILPESFFKEPDSGSHSRQSSTDSSGGHPGPRLAGGAQHVRSHSSPASLQLGTGAGAAGSPAQQHAHLRQQSYDVTDELPLPPGWEMTFTATGQRYFLNHIEKITTWQDPRKAMNQPLNHMNLHPAVSSTPVPQRSMAVSQPNLVMNHQHQQQMAPSTLSQQNHPTQNPPAGLMSMPNALTTQQQQQQKLRLQRIQMERERIRMRQEELMRQEAALCRQLPMEAETLAPVQAAVNPPTMTPDMRSITNNSSDPFLNGGPYHSREQSTDSGLGLGCYSVPTTPEDFLSNVDEMDTGENAGQTPMNINPQQTRFPDFLDCLPGTNVDLGTLESEDLIPLFNDVESALNKSEPFLTWL

SEQ ID NO: 991 - protein, 108 aa, Homo sapiens
LRSRFAAGQGQVWINGFNLGRYWPARGPQLTLFVPQHILMTSAPNTITVLELEWAPCSSDDPELCAVTFVDRPVIGSSVTYDHPSKPVEKRLMPPPPQKNKDSWLDHV

SEQ ID NO: 992 - protein, 437 aa, Homo sapiens
RSHFICDLDFFVLHYIFIDFVINMVLGKVKSLTISFDCLNDSNVPVYSSGDTVSGRVNLEVTGEIRVKSLKIHARGHAKVRWTESRNAGSNTAYTQNYTEEVEYFNHKDILIGHERDDDNSEEGFHTIHSGRHEYAFSFELPQTPLATSFEGRHGSVRYWVKAELHRPWLLPVKLKKEFTVFEHIDINTPSLLSPQAGTKEKTLCCWFCTSGPISLSAKIERKGYTPGESIQIFAEIENCSSRMVVPKAAIYQTQAFYAKGKMKEVKQLVANLRGESLSSGKTETWNGKLLKIPPVSPSILDCSIIRVEYSLMVYVDIPGAMDLFLNLPLVIGTIPLHPFGSRTSSVSSQCSMNMNWLSLSLPERPEAPPSYAEVVTEEQRRNNLAPVSACDDFERALQGPLFAYIQEFRFLPPPLYSEIDPNPDQSADDRPSCPSR

SEQ ID NO: 993 - protein, 84 aa, Homo sapiens
SEIYVAMRTDSSKMTDVESGVANFASSARAGRRNALPDIQSSAATDGTSDLPLKLEALSVKEDAKEKDEKTTQDQLEKPQNEEK

SEQ ID NO: 994 - protein, 171 aa, Homo sapiens
AGLSLSQLIVQNTLPVACLLFTMASSDIQVKELEKRASGQAFELILSPRSKESVPEFPLSPPKKKDLSLEEIQKKLEAAEERRKSHEAEVLKQLAEKREHEKEVLQKAIEENNNFSKMAEEKLTHKMEANKENREAQMAAKLERLREKDKHIEEVRKNKESKDPADETEAD

SEQ ID NO: 995 - protein, 33 aa, Homo sapiens
KIQLFTIAKTWNQPKCPSMIEWVKKIWYIYSMN

SEQ ID NO: 996 - protein, 209 aa, Homo sapiens
ISYSNLFRSSFLTVISSPIKIFFKIWRPSFKLLATVWEQRVYSPLGSGPWTPQSPPEVRDCKMGLWQQISNCMPDLALCRCLERWLNRNSSALQLPARSTQKEIISAFPTKVPSSSHWDWLDSGCSPQKASRSRVGCRLTREAQGVRELPPLAKGSCEGLCREERGIPAQILCFPHGLCNPQTRRFPWVPAPPGPWVSSRKLGSHLGRH

SEQ ID NO: 997 - protein, 428 aa, Homo sapiens
MATEQRPFHLVVFGASGFTGQFVTEEVAREQVDPERTQPALGVAGRSREKLQRVLEKAALKLGRPTLSSEVGIIICDIANPASLDEMAKQATVVLNCVGPYRFYGEPVIKACIENGASCIDISGEPQFLELMQLKYHEKAADKGFNIIGSSGFDSIPADLGVIYTRNKMNGTLTAVESFLTIHSGPEGLSIHDGTWKSAIYGFGDQSNLRKLRNVSNLKPVPLIGPKLKRRWPISYCRELKGYSIPFMGSDVSVVRRTQRYLYENLEESPVQYAAYVTVGGITSVIKLMFAGLFFLFFVRFGIGRQLLIKFPWFFSFGYFSKQGPTQKQIDAASFTLTFFGQGYSQGTGTDKNKPNIKICTQVKGPEAGYVATPIAMVQAAMTLLSDASHLPKAGGVFTPGAAFSKTKLIDRLNKHGIEFSVISSSEV

SEQ ID NO: 998 - protein, 514 aa, Homo sapiens
RVRPRPEVSASASCVSRVSAPAAPRPCPAVARRLQPSLWQPRPPGRSGAHCAARVPAACMDAALKRSRSEEPAEILPPARDEEEEEEEGMEQGLEEEEEVDPRIQGELEKLNQSTDDINRRETELEDARQKFRSVLVEATVKLDELVKKIGKAVEDSKPYWEARRVARQAQLEAQKATQDFQRATEVLRAAKETISLAEQRLLEDDKRQFDSAWQEMLNHATQRVMEAEQTKTRSELVHKETAARYNAAMGRMRQLEKKLKRAINKSKPYFELKAKYYVQLEQLKKTVDDLQAKLTLAKGEYKMALKNLEMISDEIHERRRSSAMGPRGCGVGAEGSSTSVEDLPGSKPEPDAISVASEAFEDDSCSNFVSEDDSETQSVSSFSSGPTSPSEMPDQFPAVVRPGSLDLPSPVSLSEFGMMFPVLGPRSECSGASSPECEVERGDRAEGAENKTSDKANNNRGLSSSSGSGGSSKSQSSTSPEGQALENRMKQLSLQCSKGRDGIIADIKMVQIG

SEQ ID NO: 999 - protein, 1092 aa, Homo sapiens
LCFSLLLPSLFLQLPRKPGTAERRRPSRHLPGSPWRPRWACSVSWAASALGVGSSGAPAVRSRGGGKMEPFTNDRLQLPRNMIENSMFEEEPDVVDLAKEPCLHPLEPDEVEYEPRGSRLLVRGLGEHEMEEDEEDYESSAKLLGMSFMNRSSGLRNSATGYRQSPDGACSVPSARTMVVCAFVIVVAVSVIMVIYLLPRCTFTKEGCHKKNQSIGLIQPFATNGKLFPWAQIRLPTAVVPLRYELSLHPNLTSMTFRGSVTISVQALQVTWNIILHSTGHNISRVTFMSAVSSQEKQAEILEYAYHGQIAIVAPEALLAGHNYTLKIEYSANISSSYYGFYGFSYTDESNEKKYFAATQFEPLAARSAFPCFDEPAFKATFIIKIIRDEQYTALSNMPKKSSVVLDDGLVQDEFSESVKMSTYLVAFIVGEMKNLSQDVNGTLVSIYAVPEKIGQVHYALETTVKLLEFFQNYFEIQYPLKKLDLVAIPDFEAGAMENWGLLTFREETLLYDSNTSSMADRKLVTKIIAHELAHQWFGNLVTMKWWNDLWLNEGFATFMEYFSLEKIFKELSSYEDFLDARFKTMKKDSLNSSHPISSSVQSSEQIEEMFDSLSYFKGSSLLLMLKTYLSEDVFQHAVVLYLHNHSYASIQSDDLWDSFNEVTNQTLDVKRMMKTWTLQKGFPLVTVQKKGKELFIQQERFFLNMKPEIQPSDTSYLWHIPLSYVTEGRNYSKYQSVSLLDKKSGVINLTEEVLWVKVNINMNGYYIVHYADDDWEALIHQLKINPYVLSDKDRANLINNIFELAGLGKVPLKRAFDLINYLGNENHTAPITEALFQTDLIYNLLEKLGYMDLASRLVTRVFKLLQNQIQQQTWTDEGTPSMRELRSALLEFACTHNLGNCSTTAMKLFDDWMASNGTQSLPTDVMTTVFKVGAKTDKGWSFLLGKYISIGSEAEKNQILEALASSEDVRKLYWLMKSSLNGDNFRTQKLSFIIRTVGRHFPGHLLAWDFVKENWNKLVQKFPLGSYTIQNIVAGSTYLFSTKTHLSEVQAFFENQSEATFRLRCVQEALEVIQLNIQWMEKNLKSLTWWL

SEQ ID NO: 1000 - protein, 488 aa, Homo sapiens
VVDSPLARSARLPGNSSPLFSAPCSMGAGPSLLLAALLLLLSGDGAVRCDTPANCTYLDLLGTWVFQVGSSGSQRDVNCSVMGPQEKKVVVYLQKLDTAYDDLGNSGHFTIIYNQGFEIVLNDYKWFAFFKYKEEGSKVTTYCNETMTGWVHDVLGRNWACFTGKKVGTASENVYVNTAHLKNSQEKYSNRLYKYDHNFVKAINAIQKSWTATTYMEYETLTLGDMIRRSGGHSRKIPRPKPAPLTAEIQQKILHLPTSWDWRNVHGINFVSPVRNQASCGSCYSFASMGMLEARIRILTNNSQTPILSPQEVVSCSQYAQGCEGGFPYLIAGKYAQDFGLVEEACFPYTGTDSPCKMKEDCFRYYSSEYHYVGGFYGGCNEALMKLELVHHGPMAVAFEVYDDFLHYKKGIYHHTGLRDPFNPFELTNHAVLLVGYGTDSASGMDYWIVKNSWGTGWGENGYFRIRRGTDECAIESIAVAATPIPKL

SEQ ID NO: 1001 - protein, 308 aa, Homo sapiens
RTPMDDKELIEYFKSQMKEDPDMASAVAAIRTLLEFLKRDKGETIQGLRANLTSAIETLCGVDSSVAVSSGGELFLRFISLASLEYSDYSKCKKIMIERGELFLRRISLSRNKIADLCHTFIKDGATILTHAYSRVVLRVLEAAVAAKKRFSVYVTESQPDLSGKKMAKALCHLNVPVTVVLDAAVGYIMEKADLVIVGAEGVVENGGIINKIGTNQMAVCAKAQNKPFYVVAESFKFVRLFPLNQQDVPDKFKYKADTLKVAQTGQDLKEEHPWVDYTAPSLITLLFTDLGVLTPSAVSDELIKLYL

SEQ ID NO: 1002 - protein, 795 aa, Homo sapiens
GQRLEAERTGSRAHRAVEREMPALGWAVAAILMLQTAMAEPSPGTLPRKAGVFSDLSNQELKAVHSFLWSKKELRLQPSSTTTMAKNTVFLIEMLLPKKYHVLRFLDKGERHPVREARAVIFFGDQEHPNVTEFAVGPLPGPCYMRALSPRPGYQSSWASRPISTAEYALLYHTLQEATKPLHQFFLNTTGFSFQDCHDRCLAFTDVAPRGVASGQRRSWLIIQRYVEGYFLHPTGLELLVDHGSTDAGHWAVEQVWYNGKFYGSPEELARKYADGEVDVVVLEDPLPGGKGHDSTEEPPLFSSHKPRGDFPSPIHVSGPRLVQPHGPRFRLEGNAVLYGGWSFAFRLRSSSGLQVLNVHFGGERIAYEVSVQEAVALYGGHTPAGMQTKYLDVGWGLGSVTHELAPGIDCPETATFLDTFHYYDADDPVHYPRALCLFEMPTGVPLRRHFNSNFKGGFNFYAGLKGQVLVLRTTSTVYNYDYIWDFIFYPNGVMEAKMHATGYVHATFYTPEGLRHGTRLHTHLIGNIHTHLVHYRVDLDVAGTKNSFQTLQMKLENITNPWSPRHRVVQPTLEQTQYSWERQAAFRFKRKLPKYLLFTSPQENPWGHKRSYRLQIHSMADQVLPPGWQEEQAITWARYPLAVTKYRESELCSSSIYHQNDPWDPPVVFEQFLHNNENIENEDLVAWVTVGFLHIPHSEDIPNTATPGNSVGFLLRPFNFFPEDIPNTATPGNSVGFLLRPFNFFPEDPSLASRDTVIVWPRDNGPNYVQRWIPEDRDCSMPPPFSYNGTYRPV

SEQ ID NO: 1003 - protein, 240 aa, Homo sapiens
DPTHPPARAGPRPLPGPFPAGVWVPGWGLGVRDPEPARFGPPQEAARRGGGGMEARFTRGKSALLERALARPRTEVSLSAFALLFSELVQHCQSRVFSVAELQSRLAALGRQVGARVLDALVAREKGARRETKVLGALLFVKGAVWKALFGKEADKLEQANDDARTFYIIEREPLINTYISVPKENSTLNCASFTAGIVEAVLTHSGFPAKVTAHWHKGTTLMIKFEEAVIARDRALEGR

SEQ ID NO: 1004 - protein, 337 aa, Homo sapiens
WTSWWMSSVLTILLFSLQGNKMLNYSAPSAGGCLLDRKAVGTPAGGGFPRRHSVTLPSSKFHQNQLLSSLKGEPAPALSSRDSRFRDRSFSEGGERLLPTQKQPGGGQVNSSRYKTELCRPFEENGACKYGDKCQFAHGIHELRSLTRHPKYKTELCRTFHTIGFCPYGPRCHFIHNAEERRALAGARDLSADRPRLQHSFSFAGFPSAAATAAATGLLDSPTSITPPPILSADDLLGSPTLPDGTNNPFAFSSQELASLFAPSMGLPGGGSPTTFLFRPMSESPHMFDSPPSPQDSLSDQEGYLSSSSSSHSGSDSPTLDNSRRLPIFSRLSISDD

SEQ ID NO: 1005 - protein, 103 aa, Homo sapiens
PVRNSRVDFAVDVFRPPPPYPYLVTGIPTHHPRVYNIHSRTVTRYPANSIVDVGGCPVCRVGVLEDCFTFLGIFLAIILFPFGFICCFALRKRRCPNCGATFA

SEQ ID NO: 1006 - protein, 201 aa, Homo sapiens
ARGELRVAAVDMFQVPDSEGGRAGSRAMKPPGGESSNLFGSPEEATPSSRPNRMASNIFGPTEEPQNIPKRTNPPGGKGSGIFDESTPVQTRQHLNPPGGKTSDIFGSPVTATSRLAHPNKPKDHVFLCEGEEPKSDLKAARSIPAGAEPGEKGSARKAGPAKEQEPMPTVDSHEPRLGPRPRSHNKVLNPPGGKSSISFY

SEQ ID NO: 1007 - protein, 751 aa, Homo sapiens
VMGKSESQMDITDINTPKPKKKQRWTRLEISLSVLVLLLTIIAVRMIALYATYDDGICKSSDCIKSAARLIQNMDATTEPCRDFFKYACGGWLKRNVIPETSSRYGNFDILRDELEVVLKDVLQEPKTEDIVAVQKAKALYRSCINESAIDSRGGEPLLKLLPDIYGWPVATENWEQKYGASWTAEKAIAQLNSKYGKKVLINLFVGTDDKNSVNHVIHIDQPRLGLPSRDYYECTGIYKEACTAYVDFMISVARLIRQEERLPIDENQLALEMNKVMELEKEIANATAKPEDRNDPMLLYNKMRLAQIQNNFSLEINGKPFSWLNFTNEIMSTVNISITNEEDVVVYAPEYLTKLKPILTKYSARDLQNLMSWRFIMDLVSSLSRTYKESRNAFRKALYGTTSETATWRRCANYVNGNMENAVGRLYVEAAFAGESKHVVEDLIAQIREVFIQTLDDLTWMDAETKKRAEEKALAIKERIGYPDDIVSNDNKLNNEYLELNYKEDEYFENIIQNLKFSQSKQLKKLREKVDKDEWISGAAVVNAFYSSGRNQIVFPAGILQPPFFSAQQSNSLNYGGIGMVIGHEITHGFDDNGRNFNKDGDLVDWWTQQSASNFKEQSQCMVYQYGNFSWDLAGGQHLNGINTLGENIADNGGLGQAYRAYQNYIKKNGEEKLLPGLDLNHKQLFFLNFAQVWCGTYRPEYAVNSIKTDVHSPGNFRIIGTLQNSAEFSEAFHCRKNSYMNPEKKCRVW

SEQ ID NO: 1008 - protein, 824 aa, Homo sapiens
DGRLTGSTELHSRSGPGRTGSPTEQKHPSAPQARSVPPGKMQRLMMLLATSGACLGLLAVAAVAAAGANPAQRDTHSLLPTHRRQKRDWIWNQMHIDEEKNTSLPHHVGKIKSSVSRKNAKYLLKGEYVGKVFRVDAETGDVFAIERLDRENISEYHLTAVIVDKDTGENLETPSSFTIKVHDVNDNWPVFTHRLFNASVPESSAVGTSVISVTAVDADDPTVGDHASVMYQILKGKEYFAIDNSGRIITITKSLDREKQARYEIVVEARDAQGLRGDSGTATVLVTLQDINDNFPFFTQTKYTFVVPEDTRVGTSVGSLFVEDPDEPQNRMTKYSILRGDYQDAFTIETNPAHNEGIIKPMKPLDYEYIQQYSFIVEATDPTIDLRYMSPPAGNRAQVIINITDVDEPPIFQQPFYHFQLKENQKKPLIGTVLAMDPDAARHSIGYSIRRTSDKGQFFRVTKKGDIYNEKELDREVYPWYNLTVEAKELDSTGTPTGKESIVQVHIEVLDENDNAPEFAKPYQPKVCENAVHGQLVLQISAIDKDITPRNVKFKFTLNTENNFTLTDNHDNTANITVKYGQFDREHTKVHFLPVVISDNGMPSRTGTSTLTVAVCKCNEQGEFTFCEDMAAQVGVSIQAVVAILLCILTITVITLLIFLRRRLRKQARAHGKSVPEIHEQLVTYDEEGGGEMDTTSYDVSVLNSVRRGGAKPPRPALDARPSLYAQVQKPPRHAPGAHGGPGEMAAMIEVKKDEADHDGDGPPYDTLHIYGYEGSESIAESLSSLGTDSSDSDVDYDFLNDWGPRFKMLAELYGSDPREELLY

SEQ ID NO: 1009 - protein, 166 aa, Homo sapiens
PAQSGRLQQQVSKERLRTPRTGEFRSRMASLFRSYLPAIWLLLSQLLRESLAAELRGCGPRFGKHLLSYCPMPEKTFTTTPGGWLLESGRPKEMVSTSNNKDGQALGTTSEFIPNLSPELKKPLSEGQPSLKKIILSRKKRSGRHRFDPFCCEVICDDGTSVKLCT

SEQ ID NO: 1010 - protein, 371 aa, Homo sapiens
PRNEPNSPERRPPLAMDAGVTESGLNVTLTIRLLMHGKEVGSIIGKKGESVKRIREESGARINISEGNCPERIITLTGPTNAIFKAFAMIIDKLEEDINSSMTNSTAASRPPVTLRLVVPATQCGSLIGKGGCKIKEIRESTGAQVQVAGDMLPNSTERAITIAGVPQSVTECVKQICLVMLETLSQSPQGRVMTIPYQPMPASSPVICAGGQDRCSDAAGYPHATHDLEGPPLDAYSIQGQHTISPLDLAKLNQVARQQSHFAMMHGGTGFAGIDSSSPEVKGYWASLDASTQTTHELTIPNNLIGCIIGRQGANINEIRQMSGAQIKIANPVEGSSGRQVTITGSAASISLAQYLINARLSSEKGMGCS

SEQ ID NO: 1011 - protein, 120 aa, Homo sapiens
LPSRSLNRRKKKKKKEKKKKKSGRSRGSKVTYACLRRHSSSIGSPKFNSLAAVLQRRDWENPGVTQFNRLAGHPPFASWRKSEEARTDPPSQKLRSLNGEWDAPVARIKRAGVGVKRRDR

SEQ ID NO: 1012 - protein, 943 aa, Homo sapiens
  misc_feature (1)...(943): Xaa = any amino acid or nothing
QGPGLEEDIPDPEELDWGSKYYASLQELQGQHNFDEDEMDDPGDSDGVNLISMVGEIQDQGEAEVKGTVSPKKAVATLKIYNRSLEEEFNHFEDWLNVFPLYRGQGGQDGGGEEEGSGHLVGKFKGSFLIYPESEAVLFSEPQISRGIPQNRPIKLLVRVYVVKATNLAPADPNGKADPYVVVSAGRERQDTKERYIPKQLNPIFGEILELSISLPAETELTVAVFEHDLVGSDDLIGETHIDLENRFYSHHRANCGLASQYEVVGPAGPTGAILSFWPNTFKLTFPFVSPDPMISWKGTLPPTATANQDIAQWSRLGLGSRDPVTNVTXPLSFFMKQSRSVSQVGVQWHDLGXLQPPPPGFKRFSCLSLPSSWDYRRGPPCPANFYIFALSPRLECSGTISADCNLHLLGSSDSPASASPVAGITGVGPHVQLIFIFLVETGFHHVVQAGLEPLTSSDPPTSASQSAGITGVSHHARPSXPLQVCFLICKTEVIRSVSSXWKHLGYIFFIHCYHKXGLTCLPLGVLNLDLMSSXRHHCPRPSCVPTPAPADASSFSACRDGYNAWRDAFWPSQILAGLCQRCGLPAPEYRAGAVKVGSKVFLTPPETLPPGSLHMWIDIFPQDVPAPPPVDIKPRQPISYELRVVIWNTEDVVLDDENPLTGEMSSDIYVKSWVKGLEHDKQETDVHFNSLTGEGNFNWRFVFRFDYLPTEREVSVWRRSGPFALEEAEFRQPAVLVLQVWDYDRISANDFLGSLELQLPDMVRGARGPELCSVQLARNGAGPRCNLFRCRRLRGWWPVVKLKEAEDVEREAQEAQAGKKKRKQRRRKGRPEDLEFTDMGGNVYILTGKVEAEFELLTVEEAEKRPVGKGRKQPEPLEKPSRPKTSFNWFVNPLKTFVFFIWRRYWRTLVLLLLVLLTVFLLLVFYTIPGQISQVIFRPLHK

SEQ ID NO: 1013 - protein, 275 aa, Homo sapiens
SPPPPPAFPSRCPLHSLCGARPPVPVMAMLRVQPEAQAKVDVFREDLCTKTENLLGSYFPKKISELDAFLKEPALNEANLSNLKAPLDIPVPDPVKEKEKEERKKQQEKEDKDEKKKGEDEDKGPPCGPVNCNEKIVVLLQRLKPEIKDVIEQLNLVTTWLQLQIPRIEDGNNFGVAVQEKVFELMTSLHTKLEGFHTQISKYFSERGDAVTKAAKQPHVGDYRQLVHELDEAEYRDIRLMVMEIRNAYAVLYDIILKNFEKLKKPRGETKGMIY

SEQ ID NO: 1014 - protein, 129 aa, Homo sapiens
HFLYNLLEQDEILIFLRAHPKNIKANILVYSVPSIKSFEVIKVIHGKLLDMVGKVQIPIMLVGNKKDLHMERVISYEEGKALAESWNAAFLESSAKENQTAVDVFRRIILEAEKMDGAASQGKSSCSVM

SEQ ID NO: 1015 - protein, 555 aa, Homo sapiens
WRPKCERQELCSFLPSGSVPYSSLQPAPREISVELQKRWAVCLSTMPLSLGAEMWGPEAWLLLLLLLASFTGRCPAGELETSDVVTVVLGQDAKLPCFYRGDSGEQVGQVAWARVDAGEGAQELALLHSKYGLHVSPAYEGRVEQPPPPRNPLDGSVLLRNAVQADEGEYECRVSTFPAGSFQARLRLRVLVPPLPSLNPGPALEEGQGLTLAASCTAEGSPAPSVTWDTEVKGTTSSRSFKHSRSAAVTSEFHLVPSRSMNGQPLTCVVSHPGLLQDQRITHILHVSFLAEASVRGLEDQNLWHIGREGAMLKCLSEGQPPPSYNWTRLDGPLPSGVRVDGDTLGFPPLTTEHSGIYVCHVSNEFSSRDSQVTVDVLDPQEDSGKQVDLVSASVVVVGVIAALLFCLLVVVVVLMSRYHRRKAQQMTQKYEEELTLTRENSIRRLHSHHTDPRSQPEESVGLRAEGHPDSLKDNSSCSVMSEEPEGRSYSTLTTVREIETQTELLSPGSGRAEEEEDQDEGIKQAMNHFVQENGTLRAKPTGNGIYINGRGHLV

SEQ ID NO: 1016 - protein, 652 aa, Homo sapiens
MATSMGLLLLLLLLLTQPGAGTGADTEAVVCVGTACYTAHSGKLSAAEAQNHCNQNGGNLATVKSKEEAQHVQRVLAQLLRREAALTARMSKFWIGLQREKGKCLDPSLPLKGFSWVGGGEDTPYSNWHKELRNSCISKRCVSLLLDLSQPLLPNRLPKWSEGPCGSPGSPGSNIEGFVCKFSFKGMCRPLALGGPGQVTYTTPFQTTSSSLEAVPFASAANVACGEGDKDETQSHYFLCKEKAPDVFDWGSSGPLCVSPKYGCNFNNGGCHQDCFEGGDGSFLCGCRPGFRLLDDLVTCASRNPCSSSPCRGGATCVLGPHGKNYTCRCPQGYQLDSSQLDCVDVDECQDSPCAQECVNTPGGFRCECWVGYEPGGPGEGACQDVDECALGRSPCAQGCTNTDGSFHCSCEEGYVLAGEDGTQCQDVDECVGPGGPLCDSLCFNTQGSFHCGCLPGWVLAPNGVSCTMGPVSLGPPSGPPDEEDKGEKEGSTVPRAATASPTRGPEGTPKATPTTSRPSLSSDAPITSAPLKMLAPSGSSGVWREPSIHHATAASGPQEPAGGDSSVATQNNDGTDGQKLLLFYILGTVVAILLLLALALGLLVYRKRRAKREEKKEKKPQNAADSYSWVPERAESRAMENQYSPTPGTDC

SEQ ID NO: 1017 - protein, 711 aa, Homo sapiens
HEATPEGWSRDAVAPAACSPRVPVRAHAGPGARPQPCHWTQDKAQRTGPHVDSMDRGTLPLAVALLLASCSLSPTSLAETVHCDLQPVGPERDEVTYTTSQVSKGCVAQAPNAILEVHVLFLEFPTGPSQLELTLQASKQNGTWPREVLLVLSVNSSVFLHLQALGIPLHLAYNSSLVTFQEPPGVNTTELPSFPKTQILEWAAERGPITSAAELNDPQSILLRLGQAQGSLSFCMLEASQDMGRTLEWRPRTPALVRGCHLEGVAGHKEAHILRVLPGHSAGPRTVTVKVELSCAPGDLDAVLILQGPPYVSWLIDANHNMQIWTTGEYSFKIFPEKNIRGFKLPDTPQGLLGEARMLNASIVASFVELPLASIVSLHASSCGGRLQTSPAPIQTTPPKDTCSPELLMSLIQTKCADDAMTLVLKKELVAHLKCTITGLTFWDPSCEAEDRGDKFVLRSAYSSCGMQVSASMISNEAVVNILSSSSPQRKKVHCLNMDSLSFQLGLYLSPHFLQASNTIEPGQQSFVQVRVSPSVSEFLLQLDSCHLDLGPEGGTVELIQGRAAKGNCVSLLSPSPEGDPRFSFLLHFYTVPIPKTGTLSCTVALRPKTGSQDQEVHRTVFMRLNIISPDLSGCTSKGLVLPAVLGITFGAFLIGALLTAALWYIYSHTRSPSKREPVVAVAAPASSESSSTNHSIGSTQSTPCSTSSMA

SEQ ID NO: 1018 - protein, 135 aa, Homo sapiens
  misc_feature (1)...(135): Xaa = any amino acid or nothing
RETEEKMRRAKLAKEKAEKERLEKQQKREQLIDMNAEGDETGVMDSLLEALQSGAAFRRKRGPRQAQPLVPLGSRGGGGDLXIANRKAGCAVTSLLASELTKDDAMAAVPAKVSKNSETFPTILEEAKELVGRAS

SEQ ID NO: 1019 - protein, 730 aa, Homo sapiens
GRGHQSAEPRTPPAQALGVDKSFTSRRSVWRSDGQNQHFPQALDLSRVNLVPSYTPSLYPKNTDLFEMIEKMQGSRMDEQRCSFPPPLKTEEDYIPYPSVHEVLGREGPFPLILLPQFGGYWIEGTNHEITSIPETEPLQSPTTKVKLECNPTARIYRKHFLGKEHFNYYSLDTALGHLVFSLKYDVIGDQEHLRLLLRTKCRTYHDVIPISCLTEFPNVVQMAKLVCEDVNVDRFYPVLYPKASRLIVTFDEHVISNNFKFGVIYQKLGQTSEEELFSTNEESPAFVEFLEFLGQKVKLQDFKGFRGGLDVTHGQTGTESVYCNFRNKEIMFHVSTKLPYTEGDAQQLQRKRHIGNDIVAVVFQDENTPFVPDMIASNFLHAYVVVQAEGGGPDGPLYKVSVTARDDVPFFGPPLPDPAVFRKGPEFQEFLLTKLINAEYACYKAEKFAKLEERTRAALLETLYEELHIHSQSMMGLGGDEDKMENGSGGGGFFESFKRVIRSRSQSMDAMGLSNKKPNTVSTSHSGSFAPNNPDLAKAAGISLIVPGKSPTRKKSGPFGSRRSSAIGIENIQEVQEKRESPPAGQKTPDSGHVSQEPKSENSSTQSSPEMPTTKNRAETAAQRAEALKDFSRSSSSASSFASVVEETEGVDGEDTGLESVSSSGTPHKRDSFIYSTWLEDSVSTTSGGSSPGPSRSPHPDAGKLGDPACPEIKIQLEASEQHMPQLGC

SEQ ID NO: 1020 - protein, 397 aa, Homo sapiens
PVTEPPGRQPRDDSPARPGPHLRPPPALQAPRSPLAATAPSAPPAVPTMTAASMGPVRVAFVVLLALCSRPAVGQNCSGPCRCPDEPAPRCPAGVSLVLDGCGCCRVCAKQLGELCTERDPCDPHKGLFCDFGSPANRKIGVCTAKDGAPCIFGGTVYRSGESFQSSCKYQCTCLDGAVGCMPLCSMDVRLPSPDCPFPRRVKLPGKCCEEWVCDEPKDQTVVGPALAAYRLEDTFGPDPTMIRANCLVQTTEWSACSKTCGMGISTRVTNDNASCRLEKQSRLCMVRPCEADLEENIKKGKKCIRTPKISKPIKFELSGCTSMKTYRAKFCGVCTDGRCCTPHRTTTLPVEFKCPDGEVMKKNMMFIKTCACHYNCPGDNDIFESLYYRKMYGDMA

SEQ ID NO: 1021 - protein, 370 aa, Homo sapiens
  misc_feature (1)...(370): Xaa = any amino acid or nothing
PDIMSGCRVFIGRLNPAAREKDVERFFKGYGRIRDIDLKRGFGFVEFEDPRDADDAVYELDGKELCSERVTIEHARARSRGGRGRGRYSDRFSSRRPRNDRRYVKGGWLHXTIIVGVAFKIQESLAVMILGPAVXSVLLFPRXPIVLDESIXVIEHKSIDGSHXNGLXYLMAXTCPQLNTSAVIAFLPLXIRIFFLRNAPPVRTENRLIVENLSSRVSWQDLKDFMRQAGEVTFADAHRPKLNEGVVEFASYGDLKNAIEKLSGKEINGRKIKLIEGSKRHSRSRSRSRSRTRSSSRSRSRSRSRSRKSYSRSRSRSRSRSRSKSRSVSRSPVPEKSQKRGSSSRSKSPASVDRQRSRSRSRSRSVDSGN

SEQ ID NO: 1022 - protein, 552 aa, Homo sapiens
ARLRRQGRCKGRRAAASGGSLFPQKLLNAETSQSGIRDAESTMDGFYDQQVPFMVPGKSRSEECRGRPVIDRKRKFLDTDLAHDSEELFQDLSQLQEAWLAEAQVPDDEQFVPDFQSDNLVLHAPPPTKIKRELHSPSSELSSCSHEQALGANYGEKCLYNYCAYDRKPPSGFKPLTPPTTPLSPTHQNPLFPPPQATLPTSGHAPAAGPVQGVGPAPAPHSLPEPGPQQQTFAVPRPPHQPLQMPKMMPENQYPSEQRFQRQLSEPCHPFPPQPGVPGDNRPSYHRQMSEPIVPAAPPPPQGFKQEYHDPLYEHGVPGMPGPPAHGFQSPMGIKQEPRDYCVDSEVPNCQSSYMRGGYFSSSHEGFSYEKDPRLYFDDTCVVPERLEGKVKQEPTMYREGPPYQRRGSLQLWQFLVTLLDDPANAHFIAWTGRGMEFKLIEPEEVARRWGIQKNRPAMNYDKLSRSLRYYYEKGIMQKVAGERYVYKFVCDPDALFSMAFPDNQRPFLKAESECHLSEEDTLPLTHFEDSPAYLLDMDRCSSLPYAEGFAY

SEQ ID NO: 1023 - protein, 232 aa, Homo sapiens
RERKTTSRESPRRRLSAERRQHPAHLRSAWEASAPNMRLPLLVSAGVLLVALLPCPPCRALLSRGPVPGARQAPQHPQPLDFFQPPPQSEQPQQPQARPVLLRMGEEYFLRLGNLNKSPAAPLSPASSLLAGGSGSRPSPEQATANFFRVLLQQLLLPRRSLDSPAAIAERGARNALGGHQEAPERERRSEEPPISLDLTFHLLREVLEMARAEQLAQQAHSNRKLMEIIGK

SEQ ID NO: 1024 - protein, 258 aa, Homo sapiens
RLLRLRQRRLRDWGRGCWSRVMLGGSLGSRLLRGVGGSHGRFGARGVREGGAAMAAGESMAQRMVWVDLEMTGLDIEKDQIIEMACLITDSDLNILAEGPNLIIKQPDELLDSMSDWCKEHHGKSGLTKAVKESTITLQQAEYEFLSFVRQQTPPGLCPLAGNSVHEDKKFLDKYMPQFMKHLHYRIIDVSTVKELCRRWYPEEYEFAPKKAASHRALDDISESIKELQFYRNNIFKKKIDEKKRKIIENGENEKTVS

SEQ ID NO: 1025 - protein, 291 aa, Homo sapiens
GTRSKMAARVLRARGAAWAGGLLQRAAPCSLLPRLRTWTSSSNRSREDSWLKSLFVRKVDPRKDAHSNLLAKKETSNLYKLQFHNVKPECLEAYNKICQEVLPKIHEDKHYPCTLVGTWNTWYGEQDQAVHLWRYEGGYPALTEVMNKLRENKEFLEFRKARSDMLLSRKNQLLLEFSFWNEPVPRSGPNIYELRSYQLRPGTMIEWGNYWARAIRFRQDGNEAVGGFFSQIGQLYMVHHLWAYRDLQTREDIRNAAWHKHGWEELVYYTVPLIQEMESRIMIPLKTSPLQ

SEQ ID NO: 1026 - protein, 406 aa, Homo sapiens
NILESTMNGQLDLSGKLIIKAQLGEDIRRIPIHNEDITYDELVLMMQRVFRGKLLSNDEVTIKYKDEDGDLITIFDSSDLSFAIQCSRILKLTLFVNGQPRPLESSQVKYLRRELIELRNKVNRLLDSLEPPGEPGPSTNIPENDTVDGREEKSASDSSGKQSTQVMAASMSAFDPLKNQDEINKNVMSAFGLTDDQVSGPPSAPAEDRSGTPDSIASSSSAAHPPGVQPQQPPYTGAQTQAGQIEGQMYQQYQQQAGYGAQQPQAPPQQPQQYGIQYSASYSQQTGPQQPQQFQGYGQQPTSQAPAPAFSGQPQQLPAQPPQQYQASNYPAQTYTAQTSQPTNYTVAPASQPGMAPSQPGAYQPRPGFTSLPGSTMTPPPSGPNPYARNRPPFGQGYTQPGPGYR

SEQ ID NO: 1027 - protein, 686 aa, Homo sapiens
LNHGAHPGQYHSVEEDCETVAGSQIVATHPPLPYPRALEQQLAADHRHSEDMSVGVSTSAPLSPTSGTSVGMSTFSIMDYVVFVLLLVLSLAIGLYHACRGWGRHTVGELLMADRKMGCLPVALSLLATFQSAVAILGVPSEIYRFGTQYWFLGCCYFLGLLIPAHIFIPVFYRLHLTSAYEYLELRFNKTVRVCGTVTFIFQMVIYMGVVLYAPSLALNAVTGFDLWLSVLALGIVCTVYTALGGLKAVIWTDVFQTLVMFLGQLAVIIVGSAKVGGLGRVWAVASQHGRISGFELDPDPFVRHTFWTLAFGGVFMMLSLYGVNQAQVQRYLSSRTEKAAVLSCYAVFPFQQVSLCVGCLIGLVMFAYYQEYPMSIQQAQAAPDQFVLYFVMDLLKGLPGLPGLFIACLFSGSLSTISSAFNSLATVTMEDLIRPWFPEFSEARAIMLSRGLAFGYGLLCLGMAYISSQMGPVLQAAISIFGMVGGPLLGLFCLGMFFPCANPPGAVVGLLAGLVMAFWIGIGSIVTSMGSSMPPSPSNGSSFSLPTNLTVATVTTLMPLTTFSKPTGLQRFYSLSYLWYSAHNSTTVIVVGLIVSLLTGRMRGRSLNPATIYPVLPKLLSLLPLSCQKRLHCRSYGQDHLDTGLFPEKPRNGVLGDSRDKEAMALDGTAYQGSSSTCILQETSL

SEQ ID NO: 1028 - protein, 108 aa, Homo sapiens
MLPSQISSEGLLHLIRAKGAVLLGHFAQPQWASFSSVSVVNVHLPASLSHPSVTSAITRTAAGTVSAAQRPSPMHFLNFGLLTRFTSRFLPLCAFEGFLVCLFCFVFK

SEQ ID NO: 1029 - protein, 151 aa, Homo sapiens
STLGAMPSKGPLQSVQVFGRKKTATAVAHCKRGNGLIKVNGRPLEMIEPRTLQYKLLEPVLLLGKERFAGVDIRVRVKGGGHVAQIYAIRQSISKALVAYYQKYVDEASKKEIKDILIQYDRTLLVADPRRCESKKFGGPGARARYQKSYR

SEQ ID NO: 1030 - protein, 142 aa, Homo sapiens
TADFVFMFLFGGVLMTLLGLLGSLFFLGQALMAMLVYVWSRRSPRVRVNFFGLLTFQAPFLPWALMGFSLLLGNSILVDLLGIAVGHIYYFLEDVFPNQPGGKRLLQTPGFLKLLLDAPAEDPNYLPLPEEQPGPHLPPPQQ

SEQ ID NO: 1031 - protein, 399 aa, Homo sapiens
LSRRCQLSHSVLPPLRRRVSLPVAMEEEIAALVIDNGSGMCKAGFAGDDAPRAVFPSIVGRPRHQGVMVGMGQKDSYVGDEAQSKRGILTLKYPIEHGIVTNWDDMEKIWHHTFYNELRVAPEEHPVLLTEAPLNPKANREKMTQIMFETFNTPAMYVAIQAVLSLYASGRTTGIVMDSGDGVTHTVPIYEGYALPHAILRLDLAGRDLTDYLMKILTERGYSFTTTAEREIVRDIKEKLCYVALDFEQEMATAASSSSLEKSYELPDGQVITIGNERFRCPEALFQPSFLGMESCGIHETTFNSIMKCDVDIRKDLYANTVLSGGTTMYPGIADRMQKEITALAPSTMKIKIIAPPERKYSVWIGGSILASLSTFQQMWISKQEYDESGPSIVHRKCF

SEQ ID NO: 1032 - protein, 512 aa, Homo sapiens
PRSRGLPLPARLLGDQRGSSPSRKSTKKATNENYEDNEKSDSSGSRSSCFGFVAYSVNSGERSRVKIKTLTHQPACSDTPRAGRCLSPSPSPSPRKLRCLDQLESEKEERRERHSKKRRVKEGNPNDTLDFLWLGTPSTMTTSASSHLNKGIKQVYMSLPQGEKVQAMYIWIDGTGEGLRCKTRTLDSEPKCVEELPEWNFDGSSTLQSEGSNSDMYLVPAAMFRDPFRKDPNKLVLCEVFKYNRRPAETNLRHTCKRIMDMVSNQHPWFGMEQEYTLMGTDGHPFGWPSNGFPGPQGPYYCGVGADRAYGRDIVEAHYRACLYAGVKIAGTNAEVMPAQWEFQIGPCEGISMGDHLWVARFILHRVCEDFGVIATFDPKPIPGNWNGAGCHTNFSTKAMREENGLKYIEEAIEKLSKRHQYHIRAYDPKGGLDNARRLTGFHETSNINDFSAGVANRSASIRIPRTVGQEKKGYFEDRRPSANCDPFSVTEALIRTCLLNETGDEPFQYKN

SEQ ID NO: 1033 - protein, 216 aa, Homo sapiens
LAAGMKVFKFIGLMILLTSAFSAGSGQSPMTVLCSIDWFMVTVHPFMLNNDVCVHFHELHLGLGCPPNHVQPHAYQFTYRVTECGIRAKAVSQDMVIYSTEIHYSSKGTPSKFVIPVSCAAPQKSPWLTKPCSMRVASKSRATAQKDEKCYEVFSLSQSSQRPNCDCPPCVFSEEEHTQVPCHQAGAQEAQPLQPSHFLDISEDWSLHTDDMIGSM

SEQ ID NO: 1034 - protein, 798 aa, Homo sapiens
VWSFSLDTEPSRQAKQARTHHPAPGPASLLPSNAMGSNLSPQLCLMPFILGLLSGGVTTTPWSLAWPQGSCSLEGVEIKGGSFRLLQEGQALEYVCPSGFYPYPVQTRTCRSTGSWSTLKTQDQKTVRKAECRAIHCPRPHDFENGEYWPRSPYYNVSDEISFHCYDGYTLRGSANRTCQVNGRWSGQTAICDNGAGYCSNPGIPIGTRKVGSQYRLEDSVTYHCSRGLTLRGSQRRTCQEGGSWSGTEPSCQDSFMYDTPQEVAEAFLSSLTETIEGVDAEDGHGPGEQQKRKIVLDPSGSMNIYLVLDGSDSIGASNFTGAKKCLVNLIEKVASYGVKPRYGLVTYATYPKIWVKVSEADSSNADWVTKQLNEINYEDHKLKSGTNTKKALQAVYSMMSWPDDVPPEGWNRTRHVIILMTDGLHNMGGDPITVIDEIRDLLYIGKDRKNPREDYLDVYVFGVGPLVNQVNINALASKKDNEQHVFKVKDMENLEDVFYQMIDESQSLSLCGMVWEHRKGTDYHKQPWQAKISVIRPSKGHESCMGAVVSEYFVLTAAHCFTVDDKEHSIKVSVGGEKRDLEIEVVLFHPNYNINGKKEAGIPEFYDYDVALIKLKNKLKYGQTIRPICLPCTEGTTRALRLPPTTTCQQQKEELLPAQDIKALFVSEEEKKLTRKEVYIKNGDKKGSCERDAQYAPGYDKVKDISEVVTPRFLCTGGVSPYADPNTCRGDSGGPLIVHKRSRFIQVGVISWGVVDVCKNQKRQKQVPAHARDFHINLFQVLPWLKEKLQDEDLGFL

SEQ ID NO: 1035 - protein, 112 aa, Homo sapiens
ECIPEPGARRTAQAAGLRSVSGAANTKVRELKHFRFLGLLRSCRSEMEVDAPGVDGRDGLRERRGFSEGGRQNFDVRPQSGANGLPKHSYWLDLWLFILFDVVVFLFVYFLP

SEQ ID NO: 1036 - protein, 333 aa, Homo sapiens
AAATASCAVGATRKDLIIMDLRQFLMCLSLCTAFALSKPTEKKDRVHHEPQLSDKVHNDAQSFDYDHDAFLGAEEAKTFDQLTPEESKERLGKIVSKIDGDKDGFVTVDELKDWIKFAQKRWIYEDVERQWKGHDLNEDGLVSWEEYKNATYGYVLDDPDPDDGFNYKQMMVRDERRFKMADKDGDLIATKEEFTAFLHPEEYDYMKDIVVQETMEDIDKNADGFIDLEEYIGDMYSHDGNTDEPEWVKTEREQFVEFRDKNRDGKMDKEETKDWILPSDYDHAEAEARHLVYESDQNKDGKLTKEEIVDKYDLFVGSQATDFGEALVRHDEF

SEQ ID NO: 1037 - protein, 135 aa, Homo sapiens
TVVEETRQFCLQKPIMAVTGDDTDEETELAPSHMAAATGDMPTYQIRAPTAALPQGVVMAASPGSLRSPQQLAEEATRKRELRLMKNREAARECRRKKKEYVKCLENRVAVLENQNKTLIEELKALKDLYCHKVE

SEQ ID NO: 1038 - protein, 206 aa, Homo sapiens
PLPTQLSVMASGNARIGKPAPDFKATAVVDGAFKEVKLSDYKGKYVVLFFYPLDFTFVCPTEIIAFSNRAEDFRKLGCEVLGVSVDSQFTHLAWINTPRKEGGLGPLNIPLLADVTRRLSEDYGVLKTDEGIAYRGLFIIDGKGVLRQITVNDLPVGRSVDEALRLVQAFQYTDEHGEVCPAGWKPGSDTIKPNVDDSKEYFSKHN

SEQ ID NO: 1039 - protein, 578 aa, Homo sapiens
GVGDGQAPMPGETEEPRPPEQQDQEGGEAAKAAPEEPQQRPPEAVAAAPAGTTSSRVLRGGRDRGRAAAAAAAAAVSRRRKAEYPRRRRSSPSARPPDVPGQQPQAAKSPSPVQGKKSPRLLCIEKVTTDKDPKEEKEEEDDSALPQEVSIAASRPSRGWRSSRTSVSRHRDTENTRSSRSKTGSLQLICKSEPNTDQLDYDVGEEHQSPGGISSEEEEEEEEEMLISEEEIPFKDDPRDETYKPHLERETPKPRRKSGKVKEEKEKKEIKVEVEVEVKEEENEIREDEEPPRKRGRRRKDDKSPRLPKRRKKPPIQYVRCEMEGCGTVLAHPRYLQHHIKYQHLLKKKYVCPHPSCGRLFRLQKQLLRHAKHHTDQRDYICEYCARAFKSSHNLAVHRMIHTGEKPLQCEICGFTCRQKASLNWHMKKHDADSFYQFSCNICGKKFEKKDSVVAHKAKSHPEVLIAEALAANAGALITSTDILGTNPESLTQPSDGQGLPLLPEPLGNSTSGECLLLEAEGMSKSYCSGTERVSLMADGKIFVGSGSSGGTEGLVMNSDILGATTEVLIEDSDSAGP

SEQ ID NO: 1040 - protein, 913 aa, Homo sapiens
RPATMAARPLPVSPARALLLALAGALLAPCEARGVSLWNQGRADEVVSASVRSGDLWIPVKSFDSKNHPEVLNIRLQRESKELIINLERNEGLIASSFTETHYLQDGTDVSLARNYTVILGHCYYHGHVRGYSDSAVSLSTCSGLRGLIVFENESYVLEPMKSATNRYKLFPAKKLKSVRGSCGSHHNTPNLAAKNVFPPPSQTWARRHKRETLKATKYVELVIVADNREFQRQGKDLEKVKQRLIEIANHVDKFYRPLNIRIVLVGVEVWNDMDKCSVSQDPFTSLHEFLDWRKMKLLPRKSHDNAQLVSGVYFQGTTIGMAPIMSMCTADQSGGIVMDHSDNPLGAAVTLAHELGHNFGMNHDTLDRGCSCQMAVEKGGCIMNASTGYPFPMVFSSCSRKDLETSLEKGMGVCLFNLPEVRESFGGQKCGNRFVEEGEECDCGEPEECMNRCCNATTCTLKPDAVCAHGLCCEDCQLKPAGTACRDSSNSCDLPEFCTGASPHCPANVYLHDGHSCQDVDGYCYNGICQTHEQQCVTLWGPGAKPAPGICFERVNSAGDPYGNCGKVSKSSFAKCEMRDAKCGKIQCQGGASRPVIGTNAVSIETNIPLQQGGRILCRGTHVYLGDDMPDPGLVLAGTKCADGKICLNRQCQNISVFGVHECAMQCHGRGVCNNRKNCHCEAHWAPPFCDKFGFGGSTDSGPIRQADNQGLTIGILVTILCLLAAGFVVYLKRKTLIRLLFTNKKTTIEKLRCVRPSRPPRGFQPCQAHLGHLGKGLMRKPPDSYPPKDNPRRLLQCQNVDISRPLNGLNVPQPQSTQRVLPPLHRAPRAPSVPARPLPAKPALRQAQGTCKPNPPQKPLPADPLARTTRLTHALARTPGQWETGLRLAPLRPAPQYPHQVPRSTHTAYIK

SEQ ID NO: 1041 - protein, 614 aa, Homo sapiens
SRAGPYRQAIALMAALAAAAKKVWSARRLLVLLFTPLALLPVVFALPPKEGRCLFVILLMAVYWCTEALPLSVTALLPIVLFPFMGILPSNKVCPQYFLDTNFLFLSGLIMASAIEEWNLHRRIALKILMLVGVQPARLILGMMVTTSFLSMWLSNTASTAMMLPIANAILKSLFGQKEVRKDPSQESEENTAAVRRNGYTLCPRRCSFSPSTEAKDHPGETEVPLDLPADSRKEDEYRRNIWKGFLISIPYSASIGGTATLTGTAPNLILLGQLKSFFPQCDVVNFGSWFIFAFPLMLLFLLAGWLWISFLYGGLSFRGWRKNKSEIRTNAEDRARAVIREEYQNLGPIKFAEQAVFILFCMFAILLFTRDPKFIPGWASLFNPGFLSDAVTGVAIVTILFFFPSQRPSLKWWFDFKAPNTETEPLLTWKKAQETVPWNIILLLGGGFAMAKGCEESGLSVWIGGQLHPLENVPPALAVLLITVVIAFFTEFASNTATIIIFLPVLAELAIRLRVHPLYLMIPGTVGCSFAFMLPVSTPPNSIAFASGHLLVKDMVRTGLLMNLMGVLLLSLAMNTWAQTIFQLGTFPDWADMYSVNVTALPPTLANDTFRTL

SEQ ID NO: 1042 - protein, 210 aa, Homo sapiens
  misc_feature (1)...(210): Xaa = any amino acid or nothing
IRAVQGLCESILHSLRDETAKVMVVSAQNAGLPGWATVACGVGPTSTVPRRRAFPSAGLLAGLQPTPMTLVFGCRCSQLDHLYRDEVQNAQQRGVFGRVLTAFSREPDNPKVXDPEGAMVYVQDILRTELAAEVHRVLCLERGHMFVCGDVTMATNVLQTVQRILATEGDMELDEAGDVIGVQSFSLQERQLRGAVPWAFDPPGSDTNSP

SEQ ID NO: 1043 - protein, 393 aa, Homo sapiens
RPALDTCCPFPARILGSFPLSQHLGPAFDTTPRLPTLRAWSLPQGPLSWAMAQKGVLGPGQLGAVAILLYLGLLRSGTGAEGAEAPCGVAPQARITGGSSAVAGQWPWQVSITYEGVHVCGGSLVSEQWVLSAAHCFPSEHHKEAYEVKLGAHQLDSYSEDAKVSTLKDIIPHPSYLQEGSQGDIALLQLSRPITFSRYIRPICLPAANASFPNGLHCTVTGWGHVAPSVSLLTPKPLQQLEVPLISRETCNCLYNIDAKPEEPHFVQEDMVCAGYVEGGKDACQGDSGGPLSCPVEGLWYLTGIVSWGDACGARNRPGVYTLASSYASWIQSKVTELQPRVVPQTQESQPDSNLCGSHLAFSSAPAQGLLRPILFLPLGLALGLLSPWLSEH

SEQ ID NO: 1044 - protein, 119 aa, Homo sapiens
  misc_feature (1)...(119): Xaa = any amino acid or nothing
DGALRCHQAGVHWHCLGSLQPPPPGFKRFSCLSLPSSWDYRHVPPCPANFCIFSRGEVSACWPGWSXTPDLVILPPWPPKVLGLQAWPPRPAVMLIMALKRCLTNLSYNVPQIFRAYLI

SEQ ID NO: 1045 - protein, 1400 aa, Homo sapiens
TFQGKFMDTKLMCLLFFFSLPPLLVSNHTGRIKVVFTPSICKVTCTKGSCQNSCEKGNTTTLISENGHAADTLTATNFRVVICHLPCMNGGQCSSRDKCQCPPNFTGKLCQIPVHGASVPKLYQHSQQPGKALGTHVIHSTHTLPLTVTSQQGVKVKFPPNIVNIHVKHPPEASVQIHQVSRIDGPTGQKTKEAQPGQSQVSYQGLPVQKTQTIHSTYSHQQVIPHVYPVAAKTQLGRCFQETIGSQCGKALPGLSKQEDCCGTVGTSWGFNKCQKCPKKPSYHGYNQMMECLPGYKRVNNTFCQDINECQLQGVCPNGECLNTMGSYRCTCKIGFGPDPTFSSCVPDPPVISEEKGPCYRLVSSGRQCMYPLSVHLTKQLCCCSVGKAGPHCEKCPLPGTAAFKEICPGGMGYTVSGVHRRRPIHHHVGKGPVFVKPKNTQPVAKSTHPPPLPAKEEPVEALTFSREHGARSAEPEVATAPPEKEIPSLDQEKTKLEPGQPQLSPGISAIHLHPQFPVVIEKTSPPVPVEVAPEASTSSASQVIAPTQVTEINECTVNPDICGAGHCINLPVRYTCICYEGYRFSEQQRKCVDIDECTQVQHLCSQGRCENTEGSFLCICPAGFMASEEGTNCIDVDECLRPDVCGEGHCVNTVGAFRCEYCDSGYRMTQRGRCEDIDECLNPSTCPDEQCVNSPGSYQCVPCTEGFRGWNGQCLDVDECLEPNVCANGDCSNLEGSYMCSCHKGYTRTPDHKHCRDIDECQQGNLCVNGQCKNTEGSFRCTCGQGYQLSAAKDQCEDIDECQHRHLCAHGQCRNTEGSFQCVCDQGYRASGLGDHCEDINECLEDKSVCQRGDCINTAGSYDCTCPDGFQLDDNKTCQDINECEHPGLCGPQGECLNTEGSFHCVCQQGFSISADGRTCEDIDECVNNTVCDSHGFCDNTAGSFRCLCYQGFQAPQDGQGCVDVNECELLSGVCGEAFCENVEGSFLCVCADENQEYSPMTGQCRSRTSTDLDVDVDQPKEEKKECYYNLNDASLCDNVLAPNVTKQECCCTSGAGWGDNCEIFPCPVLGTAEFTEMCPKGKGFVPAGESSSEAGGENYKDADECLLFGQEICKNGFCLNTRPGYECYCKQGTYYDPVKLQCFDMDECQDPSSCIDGQCVNTEGSYNCFCTHPMVLDASEKRCIRPAESNEQIEETDVYQDLCWEHLSDEYVCSRPLVGKQTTYTECCCLYGEAWGMQCALCPLKDSDDYAQLCNIPVTGRRQPYGRDALVDFSEQYTPEADPYFIQDRFLNSFEELQAEECGILNGCENGRCVRVQEGYTCDCLDGYHLDTAKMTCFDVNECDELNNRMSLCKNAKCINTDGSYKCLCLPGYVPSDKPNYCTPLNTALNLEKDSDLE

SEQ ID NO: 1046 - protein, 275 aa, Homo sapiens
IVDPRVRPLQEPGDMAAAVPRAAFLSPLLPLLLGFLLLSAPHGGSGLHTKGALPLDTVTFYKVIPKSKFVLVKFDTQYPYGEKQDEFKRLAENSASSDDLLVAEVGISDYGDKLNMELSEKYKLDKESYPVFYLFRDGDFENPVPYTGAVKVGAIQRWLKGQGVYLGMPGCLPVYDALAGEFIRASGVEARQALLKQGQDNLSSVKETQKKWAEQYLKIMGKILDQGEDFPASEMTRIARLIEKNKMSDGKKEELQKSLNILTAFQKKGAEKEEL

SEQ ID NO: 1047 - protein, 59 aa, Homo sapiens
LNNLLKHPSSSMILSMALNAHSSQKARDSMLSSEISLLDSCHSRVRYPFGCHSRMRHPK

SEQ ID NO: 1048 - protein, 826 aa, Homo sapiens
QLSSFETCAEKEESANTTESAIFEYHCEMSFDPNLLHNNGHNGYPNGTSAALRETGVIEKLLTSYGFIQCSERQARLFFHCSQYNGNLQDLKVGDDVEFEVSSDRRTGKPIAVKLVKIKQEILPEERMNGQVVCAVPHNLESKSPAAPGQSPTGSVCYERNGEVFYLTYTPEDVEGNVQLETGDKINFVIDNNKHTGAVSARNIMLLKKKQARCQGVVCAMKEAFGFIERGDVVKEIFFHYSEFKGDLETLQPGDDVEFTIKDRNGKEVATDVRLLPQGTVIFEDISIEHFEGTVTKVIPKVPSKNQNDPLPGRIKVDFVIPKELPFGDKDTKSKVTLLEGDHVRFNISTDRRDKLERATNIEVLSNTFQFTNEAREMGVIAAMRDGFGFIKCVDRDVRMFFHFSEILDGNQLHIADEVEFTVVPDMLSAQRNHAIRIKKLPKGTVSFHSHSDHRFLGTVEKEATFSNPKTTSPNKGKEKEAEDGIIAYDDCGVKLTIAFQAKDVEGSTSPQIGDKVEFSISDKQRPGQQVATCVRLLGRNSNSKRLLGYVATLKDNFGFIETANHDKEIFFHYSEFSGDVDSLELGDMVEYSLSKGKGNKVSAEKVNKTHSVNGITEEADPTIYSGKVIRPLRSVDPTQTEYQGMIEIVEEGDMKGEVYPFGIVGMANKGDCLQKGESVKFQLCVLGQNAQTMAYNITPLRRATVECVKDQFGFINYEVGDSKKLFFHVKEVQDGIELQAGDEVEFSVILNQRTGKCSACNVWRVCEGPKAVAAPRPDRLVNRLKNITLDDASAPRLMVLRQPRGPDNSMGFGAERKIRQAGVID

SEQ ID NO: 1049 - protein, 59 aa, Homo sapiens [sequence omitted]

SEQ ID NO: 1050 - protein, 1410 aa, Homo sapiens
DKGILVFQLKRRPPDHIPKKTKKHLEGKTPKGKERADGSGYGSTLPPEKLPYLVELSPGRRNHFAYYNYHTYEDGSDSRDKPKLYRLQLSVTEVGTEKLDDNSIQLFGPGIQPHHCDLTNMDGVVTVTPRSMDAETYVEGQRISETTMLQSGMKVQFGASHVFKFVDPSQDHALAKRSVDGGLMVKGPRHKPGIVQETTFDLGGDIHSGTALPTSKSTTRLDSDRVSSASSTAERGMVKPMIRVEQQPDYRRQESRTQDASGPELILPASIEFRESSEDSFLSAIINYTNSSTVHFKLSPTYVLYMACRYVLSNQYRPDISPTERTHKVIAVVNKMVSMMEGVIQKQKNIAGALAFWMANASELLNFIKQDRDLSRITLDAQDVLAHLVQMAFKYLVHCLQSELNNYMPAFLDDPEENSLQRPKIDDVLHTLTGAMSLLRRCRVNAALTIQLFSQLFHFINMWLFNRLVTDPDSGLCSHYWGAIIRQQLGHIEAWAEKQGLELAADCHLSRIVQATTLLTMDKYAPDDIPNINSTCFKLNSLQLQALLQNYHCAPDEPFIPTDLIENVVTVAENTADELARSDGREVQLEEDPDLQLPFLLPEDGYSCDVVRNIPNGLQEFLDPLCQRGFCRLIPHTRSPGTWTIYFEGADYESHLLRENTELAQPLRKEPEIITVTLKKQNGMGLSIVAAKGAGQDKLGIYVKSVVKGGAADVDGRLAAGDQLLSVDGRSLVGLSQERAAELMTRTSSVVTLEVAKQGAIYHGLATLLNQPSPMMQRISDRRGSGKPRPKSEGFELYNNSTQNGSPESPQLPWAEYSEPKKLPGDDRLMKNRADHRSSPNVANQPPSPGGKSAYASGTTAKITSVSTGNLCTEEQTPPPRPEAYPIPTQTYTREYFTFPASKSQDRMAPPQNQWPNYEEKPHMHTDSNHSSIAIQRVTRSQEELREDKAYQLERHRIEAAMDRKSDSDMWINQSSSLDSSTSSQEHLNHSSKSVTPASTLTKSGPGRWKTPAAIPATPVAVSQPIRTDLPPPPPPPPVHYAGDFDGMSMDLPLPPPPSANQIGLPSAQVAAAERRKREEHQRWYEKEKARLEEERERKRREQERKLGQMRTQSLNPAPFSPLTAQQMKPEKPSTLQRPQETVIRELQPQQQPRTIERRDLQYITVSKEELSSGTVCPPDPWKRDAKEKLEKQQQMHIVDMLSKEIQELQSKPDRSAEESDRLRKLMLEWQFQKRLQESKQKDEDDEEEEDDDVDTMLIMQRLEAERRARTAMPAISVLDLLQDEERRRQQQLEEMRKREAEDRARQEEERRRQEEERTKRDAEEKRRQEEGYYSRLEAERRRQHDEAARRLLEPEAPGLCRPPLPRDYEPPSPSPARRPSSPASAKRLLPQNTGPLPRLAVHCQVCCIQ

SEQ ID NO: 1051 - protein, 438 aa, Homo sapiens
HEGPNRRPRPRSPHRTRPPRAMAAPGSARRPLLLLLLLLLLGLMHCASAAMFMVKNGNGTACIMANFSAAFSVNYDTKSGPKNMTFDLPSDATVVLNRSSCGKENTSDPSLVIAFGRGHTLTLNFTRNATRYSVQLMSFVYNLSDTHLFPNASSKEIKTVESITDIRADIDKKYRCVSGTQVHMNNVTVTLHDATIQAYLSNSSFSRGETRCEQDRPSPTTAPPAPPSPSPSPVPKSPSVDKYNVSGTNGTCLLASMGLQLNLTYERKDNTTVTRLLNINPNKTSASGSCGAHLVTLELHSEGTTVLLFQFGMNASSSRFFLQGIQLNTILPDARDPAFKAANGSLRALQATVGNSYKCNAEEHVRVTKAFSVNIFKVWVQAFKVEGGQFGSVEECLLDENSMLIPIAVGGALAGLVLIVLIAYLVGRKRSHAGYQTI

SEQ ID NO: 1052 - protein, 178 aa, Homo sapiens
INPPPPPRVRRRRRSASWVGVAMASRVLSAYVSRLPAAFAPLPRVRMLAVARPLSTALCSAGTQTRLGTLQPALVLAQVPGRVTQLCRQYSDMPPLTLEGIQDRVLYVLKLYDKIDPEKLSVNSHFMKDLGLDSLDQVEIIMAMEDEFGFEIPDIDAEKLMCPQEIVDYIADKKDVYE

SEQ ID NO: 1053 - protein, 390 aa, Homo sapiens
LYPENLGESLFPILLLPPPWPDGGRPCCVEMSTRAKKLRRIWRILEEEESVAGAVQTLLLRSQEGGVTSAAASTLSEPPRRTQESRTRTRALGLPTLPMEKLAASTEPQGPRPVLGRESVQVPDDQDFRSFRSECEAEVGWNLTYSRAGVSVWVQAVEMDRTLHKIKCRMECCDVPAETLYDVLHDIEYRKKWDSNVIETFDIARLTVNADVGYYSWRCPKPLKNRDVITLRSWLPMGADYIIMNYSVKHPKYPPRKDLVRAVSIQTGYLIQSTGPKSCVITYLAQVDPKGSLPKWVVNKSSQFLAPKAMKKMYKACLKYPEWKQKHLPHFKPWLHPEQSPLPSLALSELSVQHADSLENIDESAVAEKQRGRGWGGAGGEGSDDDTSLT

SEQ ID NO: 1054 - protein, 53 aa, Homo sapiens
MNLQIGKYCFTTWRQRRKNRSHSGQATTLNKNLHKTELSLCSTICKYCITLNV

SEQ ID NO: 1055 - protein, 1043 aa, Homo sapiens
VAMATPAGLERWVQDELHSVLGLSERHVAQFLIGTAQRCTSAEEFVQRLRDTDTLDLSGPARDFALRLWNKVPRKAVVEKPARAAEREARALLEKNRSYRLLEDSEESSEETVSRAGSSLQKKRKKRKHLRKKREEEEEEEASEKGKKKTGGSKQQTEKPESEDEWERTERERLQDLEERDAFAERVRQRDKDRTRNVLERSDKKAYEEAQKRLKMAEEDRKAMVPELRKKSRREYLAKREREKLEDLEAELADEEFLFGDVELSRHERQELKYKRRVRDLAREYRAAGEQEKLEATNRYHMPKETRGQPARAVDLVEEESGAPGEEQRRWEEARLGAASLKFGARDAASQEPKYQLVLEEEETIEFVRATQLQGDEEPSAPPTSTQAQQKESIQAVRRSLPVFPFREELLAAIANHQVLIIEGETGSGKTTQIPQYLFEEGYTNKGMKIACTQPRRVAAMSVAARVAREMGVKLGNEVGYSIRFEDCTSERTVLRYMTDGMLLREFLSEPDLASYSVVMVDEAHERTLHTDILFGLIKDVARFRPELKVLVASATMDTARFSTFFDDAPVFRIPGRRFPVDIFYTKAPEADYLEACVVSVLQIHVTQPPGDILVFLTGQEEIEAACEMLQDRCRRLGSKIRELLVLPIYANLPSDMQARIFQPTPPGARKVVVATNIAETSLTIEGIIYVLDPGFCKQKSYNPRTGMESLTVTPCSKASANQRAGRAGRVAAGKCFRLYTAWAYQHELEETTVPEIQRTSLGNVVLLLKSLGIHDLMHFDFLDPPPYETLLLALEQLYALGALNHLGELTTSGRKMAELPVDPMLSKMILASEKYSCSEEILTVAAMLSVNNSIFYRPKDKVVHADNARVNFFLPGGDHLVLLNVYTQWAESGYSSQWCYENFVQFRSMRRARDVREQLEGLLERVEVGLSSCQGDYIRVRKAITAGYFYHTARLTRSGYRTVKQQQTVFIHPNSSLFEQQPRWLLYHELVLTTKEFMRQVLEIESSWLLEVAPHYYKAKELEDPHAKKMPKKIGKTREELG

SEQ ID NO: 1056 - protein, 734 aa, Homo sapiens
AATGKPASGTAATPKHPSPRMSEEIITPVYCTGVSAQVQKQRARELGLGRHENAIKYLGQDYEQLRVRCLQSGTLFRDEAFPPVPQSLGYKDLGPNSSKTYGIKWKRPTELLSNPQFIVDGATRTDICQGALGDCWLLAAIASLTLNDTLLHRVVPHGQSFQNGYAGIFHFQLWQFGEWVDVVVDDLLPIKDGKLVFVHSAEGNEFWSALLEKAYAKVNGSYEALSGGSTSEGFEDFTGGVTEWYELRKAPSDLYQIILKALERGSLLGCSIDISSVLDMEAITFKKLVKGHAYSVTGAKQVNYRGQVVSLIRMRNPWGEVEWTGAWSDSSSEWNNVDPYERDQLRVKMEDGEFWMSFRDFMREFTRLEICNLTPDALKSRTIRKWNTTLYEGTWRRGSTAGGCRNYPATFWVNPQFKIRLDETDDPDDYGDRESGCSFVLALMQKHRRRERRFGRDMETIGFAVYEVPPELVGQPAVHLKRDFFLANASRARSEQFINLREVSTRFRLPPGEYVVVPSTFEPNKEGDFVLRFFSEKSAGTVELDDQIQANLPDEQVLSEEEIDENFKALFRQLAGEDMEISVKELRTILNRIISKHKDLRTKGFSLESCRSMVNLMDRDGNGKLGLVEFNILWNRIRNYLSIFRKFDLDKSGSMSAYEMRMAIESAGFKLNKKLYELIITRYSEPDLAVDFDNFVCCLVRLETMFRFFKTLDTDLDGVVTFDLFKWLQLTMFA

SEQ ID NO: 1057 - protein, 231 aa, Homo sapiens
VVVLRPTRRGELWEVETAPSHGKEDEKGYHQTKEPHGLREGKAQNGVGEELLLQRRVPGITNDEAPKHSSNPSPRTSHPTEAGAAKMKFNPFVTSDRSKNRKRHFNAPSHIRRKIMSSPLSKELRQKYNVRSMPIRKDDEVQVVRGHYKGQQIGKVVQVYRKKYVIYIERVQREKANGTTVHVGIHPSKVVITRLKLDKDRKKILERKAKSRQVGKEKGKYKEETIEKMQE

SEQ ID NO: 1058 - protein, 367 aa, Homo sapiens
AMVLHLLLFLLLTPQGGHSCQGLELARELVLAKVRALFLDALGPPAVTREGGDPGVRRLPRRHALGGFTHRGSEPEEEEDVSQAILFPATDASCEDKSAARGLAQEAEEGLFRYMFRPSQHTRSRQVTSAQLWFHTGLDRQGTAASNSSEPLLGLLALSPGGPVAVPMSLGHAPPHWAVLHLATSALSLLTHPVLVLLLRCPLCTCSARPEATPFLVAHTRTRPPSGGERARRSTPLMSWPWSPSALRLLQRPPEEPAAHANCHRVALNISFQELGWERWIVYPPSFIFHYCHGGCGLHIPPNLSLPVPGAPPTPAQPYSLLPGAQPCCAALPGTMRPLHVRTTSDGGYSFKYETVPNLLTQHCACI

SEQ ID NO: 1059 - protein, 133 aa, Homo sapiens
  misc_feature (1)...(133): Xaa = any amino acid or nothing
QSHSVAQTGVQWCNLGPLQPPPPGFRXFSSISLPSSWDYRCRHHSWLIFLLLVEMGFCHVGHAGFKPLTSGDSLASASQSPGITGVSHHTWLLLTLQRARSGIQFEICCQSPILQSRTSGGDWGVHGPLPSGE

SEQ ID NO: 1060 - protein, 116 aa, Homo sapiens
  misc_feature (1)...(116): Xaa = any amino acid or nothing
FFLRQCFALVAQVGVQWHHLGSLQPLPPRFKRFSCLNLSGSWDYRRAPPNPANFVFLVETVFHHVGQAGLXLLTLSDPPASASQSAGITGVSHGAWDYRHESLCLAFSITFKSYFT

SEQ ID NO: 1061 - protein, 101 aa, Homo sapiens
LPSLLTILKRPPTSILLRTHVFPVCHLNTWNHHPPSWLNQNHSEIYLSFILFITASVKILIAGQARWLMPVILELWEAAAGGSRGQEIETILANMVKPCLY

SEQ ID NO: 1062 - protein, 288 aa, Homo sapiens
RAPGAHPQSATSRAPPGARMERLVIRMPFCHLSTYSLVWVMAAVVLCTAQVQVVTQDEREQLYTPASLKCSLQNAQEALIVTWQKKKAVSPENMVTFSENHGVVIQPAYKDKINITQLGLQNSTITFWNITLEDEGCYMCLFNTFGFGKISGTACLTVYVQPIVSLHYKFSEDHLNITCSATARPAPMVFWKVPRSGIENSTVTLSHPNGTTSVTSILHIKDPKNQVGKEVICQVLHLGTVTDFKQTVNKGYWFSVPLLLSIVSLVILLVLISILLYWKRHRNQDREP

SEQ ID NO: 1063 - protein, 486 aa, Homo sapiens
AGARQVTPPAAPSMRAGPGPTVTLALVLAVAWAMELKPTAPPIFTGRPFVVAWDVPTQDCGPRLKVPLDLNAFDVQASPNEGFVNQNITIFYRDRLGLYPRFDSAGRSVHGGVPQNVSLWAHRKMLQKRVEHYIRTQESAGLAVIDWEDWRPVWVRNWQDKDVYRRLSRQLVASRHPDWPPDRIVKQAQYEFEFAAQQFMLETLRYVKAVRPRHLWGFYLFPDCYNHDYVQNWESYTGRCPDVEVARNDQLAWLWAESTALFPSVYLDETLASSRHGRNFVSFRVQEALRVARTHHANHALPVYVFTRPTYSRRLTGLSEMDLISTIGESAALGAAGVILWGDAGYTTSTETCQYLKDYLTRLLVPYVVNVSWATQYCSRAQCHGHGRCVRRNPSASTFLHLSTNSFRLVPGHAPGEPQLRPVGELSWADIDHLQTHFRCQCYLGWSGEQCQWDHRQAAGGASEAWAGSHLTSLLALAALAFTWTL

SEQ ID NO: 1064 - protein, 476 aa, Homo sapiens
VHPGPATMSIHFSSPVFTSRSAAFSGRGAQVRLSSARPGGLGSSSLYGLGASRPRVAVRSAYGGPVGAGIREVTINQSLLAPLRLDADPSLQRVRQEESEQIKTLNNKFASFIDKVRFLEQQNKLLETKWTLLQEQKSAKSSRLPDIFEAQIAGLRGQLEALQVDGGRLEAELRSMQDVVEDFKNKYEDEINRRTAAENEFVVLKKDVDAAYMSKVELEAKVDALNDEINFLRTLNETELTELQSQISDTSVVLSMDNSRSLDLDGIIAEVKAQYEEMAKCSRAEAEAWYQTKFETLQAQAGKHGDDLRNTRNEISEMNRAIQRLQAEIDNIKNQRAKLEAAIAEAEERGELALKDARAKQEELEAALQRAKQDMARQLREYQELMSVKLALDIEIATYRKLLEGEESRLAGDGVGAVNISVMNSTGGSSSGGGIGLTLGGTMGSNALSFSSSAGPGLLKAYSIRTASASRRSARD

SEQ ID NO: 1065 - protein, 431 aa, Homo sapiens
KGRGEERKKARIPHPSPGRRGREERVLAKPSSVFHSVRLSRSRAGRMLVRRGARAGPRMPRGWTALCLLSLLPSGFMSLDNNGTATPELPTQGTFSNVSTNVSYQETTTPSTLGSTSLHPVSQHGNEATTNITETTVKFTSTSVITSVYGNTNSSVQSQTSVISTVFTTPANVSTPETTLKPSLSPGNVSDLSTTSTSLATSPTKPYTSSSPILSDIKAEIKCSGIREVKLTQGICLEQNKTSSCAEFKKDRGEGLARVLCGEEQADADAGAQVCSLLLAQSEVRPQCLLLVLANRTEISSKLQLMKKHQSDLKKLGILDFTEQDVASHQSYSQKTLIALVTSGALLAVLGITGYFLMNRRSWSPTGERLGEDPYYTENGGGQGYSSGPGTSPEAQGKASVNRGAQKNGTGQATSRNGHSARQHVVADTEL

SEQ ID NO: 1066 - protein, 94 aa, Homo sapiens
RPCPAEIMYCLQWLLPVLLIPKPLNPALWFSHSMFMGFYLLSFLLERKPCTICALVFLAALFLICYSCWGNCFLYHCSDSPLPESAHDPGVVGT

SEQ ID NO: 1067 - protein, 563 aa, Homo sapiens
EFSMECLYYFLGFLLLAARLPLDAAKRFHDVLGNERPSAYMREHNQLNGWSSDENDWNEKLYPVWKRGDMRWKNSWKGGRVQAVLTSDSPALVGSNITFAVNLIFPRCQKEDANGNIVYEKNCRNEAGLSADPYVYNWTAWSEDSDGENGTGQSHHNVFPDGKPFPHHPGWRRWNFIYVFHTLGQYFQKLGRCSVRVSVNTANVTLGPQLMEVTVYRRHGRAYVPIAQVKDVYVVTDQIPVFVTMFQKNDRNSSDETFLKDLPIMFDVLIHDPSHFLNYSTINYKWSFGDNTGLFVSTNHTVNHTYVLNGTFSLNLTVKAAAPGPCPPPPPPPRPSKPTPSLGPAGDNPLELSRIPDENCQINRYGHFQATITIVEGILEVNIIQMTDVLMPVPWPESSLIDFVVTCQGSIPTEVCTIISDPTCEITQNTVCSPVDVDEMCLLTVRRTFNGSGTYCVNLTLGDDTSLALTSTLISVPDRDPASPLRMANSALISVGCLAIFVTVISLLVYKKHKEYNPIENSPGNVVRSKGLSVFLNRAKAVFFPGNQEKDPLLKNQEFKGVS

SEQ ID NO: 1068 - protein, 596 aa, Homo sapiens
NSSAKHPAMEAADASRSNGSSPEARDARSPSGPSGSLENGTKADGKDAKTTNGHGGEAAEGKSLGSALKPGEGRSALFAGNEWRRPIIQFVESGDDKNSNYFSMDSMEGKRSPYAGLQLGAAKKPPVTFAEKGELRKSIFSESRKPTVSIMEPGETRRNSYPRADTGLFSRSKSGSEEVLCDSCIGNKQKAVKSCLVCQASFCELHLKPHLEGAAFRDHQLLEPIRDFEARKCPVHGKTMELFCQTDQTCICYLCMFQEHKNHSTVTVEEAKAEKETELSLQKEQLQLKIIEIEDEAEKWQKEKDRIKSFTTNEKAILEQNFRDLVRDLEKQKEEVRAALEQREQDAVDQVKVIMDALDERAKVLHEDKQTREQLHSISDSVLFLQEFGALMSNYSLPPPLPTYHVLLEGEGLGQSLGNFKDDLLNVCMRHVEKMCKADLSRNFIERNHMENGGDHRYVNNYTNSFGGEWSAPDTMKRYSMYLTPKGGVRTSYQPSSPGRFTKETTQKNFNNLYGTKGNYTSRVWEYSSSIQNSDNDLPVVQGSSSFSLKGYPSLMRSQSPKAQPQTWKSGKQTMLSHYRPFYVNKGNGIGSNEAP

SEQ ID NO: 1069 - protein, 216 aa, Homo sapiens
EQSRLGATERAAAAAMNPEYDYLFKLLLIGDSGVGKSCLLLRFADDTYTESYISTIGVDFKIRTIELDGKTIKLQIWDTAGQERFRTITSSYYRGAHGIIVVYDVTDQESYANVKQWLQEIDRYASENVNKLLVGNKSDLTTKKVVDNTTAKEFADSLGIPFLETSAKNATNVEQAFMTMAAEIKKRMGPGAASGGERPNLKIDSTPVKPAGGGCC

(The sequence listing continues in the following parts.)
